(19) United States
(12) Patent Application Publication
(10) Pub. No.: US 2019/0033306 A1
(43) Pub. Date: Jan. 31, 2019

(54) RECURRENT FUSION GENES IN HUMAN CANCERS

(71) Applicant: THE UNIVERSITY OF CHICAGO, Chicago, IL (US)

(72) Inventors: Kevin P. White, Chicago, IL (US); Chaitanya Bandlamudi, Chicago, IL (US)

(21) Appl. No.: 15/310,753

(22) PCT Filed: May 13, 2015
(86) PCT No.: PCT/US15/30677

§ 371 Date: Nov. 12, 2016

Related U.S. Application Data
(60) Provisional application No. 61/992,791, filed on May 13, 2014.

(51) Int. Cl. G01N 33/543; C07K 14/47; C07K 16/30

(52) U.S. Cl. CPC G01N 33/54353; C07K 14/47; C07K 16/30; C07K 2319/00; G01N 2800/56; G01N 2800/52; G01N 2800/7028

(57) ABSTRACT

Fusion transcripts are provided herein. In exemplary embodiments, the fusion transcript is encoded by a nucleic acid molecule comprising a general structure A-B, wherein structure A is a portion of a gene listed in Column A of Table 1 and structure B is a portion of a gene listed in Column B of Table 1, wherein the gene listed in Column A and the gene listed in Column B are listed in the same row of Table 1, wherein structure B is located immediately 3′ to structure A. Polypeptides encoded by the fusion transcript, nucleic acid molecules encoding the fusion transcript, and nucleic acid molecules comprising the reverse complement sequence of the fusion transcript, are additionally provided. Related expression vectors, host cells, binding agents, kits, and methods of using the same are further provided herein.

### CROSS-REFERENCE TO RELATED APPLICATIONS

[0001] This application claims the priority benefit of Provisional U.S. Patent Application No. 61/992,791, filed on May 13, 2014, which is incorporated by reference in its entirety.

### INCORPORATION BY REFERENCE OF MATERIAL SUBMITTED ELECTRONICALLY

[0002] Incorporated by reference in its entirety is a computer-readable nucleotide/amino acid sequence listing submitted concurrently herewith and identified as follows: 5,766,272 ASCII (Text) file named “48684A_SeqListing.txt,” created on May 13, 2015.

### BACKGROUND

[0003] Fusion genes are generated by genomic rearrangements that fuse domains from two distinct genes. Many fusions have been identified as driver mutations [Rowley et al., Nature 243(5405): 290-293 (1973); Soda et al., Nature 448(7153): 561-566 (2007)] and serve as effective therapeutic targets [Druker et al., N Engl J Med 344(14): 1031-1037 (2001); Kwak et al., N Engl J Med 363(18): 1693-1703 (2010)] in various cancers. Apart from a few highly recurrent fusion genes [Rowley et al., 1973, supra, Tomlins et al., Science 310(5748): 644-648 (2005)], a vast majority occur at low frequency [Perner et al., Neoplasia 10(3): 298-302 (2008), Wu et al., Cancer Discov 3(6): 636-647 (2013)], thereby rendering it difficult to identify and further analyze as a potential target for cancer therapy. While large sample sizes and fusion discovery methods aid in the process of low frequency fusion discovery, many methods suffer from a lack of sufficient sensitivity and/or specificity, and often times lead to the identification of false positives. Thus, highly sensitive methods of identifying fusions that occur at low frequency in cancer, and the identification of the fusions, are needed for advancing cancer diagnostics and therapy.

### SUMMARY

[0004] Provided herein are isolated fusion transcripts. Without being bound to any particular theory, the fusion transcripts provided herein are recurrent across multiple cancers and thus are useful in detecting cancer or a tumor in a subject. The fusion transcripts in some aspects encode a fusion polypeptide or a truncated polypeptide. The polypeptides encoded by the fusion transcripts also are believed to be useful in detecting and/or diagnosing cancer or a tumor in a subject and may serve as targets for anti-cancer or anti-tumor therapeutic agents.

[0005] In exemplary embodiments, the fusion transcript of the invention is encoded by a nucleic acid molecule comprising a general structure A-B, wherein structure A is a portion of a gene listed in Column A of Table 1 and structure B is a portion of a gene listed in Column B of Table 1, wherein the gene listed in Column A and the gene listed in Column B are listed in the same row of Table 1, wherein structure B is located immediately 3′ to structure A.

[0006] In exemplary aspects, the fusion transcript of the invention is encoded by a nucleic acid molecule comprising a structure A-B, wherein structure A is a portion of a gene listed in Column A of Table 1 and structure B is a portion of a gene listed in Column B of Table 1, wherein the gene listed in Column A and the gene listed in Column B are listed in the same row of Table 1 and the row is marked with an asterisk in the 2^{nd} column from the left, wherein structure B is located immediately 3′ to structure A.

[0007] In exemplary aspects, the fusion transcript of the invention is encoded by a nucleic acid molecule comprising a structure A-B, wherein structure A is a portion of a gene listed in Column A of Table 1 and structure B is a portion of a gene listed in Column B of Table 1, wherein the gene listed in Column A and the gene listed in Column B are listed in the same row of Table 1 and the row is not marked with a “#” in the 3^{rd} column from the left of Table 1, wherein structure B is located immediately 3′ to structure A.

[0008] In exemplary aspects, the fusion transcript of the invention is encoded by a nucleic acid molecule comprising a structure A-B, wherein structure A is a portion of a gene listed in Column A of Table 1 and structure B is a portion of a gene listed in Column B of Table 1, wherein the gene listed in Column A and the gene listed in Column B are listed in the same row of Table 1 and the the row is not marked with a “̂” in the 4^{th} column from the left, wherein structure B is located immediately 3′ to structure A.

[0009] Further embodiments and aspects of the fusion transcripts of the invention are provided herein.

[0010] Additionally provided herein are isolated polypeptides encoded by a fusion transcript of the invention. In exemplary aspects, the isolated polypeptide is a fusion polypeptide. In alternative aspects, the isolated polypeptide is a truncated polypeptide.

[0011] Isolated nucleic acid molecules are also provided herein. In exemplary embodiments, the isolated nucleic acid molecules encode a fusion transcript of the invention. In exemplary aspects, the isolated nucleic acid molecules comprise the reverse complement sequence of a fusion transcript. In exemplary aspects, the isolated nucleic acid molecules comprise sequence corresponding to an untranslated region of a gene.

[0012] Expression vectors are further provided herein. In exemplary embodiments, the expression vector comprises a fusion transcript of the invention. In exemplary embodiments, the expression vector comprises a nucleic acid molecule encoding a fusion transcript of the invention. In exemplary aspects, the expression vector comprises a nucleic acid molecule comprising the reverse complement sequence of a fusion transcript described herein. Provided herein are host cells comprising the expression vectors.

[0013] Also provided herein are binding agents. In exemplary embodiments, the binding agent specifically binds to a polypeptide encoded by a fusion transcript described herein. In exemplary embodiments, the binding agent specifically binds to a fusion transcript of the invention or to a nucleic acid molecule comprising the reverse complement sequence of a fusion transcript. In exemplary aspects, the binding agents specifically bind to a junction region of the fusion transcript, or of the polypeptide encoded thereby.

[0014] Kits comprising a binding agent of the invention is provided. In exemplary embodiments, the kit comprises a binding agent that specifically binds to a fusion polypeptide encoded by a fusion transcript encoded by a nucleic acid molecule comprising a structure A-B, wherein structure A is a portion of a gene listed in Column A of Table 1 and structure B is a portion of a gene listed in Column B of Table 1, wherein the gene listed in Column A and the gene listed in Column B are listed in the same row of Table 1, wherein structure B is located immediately 3′ to structure A. In exemplary aspects, the kit comprises a plurality of different binding agents, wherein each binding agent specifically binds to a different fusion polypeptide listed in one of Tables 1 to 4. In exemplary aspects, the kit comprises at least one binding agent that specifically binds to a fusion transcript encoded by a nucleic acid molecule comprising a structure A-B, wherein structure A is a portion of a gene listed in Column A of Table 1 and structure B is a portion of a gene listed in Column B of Table 1, wherein the gene listed in Column A and the gene listed in Column B are listed in the same row of Table 1 and the row is marked with an asterisk in the 2^{nd} column from the left, wherein structure B is located immediately 3′ to structure A. In exemplary aspects, the row is not marked with a “#” in the 3^{rd} column from the left of Table 1. In exemplary aspects, the row is not marked with a “̂” in the 4^{th} column from the left of Table 1. In exemplary aspects, the plurality collectively binds to each and every one of the fusion polypeptides listed in one of Tables 1 to 4.

[0015] Methods of detecting and/or diagnosing a cancer or a tumor in a subject are provided herein. In exemplary embodiments, the method comprises (i) contacting a binding agent that specifically binds to a polypeptide encoded by a fusion transcript of the invention with a sample obtained from the subject and (ii) determining the presence or absence of an immunoconjugate comprising the binding agent and the polypeptide, wherein a cancer or tumor is detected in the subject, when the immunoconjugate is determined as present. In exemplary embodiments, the method comprises (i) contacting one or more binding agents that specifically binds to a fusion transcript of the invention with a sample obtained from the subject, and (ii) determining (a) the structure of the molecule bound to the binding agent or (b) the presence or absence of a double stranded nucleic acid molecule comprising the binding agent and the fusion transcript, when the binding agent(s) bind(s) to either (a) a junction region of the fusion transcript comprising a portion of the 3′ end of structure A and a portion of the 5′ end of structure B, or (b) a portion of the structure A and portion of Structure B, wherein a cancer or tumor is detected in the subject, when the structure of the molecule is the structure of the fusion transcript or when the double stranded nucleic acid molecule is determined as present. In exemplary embodiments, the method comprises (i) generating a population of cDNAs from total RNA isolated from with a sample obtained from the subject, (ii) contacting one or more binding agent(s) which specifically bind(s) to a nucleic acid molecule comprising the reverse complement sequence of a fusion transcript, with a sample obtained from the subject, and (ii) determining (a) the structure of the molecule bound to the binding agent or (b) the presence or absence of a double stranded nucleic acid molecule comprising the binding agent(s) and the nucleic acid, when the binding agent binds to a sequence which is the reverse complement of a junction region of the fusion transcript comprising a portion of the 3′ end of structure A and a portion of the 5′ end of structure B, wherein a cancer or tumor is detected in the subject, when the structure of the molecule is the structure of the nucleic acid or when the double stranded nucleic acid molecule is determined as present.

[0016] In exemplary embodiments, the method of detecting and/or diagnosing a cancer or a tumor in a subject comprises (i) assaying a sample obtained from the subject for expression of a fusion transcript of the invention, expression of a polypeptide encoded by a fusion transcript of the invention, or presence of a nucleic acid molecule encoding a fusion transcript of the invention, when the sample is determined as positive for expression of the fusion transcript or expression of the polypeptide or presence of the nucleic acid molecule.

[0017] Methods of treating a cancer or a tumor in a subject are also provided herein. In exemplary embodiments, the method comprises (i) assaying a sample obtained from the subject for expression of a fusion transcript of the invention, a polypeptide encoded by a fusion transcript of the invention, or a nucleic acid molecule encoding a fusion transcript of the invention, and (ii) administering to the subject an anti-cancer therapeutic agent in an amount effective for treating a cancer or tumor, when the sample is determined as positive for expression of the fusion transcript or expression of the polypeptide or presence of the nucleic acid molecule.

[0018] Methods of determining a subject's need for an anti-cancer therapeutic agent is provided herein. In exemplary embodiments, the method comprises assaying a sample obtained from the subject for expression of a fusion transcript of the invention, a polypeptide encoded by a fusion transcript of the invention, or a nucleic acid molecule encoding a fusion transcript of the invention, wherein the subject needs an anti-cancer therapeutic agent, when the sample is determined as positive for expression of the fusion transcript, fusion polypeptide or nucleic acid molecule.

### BRIEF DESCRIPTION OF THE DRAWINGS

[0019] FIG. 1 represents a graph of the fold-change in proliferation (relative to control) for seven fusion gene cell lines.

[0020] FIG. 2 represents a graph of tumor growth over time post implantation of fusion cell lines.

[0021] FIG. 3 is an illustration of fusion genes and fusion gene transcripts.

### DETAILED DESCRIPTION

[0022] The invention provides isolated nucleic acid molecules comprising a nucleotide sequence of novel fusion genes generated by genomic rearrangements that fuse domains from two distinct genes, and portions thereof, optionally, wherein the portion comprises the junction between the two genes. In exemplary aspects, the nucleic acid molecule comprises the nucleotide sequence (e.g., DNA sequence) of the full length fusion gene, including coding and non-coding sequence. In exemplary aspects, the nucleic acid molecule comprises the nucleotide sequence of only the coding sequence of the fusion gene. In exemplary aspects, the coding sequence encodes a transcript, e.g. an RNA transcript. In exemplary aspects, the transcript comprises fused domains encoded by two distinct genes and, in such aspects, the transcript is referenced herein as a “fusion transcript” or a “fusion gene transcript”. The invention provides isolated fusion transcripts as described herein. Further descriptions of the nucleic acid molecules and the fusion transcripts provided herein are provided below.

[0023] Fusion Transcripts

[0024] The invention provides novel fusion transcripts which are expressed in cancer cells or tumor cells. In exemplary aspects, the fusion transcript is encoded by a nucleic acid molecule comprising a general structure A-B, wherein structure A is a portion of a gene listed in Column A of Table 1 and structure B is a portion of a gene listed in Column B of Table 1, wherein the gene listed in Column A and the gene listed in Column B are listed in the same row of Table 1, wherein structure B is located immediately 3′ to structure A.

TABLE 1

| | | | | | | | | | | Reverse |
|---|---|---|---|---|---|---|---|---|---|---|
| | | | | | | Entrez | Entrez | Fusion CDS | | complement |
| | | | | | | Gene ID | Gene ID | cDNA | FL cDNA | of FL cDNA |
| Fusion Gene | * | # | \hat{ } | Column A | Column B | (Col. A) | (Col. B) | (SEQ ID NO:) | (SEQ ID NO:) | (SEQ ID NO:) |
| ACTN4_EIF3K | * | # | | ACTN4 | EIF3K | 81 | 27335 | 396-404 | 1396-1404 | 2396-2404 |
| ADAP1_GET4 | * | # | | ADAP1 | GET4 | 11033 | 51608 | 185-187 | 1185-1187 | 2185-2187 |
| ADRBK2_IGLL3P | * | # | | ADRBK2 | IGLL3P | 157 | 91353 | | | |
| AK125727_ANGEL1 | * | # | | AK125727 | ANGEL1 | | 23357 | | | |
| ARL15_NDUFS4 | * | | | ARL15 | NDUFS4 | 54622 | 4724 | 796-799 | 1796-1799 | 2796-2799 |
| ASCC1_MICU1 | * | | | ASCC1 | MICU1 | 51008 | 10367 | 299-310 | 1299-1310 | 2299-2310 |
| ASH1L_GON4L | * | | | ASH1L | GON4L | 55870 | 54856 | 42-60 | 1042-1060 | 2042-2060 |
| ATXN7_THOC7 | * | # | | ATXN7 | THOC7 | 6314 | 80145 | 108 | 1108 | 2108 |
| BC030525_LOC553103 | * | # | | BC030525 | LOC553103 | | 553103 | | | |
| BMPR1B_PDLIM5 | * | | | BMPR1B | PDLIM5 | 658 | 10611 | 453-475 | 1453-1475 | 2453-2475 |
| BRE_MRPL33 | * | # | | BRE | MRPL33 | 9577 | 9553 | 311-318 | 1311-1318 | 2311-2318 |
| C1orf63_TMEM50A | * | # | | C1orf63 | TMEM50A | 57035 | 23585 | | | |
| C7orf50_MAD1L1 | * | | | C7orf50 | MAD1L1 | 84310 | 8379 | 352-355 | 1352-1355 | 2352-2355 |
| CAPZA2_MET | * | | | CAPZA2 | MET | 830 | 4233 | 671-684 | 1671-1684 | 2671-2684 |
| CCAT1_LOC727677 | * | # | | CCAT1 | LOC727677 | | 727677 | | | |
| CCDC6_ANK3 | | | | CCDC6 | ANK3 | 8030 | 288 | 476-501 | 1476-1501 | 2476-2501 |
| CD44_PDHX | * | | | CD44 | PDHX | 960 | 8050 | 697-705 | 1697-1705 | 2697-2705 |
| CMTM7_CMTM8 | * | | | CMTM7 | CMTM8 | 112616 | 152189 | 348-351 | 1348-1351 | 2348-2351 |
| COL14A1_DEPTOR | * | | | COL14A1 | DEPTOR | 7373 | 64798 | 266-275 | 1266-1275 | 2266-2275 |
| CTSB_FDFT1 | * | # | | CTSB | FDFT1 | 1508 | 2222 | 576-590 | 1576-1590 | 2576-2590 |
| CUL4A_PCID2 | * | # | | CUL4A | PCID2 | 8451 | 55795 | 411-412 | 1411-1412 | 2411-2412 |
| DYNLRB1_ITCH | * | # | | DYNLRB1 | ITCH | 83658 | 83737 | 662 | 1662 | 2662 |
| EIF2C2_PTK2 | * | | | EIF2C2 | PTK2 | 27161 | 5747 | 502-509 | 1502-1509 | 2502-2509 |
| EIF3B_MAD1L1 | * | | | EIF3B | MAD1L1 | 8662 | 8379 | 116-132 | 1166-1132 | 2116-2132 |
| ESR1_CCDC170 | | | | ESR1 | CCDC170 | 2099 | 80129 | 720-725 | 1720-1725 | 2720-2725 |
| EXOC4_CHCHD3 | * | | | EXOC4 | CHCHD3 | 60412 | 54927 | 136-160 | 1136-1160 | 2136-2160 |
| EXT1_SAMD12 | * | | \hat{ } | EXT1 | SAMD12 | 2131 | 401474 | 800-801 | 1800-1801 | 2800-2801 |
| FAM162A_CCDC58 | * | # | | FAM162A | CCDC58 | 26355 | 131076 | | | |
| FAM190A_MMRN1 | * | | | FAM190A | MMRN1 | 401145 | 22915 | 685-687 | 1685-1687 | 2685-2687 |
| FAM3B_BACE2 | * | | | FAM3B | BACE2 | 54097 | 25825 | 340-347 | 1340-1347 | 2340-2347 |
| FANCL_VRK2 | * | # | | FANCL | VRK2 | 55120 | 7444 | 591-632 | 1591-1632 | 2591-2632 |
| FLJ22447_PRKCH | * | | \hat{ } | FLJ22447 | PRKCH | 400221 | 5583 | 133-134, | 1133-1134, | 2133-2134, |
| | | | | | | | | 802-803 | 1802-1803 | 2802-2803 |
| FRMD6_LOC283553 | * | | \hat{ } | FRMD6 | LOC283553 | 122786 | 283553 | 804-805 | 1804-1805 | 2804-2805 |
| FRS2_LYZ | * | | \hat{ } | FRS2 | LYZ | 10818 | 4069 | 806-807 | 1806-1807 | 2806-2807 |
| GTF2I_GTF2IRD1 | | | | GTF2I | GTF2IRD1 | 2969 | 9569 | 538-569 | 1538-1569 | 2538-2569 |
| HIAT1_SLC35A3 | * | # | | HIAT1 | SLC35A3 | 64645 | 23443 | 706-708 | 1706-1708 | 2706-2708 |
| HIF1A_PRKCH | * | # | | HIF1A | PRKCH | 3091 | 5583 | 170-179 | 1170-1179 | 2170-2179 |
| HP1BP3_EIF4G3 | * | | | HP1BP3 | EIF4G3 | 50809 | 8672 | 715-719 | 1715-1719 | 2715-2719 |
| IFT43_TTLL5 | * | | | IFT43 | TTLL5 | 112752 | 23093 | 291-293 | 1291-1293 | 2291-2293 |
| KAT6B_ADK | * | | | KAT6B | AD K | 23522 | 132 | 641-642 | 1641-1642 | 2641-2642 |
| KIF26B_SMYD3 | * | | | KIF26B | SMYD3 | 55083 | 64754 | 244-260 | 1244-1260 | 2244-2260 |
| LMO7_UCHL3 | * | | | LMO7 | UCH L3 | 4008 | 7347 | 663-670 | 1663-1670 | 2663-2670 |
| LOC100128675_LGI4 | * | # | | LOC100128675 | LGI4 | 100128675 | 163175 | 726-727 | 1726-1727 | 2726-2727 |
| LOC100133445_TNFRSF14 | * | # | | LOC100133445 | TNFRSF14 | 100133445 | 8764 | 661 | 1661 | 2661 |
| LOC100499467_SLC39A11 | * | | \hat{ } | LOC100499467 | SLC39A11 | 100499467 | 201266 | 808-809 | 1808-1809 | 2808-2809 |
| LRBA_SH3D19 | | | | LRBA | SH3D19 | 987 | 152503 | 534-537 | 1534-1537 | 2534-2537 |
| LYPD6_LYPD6B | * | | | LYPD6 | LYPD6B | 130574 | 130576 | 61-63 | 1061-1063 | 2061-2063 |
| MATR3_CTNNA1 | * | | | MATR3 | CTNNA1 | 9782 | 1495 | 103-106 | 1103-1106 | 2103-2106 |
| MBD3_UQCR11 | * | # | | MBD3 | UQCR11 | 53615 | 10975 | 107 | 1107 | 2107 |
| MLL5_LHFPL3 | * | | | MLL5 | LHFPL3 | 55904 | 375612 | 633-638 | 1633-1638 | 2633-2638 |
| MTAP_FLJ35282 | * | # | | MTAP | FLJ35282 | 4507 | 441389 | | | |
| MYH9_TXN2 | * | | | MYH9 | TXN2 | 4627 | 25828 | 521-524 | 1521-1524 | 2521-2524 |
| MYO6_SENP6 | | | | MYO6 | SENP6 | 4646 | 26054 | 394-395 | 1394-1395 | 2394-2395 |
| NCOA3_EYA2 | * | | | NCOA3 | EYA2 | 8202 | 2139 | 391-395 | 1391-1395 | 2391-2395 |
| NCOR2_SCARB1 | * | | | NCOR2 | SCARB1 | 9612 | 949 | 216-243 | 1216-1243 | 2216-2243 |
| NDRG1_B2M | * | # | | NDRG1 | B2M | 10397 | 567 | | | |
| NOC4L_FBRSL1 | * | # | | NOC4L | FBRSL1 | 79050 | 57666 | 709-710 | 1709-1710 | 2709-2710 |
| NSD1_ZNF346 | * | | | NSD1 | ZNF346 | 64324 | 23567 | 6-41 | | |
| NTN1_STX8 | * | # | | NTN1 | STX8 | 9423 | 9482 | 688-696 | 1688-1696 | 2688-2696 |
| PABPC1_YWHAZ | * | # | | PABPC1 | YWHAZ | 26986 | 7534 | 320-333 | 1320-1333 | 2320-2333 |
| PDE4D_DEPDC1B | * | | | PDE4D | DEPDC1B | 5144 | 55789 | 294-298 | 1294-1298 | 2294-2298 |
| PPFIBP1_C12orf70 | * | | \hat{ } | PPFIBP1 | C12orf70 | 8496 | 341346 | 810 | 1810 | 2810 |
| PPP1CB_PLB1 | * | | | PPP1CB | PLB1 | 5500 | 151056 | 188-202 | 1188-1202 | 2188-2202 |
| PTPRK_RSPO3 | | | | PTPRK | RSPO3 | 5796 | 84870 | 510-520 | 1510-1520 | 2510-2520 |
| QKI_PACRG | * | | | QKI | PACRG | 9444 | 135138 | 276-279 | 1276-1279 | 2276-2279 |
| RAB40C_TMEM8A | * | # | | RAB40C | TMEM8A | 57799 | 58986 | 204 | 1204 | 2204 |
| RB1_ITM2B | | | | RB1 | ITM2B | 5925 | 9445 | 659-660 | 1659-1660 | 2659-2660 |
| REV3L_FYN | * | # | | REV3L | FYN | 5980 | 2534 | 109-115 | 1109-1115 | 2109-2115 |
| RMST_C9orf3 | * | # | | RMST | C9orf3 | 196475 | 84909 | | | |
| RPL39L_ST6GAL1 | * | # | | RPL39L | ST6GAL1 | 116832 | 6480 | 639-640 | 1639-1640 | 2639-2640 |
| RPS15A_ARL6IP1 | * | # | | RPS15A | ARL6IP1 | 6210 | 23204 | 261-265 | 1261-1265 | 2261-2265 |
| RPS6KB1_VMP1 | | | | RPS6KB1 | VMP1 | 6197 | 81671 | 413-452 | 1413-1452 | 2413-2452 |
| SGK1_AJ606331 | * | # | | SGK1 | AJ606331 | 6446 | | | | |
| SH3PXD2A_OBFC1 | * | | | SH3PXD2A | OBFC1 | 9644 | 79991 | 100-102 | 1100-1102 | 2100-2102 |
| SKP1_CDKL3 | | | | SKP1 | CDKL3 | 6500 | 51625 | 406-410 | 1406-1410 | 2406-2410 |
| SLPI_WFDC2 | * | | | SLPI | WFDC2 | 6590 | 10406 | 532-533 | 1532-1533 | 2532-2533 |
| SMARCC1_MAP4 | * | | | SMARCC1 | MAP4 | 6599 | 4134 | 64-99 | 1064-1099 | 2064-2099 |
| SNX29P1_CRYM-AS1 | * | # | | SNX29P1 | CRYM-AS1 | 400509 | 400508 | | | |
| SOLH_TMEM8A | * | # | | SOLH | TMEM8A | 6650 | 58986 | 405 | 1405 | 2405 |
| SORL1_TECTA | * | | | SORL1 | TECTA | 6653 | 7007 | 1-5 | | |
| SRPK2_PUS7 | * | | | SRPK2 | PUS7 | 6733 | 54517 | 182-184 | 1182-1184 | 2182-2184 |
| ST6GAL1_RPL39L | * | # | | ST6GAL1 | RPL39L | 6480 | 116832 | 135 | 1135 | 2135 |
| STX5_WDR74 | * | | | STX5 | WDR74 | 6811 | 54663 | 525-531 | 1525-1531 | 2525-2531 |
| TANC1_PKP4 | * | | | TANC1 | PKP4 | 85461 | 8502 | 356-367 | 1356-1367 | 2356-2367 |
| TFDP1_TMCO3 | * | | | TFDP1 | TMCO3 | 7027 | 55002 | 280-290 | 1280-1290 | 2280-2290 |
| THSD4_LRRC49 | * | | | THSD4 | LRRC49 | 79875 | 54839 | 207-215 | 1207-1215 | 2207-2215 |
| TLK2_METTL2B | * | | | TLK2 | METTL2B | 11011 | 55798 | | | |
| TNRC18_RNF216 | * | | \hat{ } | TNRC18 | RNF216 | 84629 | 54476 | 575, 811 | 1575, 1811 | 2575, 2811 |
| TRPS1_EIF3H | * | # | | TRPS1 | EIF3H | 7227 | 8667 | 368-385 | 1368-1385 | 2368-2385 |
| TTC6_MIPOL1 | * | | | TTC6 | MIPOL1 | 319089 | 145282 | | | |
| TTYH3_MAD1L1 | * | | | TTYH3 | MAD1L1 | 80727 | 8379 | 643-658 | 1643-1658 | 2643-2658 |
| UBE2E1_UBE2E2 | * | # | | UBE2E1 | UBE2E2 | 7324 | 7325 | 711-714 | 1711-1714 | 2711-2714 |
| UBE2Z_SNF8 | * | # | | UBE2Z | SNF8 | 65264 | 11267 | 334-339 | 1334-1339 | 2334-2339 |
| USP22_MYH10 | * | | | USP22 | MYH10 | 23326 | 4628 | 161-169 | 1161-1169 | 2161-2169 |
| VAPB_GNAS | * | # | | VAPB | GNAS | 9217 | 2778 | 386-390 | 1386-1390 | 2386-2390 |
| VRK2_FANCL | * | # | | VRK2 | FANCL | 7444 | 55120 | 728-795 | 1728-1795 | 2728-2795 |
| WASF2_AHDC1 | * | | | WASF2 | AHDC1 | 10163 | 27245 | 205-206 | 1205-1206 | 2205-2206 |
| XKR9_LACTB2 | * | # | | XKR9 | LACTB2 | 389668 | 51110 | | | |
| XPR1_BC036830 | * | # | | XPR1 | BC036830 | 9213 | | | | |
| YWHAE_CRK | * | # | | YWHAE | CRK | 7531 | 1398 | 180-181 | 1180-1181 | 2180-2181 |
| YWHAE_GNAS | * | # | | YWHAE | GNAS | 7531 | 2778 | 570-574 | 1570-1574 | 2570-2574 |
| ZBTB20_LSAMP | * | | \hat{ } | ZBTB20 | LSAMP | 26137 | 4045 | 812 | 1812 | 2812 |
| ZC3H7A_BCAR4 | * | | | ZC3H7A | BCAR4 | 29066 | 400500 | 319 | 1319 | 2319 |
| ZFYVE21_KLC1 | * | # | | ZFYVE21 | KLC1 | 79038 | 3831 | 203 | 1203 | 2203 |
| DNAJC24_IMMP1L | * | | | DNAJC24 | IMMP1L | 120526 | 196294 | 813 | 1813 | 2813 |
| GRB7_ERBB2 | * | | | GRB7 | ERBB2 | 2886 | 2064 | 814-824 | 1814-1824 | 2814-2824 |
| LITAF_BCAR4 | * | | | LITAF | BCAR4 | 9516 | 400500 | 825-828 | 1825-1828 | 2825-2828 |
| REXO1_KLF16 | * | | | REXO1 | KLF16 | 57455 | 83855 | 836 | 1836 | 2836 |
| RGNEF_BTF3 | * | | | RGNEF | BTF3 | 64283 | 689 | 837-840 | 1837-1840 | 2837-2840 |
| TYMS_SEPT9 | * | | | TYMS | SEPT9 | 7298 | 10801 | 843 | 1843 | 2843 |
| WASF2_IFI6 | * | | | WASF2 | IF16 | 10163 | 2537 | 844 | | |

“*” Novel fusion transcript
“#” fusions that were detected at <5× enrichment in primary tumors, relative to the 3,600 cell line and tissue transcriptomes from healthy individuals.
“\hat{ }” out of frame
CDS = coding sequence
FL = full length

[0025] In exemplary aspects, the fusion transcript is encoded by a nucleic acid molecule comprising a general structure A-B, wherein structure A is a portion of a gene listed in Column A of Table 1 and structure B is a portion of a gene listed in Column B of Table 1, wherein the gene listed in Column A and the gene listed in Column B are listed in the same row of Table 1 and the row is marked with an asterisk in the 2^{nd} column from the left, wherein structure B is located immediately 3′ to structure A. These fusion transcripts are believed to be novel.

[0026] In exemplary aspects, the fusion transcript is encoded by a nucleic acid molecule comprising a general structure A-B, wherein structure A is a portion of a gene listed in Column A of Table 1 and structure B is a portion of a gene listed in Column B of Table 1, wherein the gene listed in Column A and the gene listed in Column B are listed in the same row of Table 1 and the row is not marked with a “#” in the 3^{rd} column from the left, wherein structure B is located immediately 3′ to structure A. These fusion transcripts not having a “#” in the 3rd column are believed to be present in primary tumors at a level which is at least 5× that found in healthy individuals.

[0027] In exemplary aspects, the fusion transcript is encoded by a nucleic acid molecule comprising a general structure A-B, wherein structure A is a portion of a gene listed in Column A of Table 1 and structure B is a portion of a gene listed in Column B of Table 1 and the row is not marked with a “̂” in the 4^{th} column from the left, wherein the gene listed in Column A and the gene listed in Column B are listed in the same row of Table 1, wherein structure B is located immediately 3′ to structure A. These fusion transcripts not having a “̂” in the 4^{th} column are believed to be in frame.

[0028] In exemplary aspects, the fusion transcript of the invention is encoded by a nucleic acid molecule comprising a structure A-B, wherein structure A is a portion of a gene listed in Column A of Table 1 and structure B is a portion of a gene listed in Column B of Table 1, wherein the gene listed in Column A and the gene listed in Column B are listed in the same row of Table 1 and the row is (a) marked with an asterisk in the 2^{nd} column from the left, (b) not marked with a “#” in the 3^{rd} column from the left, (c) not marked with a “̂” in the 4^{th} column from the left, or (d) a combination thereof, wherein structure B is located immediately 3′ to structure A. In exemplary aspects, the row is marked with an asterisk in the 2^{nd} column from the left, not marked with a “#” in the 3^{rd} column from the left, and not marked with a “̂” in the 4^{th} column from the left. In exemplary aspects, the row is marked with an asterisk in the 2^{nd} column from the left, not marked with a “#” in the 3^{rd} column from the left, but is marked with a “̂” in the 4^{th} column from the left. In exemplary aspects, the row is marked with an asterisk in the 2^{nd} column from the left, marked with a “#” in the 3^{rd} column from the left, and is not marked with a “̂” in the 4^{th} column from the left. In exemplary aspects, the row is not marked with an asterisk in the 2^{nd} column from the left, not marked with a “#” in the 3^{rd} column from the left, and not marked with a “̂” in the 4^{th} column from the left.

[0029] In exemplary aspects, the fusion transcript is encoded by a nucleic acid molecule comprising a general structure A-B, wherein structure A is a portion of a gene listed in Column A of Table 2 and structure B is a portion of a gene listed in Column B of Table 2, wherein the gene listed in Column A and the gene listed in Column B are listed in the same row of Table 2, wherein structure B is located immediately 3′ to structure A. Table 2 lists a subset of the fusion transcripts listed in Table 1 which have been validated or are in the process of being validated.

TABLE 2

| | | | | | Fusion | |
|---|---|---|---|---|---|---|
| | | | Entrez | Entrez | Polypeptide | Col. A Gene Name/Entrez Gene |
| | | | Gene ID | Gene ID | (SEQ ID | ID/Col. B Gene Name/Entrez |
| Fusion Gene | Column A | Column B | (Col. A) | (Col. B) | NOs:) | Gene ID |
| ARL15_NDUFS4 | ARL15 | NDUFS4 | 54622 | 4724 | 796-799 | ARL15\|54622_NDUFS4\|4724 |
| BMPR1B_PDLIM5 | BMPR1B | PDLIM5 | 658 | 10611 | 453-475 | BMPR1B\|658_PDLIM5\|10611 |
| CAPZA2_MET | CAPZA2 | MET | 830 | 4233 | 671-684 | CAPZA2\|830_MET\|4233 |
| CD44_PDHX | CD44 | PDHX | 960 | 8050 | 697-705 | CD44\|960_PDHX\|8050 |
| LMO7_UCHL3 | LMO7 | UCHL3 | 4008 | 7347 | 663-670 | LMO7\|4008_UCHL3\|7347 |
| MATR3_CTNNA1 | MATR3 | CTNNA1 | 9782 | 1495 | 103-106 | MATR3\|9782_CTNNA1\|1495 |
| PPP1CB_PLB1 | PPP1CB | PLB1 | 5500 | 151056 | 188-202 | PPP1CB\|5500_PLB1\|151056 |
| SORL1_TECTA | SORL1 | TECTA | 6653 | 7007 | 1-5 | SORL1\|6653_TECTA\|7007 |
| TTYH3_MAD1L1 | TTYH3 | MAD1L1 | 80727 | 8379 | 643-658 | TTYH3\|80727_MAD1L1\|8379 |
| USP22_MYH10 | USP22 | MYH10 | 23326 | 4628 | 161-169 | USP22\|23326_MYH10\|4628 |
| ZC3H7A_BCAR4 | ZC3H7A | BCAR4 | 29066 | 400500 | 319 | ZC3H7A\|29066_BCAR4\|400500 |

[0030] In exemplary aspects, the fusion transcript encoded by a nucleic acid molecule comprising a general structure A-B, wherein structure A is a portion of a gene listed in Column A of Table 3 and structure B is a portion of a gene listed in Column B of Table 3, wherein the gene listed in Column A and the gene listed in Column B are listed in the same row of Table 3, wherein structure B is located immediately 3′ to structure A. Table 3 lists a subset of fusion transcripts listed in Table 1 which have been subjected to in vitro growth assays.

TABLE 3

| | | | | | Fusion | |
|---|---|---|---|---|---|---|
| | | | Entrez | Entrez | Polypeptide | Col. A Gene Name/Entrez Gene |
| | | | Gene ID | Gene ID | (SEQ ID | ID/Col. B Gene Name/Entrez |
| Fusion Gene | Column A | Column B | (Col. A) | (Col. B) | NOs:) | Gene ID |
| ARL15_NDUFS4 | ARL15 | NDUFS4 | 54622 | 4724 | 796-799 | ARL15\|54622_NDUFS4\|4724 |
| BMPR1B_PDLIM5 | BMPR1B | PDLIM5 | 658 | 10611 | 453-475 | BMPR1B\|658_PDLIM5\|10611 |
| CAPZA2_M ET | CAPZA2 | MET | 830 | 4233 | 671-684 | CAPZA2\|830_MET\|4233 |
| CD44_PDHX | CD44 | PDHX | 960 | 8050 | 697-705 | CD44\|960_PDHX\|8050 |
| LMO7_UCHL3 | LMO7 | UCHL3 | 4008 | 7347 | 663-670 | LMO7\|4008_UCHL3\|7347 |
| ZC3H7A_BCAR4 | ZC3H7A | BCAR4 | 29066 | 400500 | 319 | ZC3H7A\|29066_BCAR4\|400500 |

[0031] In exemplary aspects, the fusion transcript encoded by a nucleic acid molecule comprising a general structure A-B, wherein structure A is a portion of a gene listed in Column A of Table 4 and structure B is a portion of a gene listed in Column B of Table 4, wherein the gene listed in Column A and the gene listed in Column B are listed in the same row of Table 4, wherein structure B is located immediately 3′ to structure A. Table 4 lists a subset of fusion transcripts listed in Table 1 which have been subjected to tumor growth assays.

TABLE 4

| | | | | | Fusion | |
|---|---|---|---|---|---|---|
| | | | Entrez | Entrez | Polypeptide | Col. A Gene Name/Entrez Gene |
| | | | Gene ID | Gene ID | (SEQ ID | ID/Col. B Gene Name/Entrez |
| Fusion Gene | Column A | Column B | (Col. A) | (Col. B) | NOs:) | Gene ID |
| BMPR1B_PDLIM5 | BMPR1B | PDLIM5 | 658 | 10611 | 453-475 | BMPR1B\|658_PDLIM5\|10611 |
| LMO7_UCHL3 | LMO7 | UCHL3 | 4008 | 7347 | 663-670 | LMO7\|4008_UCHL3\|7347 |
| ZC3H7A_BCAR4 | ZC3H7A | BCAR4 | 29066 | 400500 | 319 | ZC3H7A\|29066_BCAR4\|400500 |

[0032] In accordance with the above descriptions, the fusion transcript provided herein is encoded by a nucleic acid molecule comprising a general structure A-B, wherein each of structure A and structure B is a portion of a gene and wherein structure A is a portion of a gene which is different from the gene of structure B. In exemplary aspects, structure A is a portion of at least 50 nucleotides of the gene listed in Column A and structure B is a portion of at least 50 nucleotides of the gene listed in Column B. In exemplary aspects, structure A is a portion of at least 60 nucleotides of the gene listed in Column A and structure B is a portion of at least 100 nucleotides of the gene listed in Column B. In exemplary aspects, structure A is a portion of at least 65 nucleotides of the gene listed in Column A and structure B is a portion of at least 200 nucleotides of the gene listed in Column B. In exemplary aspects, structure A is a portion of at least 65 nucleotides of the gene listed in Column A and structure B is a portion of at least 250 nucleotides of the gene listed in Column B. In exemplary aspects, structure A is a portion of at least 65 nucleotides of the gene listed in Column A and structure B is a portion of at least 275 nucleotides of the gene listed in Column B.

[0033] In accordance with the above descriptions, the fusion transcript provided herein is encoded by a nucleic acid molecule comprising a general structure A-B, wherein each of structure A and structure B is a portion of a gene, wherein structure A is a portion of a gene which is different from the gene of structure B, and the point at which structure A ends and structure B begins is recognized as a junction.

[0034] In exemplary aspects, the fusion transcript is encoded by a nucleic acid molecule comprising a general structure A-B, wherein each of structure A and structure B is a portion of a gene comprising exons. In exemplary aspects, the exons of the gene of structure A is in frame with the exons of the gene of structure B. In exemplary aspects, the fusion transcript encodes a fusion polypeptide comprising a portion encoded by the gene listed in Column A and a portion encoded by the gene listed in Column B. In exemplary aspects, the exons of the gene of structure A is out of frame with the exons of the gene of structure B. In such aspects, the fusion transcript may not encode a fusion polypeptide comprising a portion encoded by the gene listed in Column A and a portion encoded by the gene listed in Column B. Rather, the fusion transcript may encode a fusion polypeptide comprising a portion encoded by the gene listed in Column A and not in Column B, or the fusion transcript may not encode a polypeptide.

[0035] In alternative exemplary aspects, the fusion transcript is encoded by a nucleic acid molecule comprising a general structure A-B, wherein only one of structure A and structure B is a portion of a gene comprising exons. In exemplary aspects, the fusion transcript encodes a polypeptide comprising at least a portion encoded by only one of the genes listed in Column A and the genes listed in Column B.

[0036] In yet other exemplary aspects, the fusion transcript is encoded by a nucleic acid molecule comprising a general structure A-B, wherein neither structure A nor structure B is a portion of a gene comprising exons. In exemplary aspects, the fusion transcript does not encode a polypeptide.

[0037] In exemplary aspects, the fusion transcripts described herein are isolated. As used herein, the term “isolated” refers to a product having been removed from its natural environment. In the instant case, the fusion transcripts of the invention are removed from intracellular components of a cancer or tumor cell. In exemplary aspects, the fusion transcript of the invention exists in a composition and the composition has a given % purity with regard to the fusion transcript. For example, the purity of the compositions may be in exemplary aspects at least about 50%, can be greater than 60%, 70% or 80%, or can be 100%.

[0038] In exemplary aspects, the fusion transcripts described herein comprise ribonucleotides. In exemplary aspects, the ribonucleotides comprise a nucleobase, selected from the group consisting of uracil, adenine, guanine, cytosine. In exemplary aspects, the ribonucleotides are linked via phosphodiester bonds. Also, in exemplary aspects, the fusion transcripts of the invention are single stranded. In exemplary aspects, the fusion transcripts provided herein are not cyclic, although the fusion transcripts may comprise secondary or tertiary structural features, including, e.g., stem loop structures, and the like.

[0039] The sequence listing provides nucleotide sequences of complementary DNA (cDNA) of fusion transcripts of the invention. The nucleotide sequences of SEQ ID NOs: 1-844 represent the coding sequence portion of the cDNA of the fusion transcripts of the invention, while the nucleotide sequences of SEQ ID NOs: 1001-1844 represent the full length cDNA of the fusion transcripts of the invention. The latter group of sequences in some aspects contain both coding and non-coding sequences.

[0040] In exemplary embodiments of the invention, the fusion transcript comprises a nucleotide sequence which is the reverse complement of any one of SEQ ID NOs: 1 to 799. The reverse complement in some aspects is the reverse complement RNA sequence. For a sequence AGTC, which by convention is understood to be written in the 5′→3′ direction, the complement sequence is TCAG, the reverse complement sequence is GACT, and the reverse complement RNA sequence is GACU. In exemplary embodiments, the fusion transcript comprises a nucleotide sequence which is the reverse complement (e.g., the reverse complement RNA) of any one of SEQ ID NOs: 800 to 844. In exemplary embodiments, the fusion transcript comprises a nucleotide sequence which is the reverse complement (e.g., the reverse complement RNA) of any one of SEQ ID NOs: 1-844. In exemplary aspects, the fusion transcript comprises a nucleotide sequence which is the reverse complement (e.g., the reverse complement RNA) of any one of the SEQ ID NOs: listed in the 9^{th} column from the left of Table 1. In exemplary aspects, the fusion transcript comprises a nucleotide sequence which is the reverse complement (e.g., the reverse complement RNA) of any one of the SEQ ID NOs: listed in the 9^{th} column from the left of Table 1 in a row having a “*” in the 2^{nd} column to the left of Table 1. In exemplary aspects, the fusion transcript comprises a nucleotide sequence which is the reverse complement (e.g., the reverse complement RNA) of any one of the SEQ ID NOs: listed in the 9^{th} column from the left of Table 1 in a row not marked with a “#” in the 3rd column to the left of Table 1. In exemplary aspects, the fusion transcript comprises a nucleotide sequence which is the reverse complement (e.g., the reverse complement RNA) of any one of the SEQ ID NOs: listed in the 9^{th} column from the left of Table 1 in a row not marked with a “̂” in the 4th column to the left of Table 1. In exemplary aspects, the fusion transcript comprises a nucleotide sequence which is the reverse complement (e.g., the reverse complement RNA) of any one of the SEQ ID NOs: listed in the 9^{th} column from the left of Table 1 in a row (a) with a “*” in the 2^{nd} column to the left of Table 1, (b) not marked with a “#” in the 3rd column to the left of Table 1, (c) not marked with a “̂” in the 4th column to the left of Table 1, or (d) a combination thereof.

[0041] In exemplary embodiments, the fusion transcript comprises a nucleotide sequence which is the reverse complement (e.g., the reverse complement RNA) of any one of SEQ ID NOs: 1001 to 1799. In exemplary embodiments, the fusion transcript comprises a nucleotide sequence which is the reverse complement (e.g., the reverse complement RNA) of any one of SEQ ID NOs: 1800 to 1844. In exemplary embodiments, the fusion transcript comprises a nucleotide sequence which is the reverse complement (e.g., the reverse complement RNA) of any one of SEQ ID NOs: 1001-1844. In exemplary aspects, the fusion transcript comprises a nucleotide sequence which is the reverse complement (e.g., the reverse complement RNA) of any one of the SEQ ID NOs: listed in the 2nd column from the right of Table 1. In exemplary aspects, the fusion transcript comprises a nucleotide sequence which is the reverse complement (e.g., the reverse complement RNA) of any one of the SEQ ID NOs: listed in the 2nd column from the right of Table 1 in a row having a “*” in the 2^{nd} column to the left of Table 1. In exemplary aspects, the fusion transcript comprises a nucleotide sequence which is the reverse complement (e.g., the reverse complement RNA) of any one of the SEQ ID NOs: listed in the 2nd column from the right of Table 1 in a row not marked with a “#” in the 3rd column to the left of Table 1. In exemplary aspects, the fusion transcript comprises a nucleotide sequence which is the reverse complement (e.g., the reverse complement RNA) of any one of the SEQ ID NOs: listed in the 2nd column from the right of Table 1 in a row not marked with a “̂” in the 4th column to the left of Table 1. In exemplary aspects, the fusion transcript comprises a nucleotide sequence which is the reverse complement (e.g., the reverse complement RNA) of any one of the SEQ ID NOs: listed in the 2nd column from the right of Table 1 in a row (a) marked with a “*” in the 2^{nd} column to the left of Table 1, (b) not marked with a “#” in the 3rd column to the left of Table 1, (c) not marked with a “̂” in the 4th column to the left of Table 1, or (d) a combination thereof.

[0042] In exemplary embodiments, the fusion transcript comprises a nucleotide sequence of any one of SEQ ID NOs: 2001 to 2844. In exemplary aspects, the fusion transcript comprises a nucleotide sequence of any one of the SEQ ID NOs: listed in the right most column of Table 1. In exemplary aspects, the fusion transcript comprises a nucleotide sequence of any one of the SEQ ID NOs: listed in the right most column of Table 1 in a row having a “*” in the 2^{nd} column to the left of Table 1. In exemplary aspects, the fusion transcript comprises a nucleotide sequence of any one of the SEQ ID NOs: listed in the right most column of Table 1 in a row not marked with a “#” in the 3rd column to the left of Table 1. In exemplary aspects, the fusion transcript comprises a nucleotide sequence of any one of the SEQ ID NOs: listed in the right most column of Table 1 in a row not marked with a “̂” in the 4th column to the left of Table 1. In exemplary aspects, the the fusion transcript comprises a nucleotide sequence of any one of the SEQ ID NOs: listed in the right most column of Table 1 in a row (a) marked with a “*” in the 2^{nd} column to the left of Table 1, (b) not marked with a “#” in the 3rd column to the left of Table 1, (c) not marked with a “̂” in the 4th column to the left of Table 1, or (d) a combination thereof.

[0043] With regard to the fusion transcripts listed in Table 1, the location of the junction between structure A and structure B for each of SEQ ID NOs: 1-844, if present, and the location of the junction between structure A and structure B for each of SEQ ID NOs: 1001-1844, if present, is described in Table 5, found after the EXAMPLES section. In exemplary aspects, some of the sequences of SEQ ID NOs: 1-844 do not have a junction and therefore do not encode a fusion polypeptide.

[0044] Polypeptides Encoded by Fusion Transcripts

[0045] The invention provides isolated polypeptides. In exemplary embodiments, the polypeptide of the invention is encoded by a fusion transcript described herein. In exemplary aspects, the polypeptide of the invention comprises a general structure A-B and is encoded by a nucleotide sequence comprising (i) at least a portion of the gene listed in Column A of Table 1 as structure A and (ii) at least a portion of the gene listed in Column B of Table 1 as structure B.

[0046] In exemplary embodiments, the polypeptide of the invention is encoded by a fusion transcript encoded by a nucleic acid molecule comprising a general structure A-B, wherein structure A is a portion of a gene listed in Column A of Table 1 and structure B is a portion of a gene listed in Column B of Table 1, wherein the gene listed in Column A and the gene listed in Column B are listed in the same row of Table 1, wherein structure B is located immediately 3′ to structure A.

[0047] In exemplary embodiments, the polypeptide of the invention is encoded by a fusion transcript encoded by a nucleic acid molecule comprising a general structure A-B, wherein structure A is a portion of a gene listed in Column A of Table 1 and structure B is a portion of a gene listed in Column B of Table 1, wherein the gene listed in Column A and the gene listed in Column B are listed in the same row of Table 1 and the row is marked with an asterisk in the 2^{nd} column from the left, wherein structure B is located immediately 3′ to structure A.

[0048] In exemplary embodiments, the polypeptide of the invention is encoded by a fusion transcript encoded by a nucleic acid molecule comprising a general structure A-B, wherein structure A is a portion of a gene listed in Column A of Table 1 and structure B is a portion of a gene listed in Column B of Table 1, wherein the gene listed in Column A and the gene listed in Column B are listed in the same row of Table 1 and the row is not marked with a “#” in the 3^{rd} column from the left, wherein structure B is located immediately 3′ to structure A.

[0049] In exemplary embodiments, the polypeptide is encoded by a fusion transcript encoded by a nucleic acid molecule comprising a general structure A-B, wherein structure A is a portion of a gene listed in Column A of Table 1 and structure B is a portion of a gene listed in Column B of Table 1, wherein the gene listed in Column A and the gene listed in Column B are listed in the same row of Table 1 and the row is (a) marked with an asterisk in the 2^{nd} column from the left, (b) not marked with a “#” in the 3^{rd} column from the left, (c) not marked with a “̂” in the 4^{th} column from the left, or (d) a combination thereof, wherein structure B is located immediately 3′ to structure A.

[0050] In exemplary embodiments, the polypeptide of the invention is encoded by a fusion transcript encoded by a nucleic acid molecule comprising a general structure A-B, wherein structure A is a portion of a gene listed in Column A of Table 2 and structure B is a portion of a gene listed in Column B of Table 2, wherein the gene listed in Column A and the gene listed in Column B are listed in the same row of Table 2, wherein structure B is located immediately 3′ to structure A.

[0051] In exemplary embodiments, the polypeptide of the invention is encoded by a fusion transcript encoded by a nucleic acid molecule comprising a general structure A-B, wherein structure A is a portion of a gene listed in Column A of Table 3 and structure B is a portion of a gene listed in Column B of Table 3, wherein the gene listed in Column A and the gene listed in Column B are listed in the same row of Table 3, wherein structure B is located immediately 3′ to structure A.

[0052] In exemplary embodiments, the polypeptide of the invention is encoded by a fusion transcript encoded by a nucleic acid molecule comprising a general structure A-B, wherein structure A is a portion of a gene listed in Column A of Table 4 and structure B is a portion of a gene listed in Column B of Table 4, wherein the gene listed in Column A and the gene listed in Column B are listed in the same row of Table 4, wherein structure B is located immediately 3′ to structure A.

[0053] In exemplary aspects, the polypeptide of the invention is encoded by a fusion transcript comprising a nucleotide sequence which is the reverse complement (e.g., the reverse complement RNA) of any one of SEQ ID NOs: 1 to 799. In exemplary aspects, the polypeptide of the invention is encoded by a fusion transcript comprising a nucleotide sequence which is the reverse complement (e.g., the reverse complement RNA) of any one of SEQ ID NOs: 800 to 844. In exemplary aspects, the polypeptide of the invention is encoded by a fusion transcript comprising a nucleotide sequence which is the reverse complement (e.g., the reverse complement RNA) of any one of SEQ ID NOs: 1001 to 1799. In exemplary aspects, the polypeptide of the invention is encoded by a fusion transcript comprising a nucleotide sequence which is the reverse complement (e.g., the reverse complement RNA) of any one of SEQ ID NOs: 1800 to 1844. In exemplary aspects, the polypeptide of the invention is encoded by a fusion transcript comprising a nucleotide sequence of any one of SEQ ID NOs: 2001 to 2844. In exemplary aspects, the fusion polypeptide is encoded by the reverse complement (e.g., the reverse complement RNA) of any one of SEQ ID NOs: 1-8, 10-35, 37-39, 41, 44, 45, 46, 48-51, 53-55, 58, 60, 64-102, 116, 117, 119, 121-124, 126-129, 130-132, 136, 137, 139, 140, 142-156, 158, 159, 161-169, 183, 184, 188-202, 207-240, 242, 243, 245-256, 258-260, 266-281, 283-297, 299-310, 340-355, 453, 454, 456-458, 461, 462, 464-466, 469, 471, 475, 502-504, 506-508, 521, 525, 527, 528, 530, 532-537, 575, 633-638, 641-658, 663-680, 682-684, 697-705, 718, 796-814, 816, 817, 819, 836-838, and 840-843. In exemplary aspects, the fusion polypeptide is encoded by the reverse complement (e.g., the reverse complement RNA) of any one of SEQ ID NOs: 1001-1008, 1010-1035, 1037-1039, 1041, 1044, 1045, 1046, 1048-1051, 1053-1055, 1058, 1060, 1064-1102, 1116, 1117, 1119, 1121-1124, 1126-1129, 1130-1132, 1136, 1137, 1139, 1140, 1142-1156, 1158, 1159, 1161-1169, 1183, 1184, 1188-1202, 1207-1240, 1242, 1243, 1245-1256, 1258-1260, 1266-1281, 1283-1297, 1299-1310, 1340-1355, 1453, 1454, 1456-1458, 1461, 1462, 1464-1466, 1469, 1471, 1475, 1502-1504, 1506-1508, 1521, 1525, 1527, 1528, 1530, 1532-1537, 1575, 1633-1638, 1641-1658, 1663-1680, 1682-1684, 1697-1705, 1718, 1796-1814, 1816, 1817, 1819, 1836-1838, 1840-1843. In exemplary aspects, the fusion polypeptide is encoded by the reverse complement (e.g., the reverse complement RNA) of any one of the SEQ ID NOs: listed in Table 5.

[0054] In exemplary aspects, the polypeptide of the invention is encoded by a fusion transcript comprising a nucleotide sequence of any one of SEQ ID NOs: 2001-2008, 2010-2035, 2037-2039, 2041, 2044, 2045, 2046, 2048-2051, 2053-2055, 2058, 2060, 2064-2102, 2116, 2117, 2119, 2121-2124, 2126-2129, 2130-2132, 2136, 2137, 2139, 2140, 2142-2156, 2158, 2159, 2161-2169, 2183, 2184, 2188-2202, 2207-2240, 2242, 2243, 2245-2256, 2258-2260, 2266-2281, 2283-2297, 2299-2310, 2340-2355, 2453, 2454, 2456-2458, 2461, 2462, 2464-2466, 2469, 2471, 2475, 2502-2504, 2506-2508, 2521, 2525, 2527, 2528, 2530, 2532-2537, 2575, 2633-2638, 2641-2658, 2663-2680, 2682-2684, 2697-2705, 2718, 2796-2814, 2816, 2817, 2819, 2836-2838, and 2840-2843.

[0055] In exemplary aspects, the polypeptide of the invention is further modified to include additional or alternative chemical moieties. For example, the polypeptide of the invention may be glycosylated, amidated, carboxylated, phosphorylated, esterified, N-acylated, cyclized via, e.g., a disulfide bridge, or converted into an acid addition salt and/or optionally dimerized or polymerized, or conjugated.

[0056] The polypeptides of the invention (e.g., the fusion polypeptides) can be obtained by methods known in the art. Suitable methods of de novo synthesizing peptides are described in, for example, Chan et al., Fmoc Solid Phase Peptide Synthesis, Oxford University Press, Oxford, United Kingdom, 2005; Peptide and Protein Drug Analysis, ed. Reid, R., Marcel Dekker, Inc., 2000; Epitope Mapping, ed. Westwood et al., Oxford University Press, Oxford, United Kingdom, 2000; and U.S. Pat. No. 5,449,752.

[0057] In some embodiments, the polypeptides described herein are commercially synthesized by companies, such as Synpep (Dublin, Calif.), Peptide Technologies Corp. (Gaithersburg, Md.), and Multiple Peptide Systems (San Diego, Calif.). In this respect, the peptides can be synthetic, recombinant, isolated, and/or purified.

[0058] Also, in the instances in which the polypeptides do not comprise any non-coded or non-natural amino acids, the polypeptides can be recombinantly produced using a nucleic acid encoding the amino acid sequence of the polypeptides using standard recombinant methods. See, for instance, Sambrook et al., Molecular Cloning: A Laboratory Manual. 3rd ed., Cold Spring Harbor Press, Cold Spring Harbor, N.Y. 2001; and Ausubel et al., Current Protocols in Molecular Biology, Greene Publishing Associates and John Wiley & Sons, N Y, 1994.

[0059] In some embodiments, the polypeptides are isolated. The term “isolated” as used herein means having been removed from its natural environment. In exemplary embodiments, the polypeptide is made through recombinant methods and the polypeptide is isolated from the host cell.

[0060] In some embodiments, the polypeptides are present in a composition and the composition comprises a purified polypeptide of the invention. The term “purified,” as used herein relates to the isolation of a molecule or compound in a form that is substantially free of contaminants which in some aspects are normally associated with the molecule or compound in a native or natural environment and means having been increased in purity as a result of being separated from other components of the original composition. The purified polypeptides include, for example, peptides substantially free of nucleic acid molecules, lipids, and carbohydrates, or other starting materials or intermediates which are used or formed during chemical synthesis of the peptides. It is recognized that “purity” is a relative term, and not to be necessarily construed as absolute purity or absolute enrichment or absolute selection. In some aspects, the purity is at least or about 50%, is at least or about 60%, at least or about 70%, at least or about 80%, or at least or about 90% (e.g., at least or about 91%, at least or about 92%, at least or about 93%, at least or about 94%, at least or about 95%, at least or about 96%, at least or about 97%, at least or about 98%, at least or about 99% or is approximately 100%.

[0061] Nucleic Acid Molecules Encoding Fusion Transcripts

[0062] The invention provides isolated nucleic acid molecules comprising a nucleotide sequence of novel fusion genes generated by genomic rearrangements that fuse domains from two distinct genes, and portions thereof, optionally, wherein the portion comprises the junction between the two genes. In exemplary aspects, the nucleic acid molecule comprises the nucleotide sequence (e.g., DNA sequence) of the full length fusion gene, including coding and non-coding sequence. In exemplary aspects, the nucleic acid molecule comprises untranslated regions of a gene, e.g., 5′ untranslated regions (5′ UTR), 3′ untranslated regions (3′ UTR), intronic sequences, and the like. In exemplary aspects, the nucleic acid molecule comprises one or more translated regions of a gene, e.g., exons. In exemplary aspects, the nucleic acid molecule comprises the nucleotide sequence of only the coding sequence of the fusion gene. In exemplary aspects, the coding sequence encodes a transcript, e.g. an RNA transcript. In exemplary aspects, the transcript comprises fused domains encoded by two distinct genes and, in such aspects, the transcript is referenced herein as a “fusion transcript” or a “fusion gene transcript”. Provided herein are nucleic acid molecules encoding any one of the fusion transcripts described herein.

[0063] In exemplary aspects, the nucleic acid molecule of the invention comprises a general structure A-B, wherein structure A is a portion of a gene listed in Column A of Table 1 and structure B is a portion of a gene listed in Column B of Table 1, wherein the gene listed in Column A and the gene listed in Column B are listed in the same row of Table 1, wherein structure B is located immediately 3′ to structure A.

[0064] In exemplary aspects, the nucleic acid molecule comprises a general structure A-B, wherein structure A is a portion of a gene listed in Column A of Table 1 and structure B is a portion of a gene listed in Column B of Table 1, wherein the gene listed in Column A and the gene listed in Column B are listed in the same row of Table 1 and the row is (a) marked with an asterisk in the 2^{nd} column from the left, (b) not marked with a “#” in the 3^{rd} column from the left, (c) not marked with a “̂” in the 4^{th} column from the left, or (d) a combination thereof, wherein structure B is located immediately 3′ to structure A.

[0065] In exemplary aspects, the nucleic acid molecule comprises a general structure A-B, wherein structure A is a portion of a gene listed in Column A of Table 2 and structure B is a portion of a gene listed in Column B of Table 2, wherein the gene listed in Column A and the gene listed in Column B are listed in the same row of Table 2, wherein structure B is located immediately 3′ to structure A. In exemplary aspects, the nucleic acid molecule comprises a general structure A-B, wherein structure A is a portion of a gene listed in Column A of Table 3 and structure B is a portion of a gene listed in Column B of Table 3, wherein the gene listed in Column A and the gene listed in Column B are listed in the same row of Table 3, wherein structure B is located immediately 3′ to structure A. In exemplary aspects, the nucleic acid molecule comprises a general structure A-B, wherein structure A is a portion of a gene listed in Column A of Table 4 and structure B is a portion of a gene listed in Column B of Table 4, wherein the gene listed in Column A and the gene listed in Column B are listed in the same row of Table 4, wherein structure B is located immediately 3′ to structure A.

[0066] In exemplary embodiments, the nucleic acid molecule comprises a nucleotide sequence of any one of SEQ ID NOs: 1 to 799. In exemplary embodiments, the nucleic acid molecule comprises a nucleotide sequence of any one of SEQ ID NOs: 800 to 844. In exemplary aspects, the nucleic acid molecule comprises a nucleotide sequence of any one of the SEQ ID NOs: listed in the 9^{th} column from the left of Table 1. In exemplary aspects, the nucleic acid molecule comprises a nucleotide sequence of any one of the SEQ ID NOs: listed in the 9^{th} column from the left of Table 1 in a row (a) marked with a “*” in the 2^{nd} column to the left of Table 1, (b) not marked with a “#” in the 3rd column to the left of Table 1, (c) not marked with a “̂” in the 4th column to the left of Table 1, or (d) a combination thereof.

[0067] In exemplary embodiments, the nucleic acid molecule comprises a nucleotide sequence of any one of SEQ ID NOs: 1001-1844. In exemplary aspects, the nucleic acid molecule comprises a nucleotide sequence of any one of the SEQ ID NOs: listed in the 2^{nd} column from the right of Table 1 in a row (a) marked with a “*” in the 2^{nd} column to the left of Table 1, (b) not marked with a “#” in the 3rd column to the left of Table 1, (c) not marked with a “̂” in the 4th column to the left of Table 1, or (d) a combination thereof.

[0068] In exemplary embodiments, the nucleic acid molecule comprises a nucleotide sequence encoding any one of SEQ ID NOs: 2001 to 2844. In exemplary aspects, the nucleic acid molecule comprises a nucleotide sequence of any one of the SEQ ID NOs: listed in the right most column of Table 1. In exemplary aspects, the nucleic acid molecule comprises a nucleotide sequence of any one of the SEQ ID NOs: listed in the right most column of Table 1 in a row (a) marked with a “*” in the 2^{nd} column to the left of Table 1, (b) not marked with a “#” in the 3rd column to the left of Table 1, (c) not marked with a “̂” in the 4th column to the left of Table 1, or (d) a combination thereof.

[0069] Nucleic acid molecules which are related to the above nucleic acid molecules comprising the aforementioned SEQ ID NOs: are provided. For example, nucleic acid molecules which are degenerate to the above nucleic acid molecules comprising the aforementioned SEQ ID NOs: and nucleic acid molecules which are complements of the above nucleic acid molecules comprising the aforementioned SEQ ID NOs: are provided.

[0070] In exemplary aspects, the nucleic acid molecules described herein are isolated. In exemplary aspects, the nucleic acid molecules of the invention exist in a composition and the composition has a given % purity with regard to the nucleic acid molecule. For example, the purity can be at least about 50%, can be greater than 60%, 70% or 80%, or can be 100%.

[0071] The nucleic acid molecules in some aspects are single stranded and in other aspects are double stranded. The nucleic acid molecules may be modified to comprise additional functional or chemical moieties, such as, for example, a detectable label. The detectable label can be, for instance, a radioisotope, a fluorophore, and an element particle.

[0072] By “nucleic acid molecule” as used herein includes “polynucleotide,” “oligonucleotide,” and “nucleic acid,” and generally means a polymer of DNA or RNA, which can be single-stranded or double-stranded, synthesized or obtained (e.g., isolated and/or purified) from natural sources, which can contain natural, non-natural or altered nucleotides, and which can contain a natural, non-natural or altered internucleotide linkage, such as a phosphoroamidate linkage or a phosphorothioate linkage, instead of the phosphodiester found between the nucleotides of an unmodified oligonucleotide. It is generally preferred that the nucleic acid does not comprise any insertions, deletions, inversions, and/or substitutions. However, it may be suitable in some instances, as discussed herein, for the nucleic acid to comprise one or more insertions, deletions, inversions, and/or substitutions.

[0073] In some aspects, the nucleic acids of the invention are recombinant. As used herein, the term “recombinant” refers to (i) molecules that are constructed outside living cells by joining natural or synthetic nucleic acid segments to nucleic acid molecules that can replicate in a living cell, or (ii) molecules that result from the replication of those described in (i) above. For purposes herein, the replication can be in vitro replication or in vivo replication.

[0074] The nucleic acids can be constructed based on chemical synthesis and/or enzymatic ligation reactions using procedures known in the art. See, for example, Sambrook et al., supra, and Ausubel et al., supra. For example, a nucleic acid can be chemically synthesized using naturally occurring nucleotides or variously modified nucleotides designed to increase the biological stability of the molecules or to increase the physical stability of the duplex formed upon hybridization (e.g., phosphorothioate derivatives and acridine substituted nucleotides). Examples of modified nucleotides that can be used to generate the nucleic acids include, but are not limited to, 5-fluorouracil, 5-bromouracil, 5-chlorouracil, 5-iodouracil, hypoxanthine, xanthine, 4-acetylcytosine, 5-(carboxyhydroxymethyl) uracil, 5-carboxymethylaminomethyl-2-thiouridme, 5-carboxymethylaminomethyluracil, dihydrouracil, beta-D-galactosylqueosine, inosine, N⁶-isopentenyladenine, 1-methylguanine, 1-methylinosine, 2,2-dimethylguanine, 2-methyladenine, 2-methylguanine, 3-methylcytosine, 5-methylcytosine, N-substituted adenine, 7-methylguanine, 5-methylammomethyluracil, 5-methoxyaminomethyl-2-thiouracil, beta-D-mannosylqueosine, 5′-methoxycarboxymethyluracil, 5-methoxyuracil, 2-methylthio-N⁶-isopentenyladenine, uracil-5-oxyacetic acid (v), wybutoxosine, pseudouratil, queosine, 2-thiocytosine, 5-methyl-2-thiouracil, 2-thiouracil, 4-thiouracil, 5-methyluracil, uracil-5-oxyacetic acid methylester, 3-(3-amino-3-N-2-carboxypropyl) uracil, and 2,6-diaminopurine. Alternatively, one or more of the nucleic acids of the invention can be purchased from companies, such as Macromolecular Resources (Fort Collins, Colo.) and Synthegen (Houston, Tex.).

[0075] Recombinant Expression Vector

[0076] The nucleic acids of the invention in exemplary aspects are incorporated into a recombinant expression vector. In this regard, the invention provides recombinant expression vectors comprising any of the nucleic acids described herein. For purposes herein, the term “recombinant expression vector” means a genetically-modified oligonucleotide or polynucleotide construct that permits the expression of an mRNA, protein, polypeptide, or peptide by a host cell, when the construct comprises a nucleotide sequence encoding the mRNA, protein, polypeptide, or peptide, and the vector is contacted with the cell under conditions sufficient to have the mRNA, protein, polypeptide, or peptide expressed within the cell. The vectors of the invention are not naturally-occurring as a whole. However, parts of the vectors may be naturally-occurring. The inventive recombinant expression vectors may comprise any type of nucleotides, including, but not limited to DNA and RNA, which may be single-stranded or double-stranded, synthesized or obtained in part from natural sources, and which may contain natural, non-natural or altered nucleotides. The recombinant expression vectors may comprise naturally-occurring or non-naturally-occuring internucleotide linkages, or both types of linkages. In exemplary aspects, the altered nucleotides or non-naturally occurring internucleotide linkages do not hinder the transcription or replication of the vector.

[0077] The recombinant expression vector of the invention may be any suitable recombinant expression vector, and may be used to transform or transfect any suitable host. Suitable vectors include those designed for propagation and expansion or for expression or both, such as plasmids and viruses. The vector may be selected from the group consisting of the pUC series (Fermentas Life Sciences), the pBluescript series (Stratagene, LaJolla, Calif.), the pET series (Novagen, Madison, Wis.), the pGEX series (Pharmacia Biotech, Uppsala, Sweden), and the pEX series (Clontech, Palo Alto, Calif.). Bacteriophage vectors, such as λGTIO, λGTI 1, λZapII (Stratagene), λEMBL4, and λNMI 149, also may be used. Examples of plant expression vectors include pBIOI, pBI101.2, pBI101.3, pBI121 and pBIN19 (Clontech). Examples of animal expression vectors include pEUK-Cl, pMAM and pMAMneo (Clontech). In exemplary aspects, the recombinant expression vector is a viral vector, e.g., a retroviral vector.

[0078] The recombinant expression vectors of the invention may be prepared using standard recombinant DNA techniques described in, for example, Sambrook et al., supra, and Ausubel et al., supra. Constructs of expression vectors, which are circular or linear, may be prepared to contain a replication system functional in a prokaryotic or eukaryotic host cell. Replication systems may be derived, e.g., from ColEl, 2μ plasmid, λ, SV40, bovine papilloma virus, and the like.

[0079] In exemplary aspects, the recombinant expression vector comprises regulatory sequences, such as transcription and translation initiation and termination codons, which are specific to the type of host (e.g., bacterium, fungus, plant, or animal) into which the vector is to be introduced, as appropriate and taking into consideration whether the vector is DNA- or RNA-based.

[0080] The recombinant expression vector may include one or more marker genes, which allow for selection of transformed or transfected hosts. Marker genes include biocide resistance, e.g., resistance to antibiotics, heavy metals, etc., complementation in an auxotrophic host to provide prototrophy, and the like. Suitable marker genes for the inventive expression vectors include, for instance, neomycin/G418 resistance genes, hygromycin resistance genes, histidinol resistance genes, tetracycline resistance genes, and ampicillin resistance genes.

[0081] The recombinant expression vector may comprise a native or normative promoter operably linked to the nucleotide sequence encoding the binding agent or conjugate or to the nucleotide sequence which is complementary to or which hybridizes to the nucleotide sequence encoding the binding agent or conjugate. The selection of promoters, e.g., strong, weak, inducible, tissue-specific and developmental-specific, is within the ordinary skill of the artisan.

[0082] Similarly, the combining of a nucleotide sequence with a promoter is also within the skill of the artisan. The promoter may be a non-viral promoter or a viral promoter, e.g., a cytomegalovirus (CMV) promoter, an SV40 promoter, an RSV promoter, and a promoter found in the long-terminal repeat of the murine stem cell virus.

[0083] The inventive recombinant expression vectors may be designed for either transient expression, for stable expression, or for both. Also, the recombinant expression vectors may be made for constitutive expression or for inducible expression. Further, the recombinant expression vectors may be made to include a suicide gene.

[0084] As used herein, the term “suicide gene” refers to a gene that causes the cell expressing the suicide gene to die. The suicide gene may be a gene that confers sensitivity to an agent, e.g., a drug, upon the cell in which the gene is expressed, and causes the cell to die when the cell is contacted with or exposed to the agent. Suicide genes are known in the art (see, for example, Suicide Gene Therapy: Methods and Reviews. Springer, Caroline J. (Maycer Research UK Centre for Maycer Therapeutics at the Institute of Maycer Research, Sutton, Surrey, UK), Humana Press, 2004) and include, for example, the Herpes Simplex Virus (HSV) thymidine kinase (TK) gene, cytosine daminase, purine nucleoside phosphorylase, and nitroreductase.

[0085] Host Cells

[0086] The invention further provides a host cell comprising any of the nucleic acids or vectors described herein. As used herein, the term “host cell” refers to any type of cell that may contain the nucleic acid or vector described herein. In exemplary aspects, the host cell is a eukaryotic cell, e.g., plant, animal, fungi, or algae, or may be a prokaryotic cell, e.g., bacteria or protozoa. In exemplary aspects, the host cells is a cell originating or obtained from a subject, as described herein. In exemplary aspects, the host cell originates from or is obtained from a mammal. As used herein, the term “mammal” refers to any mammal, including, but not limited to, mammals of the order Rodentia, such as mice and hamsters, and mammals of the order Logomorpha, such as rabbits. It is preferred that the mammals are from the order Carnivora, including Felines (cats) and Canines (dogs). It is more preferred that the mammals are from the order Artiodactyla, including Bo vines (cows) and S wines (pigs) or of the order Perssodactyla, including Equines (horses). It is most preferred that the mammals are of the order Primates, Ceboids, or Simoids (monkeys) or of the order Anthropoids (humans and apes). An especially preferred mammal is the human.

[0087] In exemplary aspects, the host cell is a cultured cell or a primary cell, i.e., isolated directly from an organism, e.g., a human. The host cell in exemplary aspects is an adherent cell or a suspended cell, i.e., a cell that grows in suspension. Suitable host cells are known in the art and include, for instance, DH5? E. coli cells, Chinese hamster ovarian (CHO) cells, monkey VERO cells, T293 cells, COS cells, HEK293 cells, and the like. For purposes of amplifying or replicating the recombinant expression vector, the host cell is preferably a prokaryotic cell, e.g., a DH5a cell. In exemplary aspects, the host cell is a human cell. The host cell may be of any cell type, may originate from any type of tissue, and may be of any developmental stage.

[0088] Also provided by the invention is a population of cells comprising at least one host cell described herein. The population of cells may be a heterogeneous population comprising the host cell comprising any of the expression vectors described, in addition to at least one other cell, e.g., a host cell, which does not comprise any of the recombinant expression vectors. Alternatively, the population of cells may be a substantially homogeneous population, in which the population comprises mainly of host cells (e.g., consisting essentially of) comprising the expression vector. The population also may be a clonal population of cells, in which all cells of the population are clones of a single host cell comprising a recombinant expression vector, such that all cells of the population comprise the recombinant expression vector. In exemplary embodiments of the invention, the population of cells is a clonal population comprising host cells expressing a nucleic acid or a vector described herein.

[0089] Binding Agents

[0090] Binding Agents: Antibodies

[0091] The invention provides binding agents which specifically bind to a polypeptide of the invention. In exemplary aspects, the binding agent is an antibody, an antigen binding fragment thereof, or an antibody derivative, wherein the antibody, antigen binding fragment thereof or antibody derivative comprises six complementarity determining regions. In exemplary aspects, the binding agent specifically binds to an epitope comprising a junction of the fusion polypeptide. The junctions of the fusion polypeptides are described in Table 5 by way of providing the location of the junction in the cDNA of the fusion transcripts.

[0092] In exemplary aspects, the antibody can be any type of immunoglobulin that is known in the art. For instance, the antibody can be of any isotype, e.g., IgA, IgD, IgE, IgG, IgM. The antibody can be monoclonal or polyclonal. The antibody can be a naturally-occurring antibody, i.e., an antibody isolated and/or purified from a mammal, e.g., mouse, rabbit, goat, horse, chicken, hamster, human, and the like. In this regard, the antibody may be considered to be a mammalian antibody, e.g., a mouse antibody, rabbit antibody, goat antibody, horse antibody, chicken antibody, hamster antibody, human antibody, and the like.

[0093] In exemplary aspects, the antibody is considered to be a blocking antibody or neutralizing antibody. In exemplary aspects, the antibody is not a blocking antibody or neutralizing antibody.

[0094] In exemplary aspects, the dissocation constant (K_{D}) of the antibody for the polypeptide of the invention is between about 0.0001 nM and about 100 nM. In some embodiments, the K_{D} is at least or about 0.0001 nM, at least or about 0.001 nM, at least or about 0.01 nM, at least or about 0.1 nM, at least or about 1 nM, or at least or about 10 nM. In some embodiments, the K_{D} is no more than or about 100 nM, no more than or about 75 nM, no more than or about 50 nM, or no more than or about 25 nM.

[0095] In exemplary embodiments, the antibody is a genetically engineered antibody, e.g., a single chain antibody, a humanized antibody, a chimeric antibody, a CDR-grafted antibody, an antibody that includes portions of CDR sequences specific for the polypeptide of the invention, a humaneered antibody, a bispecific antibody, a trispecific antibody, and the like. Genetic engineering techniques also provide the ability to make fully human antibodies in a non-human.

[0096] In some aspects, the antibody is a chimeric antibody. The term “chimeric antibody” is used herein to refer to an antibody containing constant domains from one species and the variable domains from a second, or more generally, containing stretches of amino acid sequence from at least two species.

[0097] In some aspects, the antibody is a humanized antibody. The term “humanized” when used in relation to antibodies is used to refer to antibodies having at least CDR regions from a nonhuman source that are engineered to have a structure and immunological function more similar to true human antibodies than the original source antibodies. For example, humanizing can involve grafting CDR from a non-human antibody, such as a mouse antibody, into a human antibody. Humanizing also can involve select amino acid substitutions to make a non-human sequence look more like a human sequence, as would be known in the art.

[0098] Use of the terms “chimeric or humanized” herein is not meant to be mutually exclusive; rather, is meant to encompass chimeric antibodies, humanized antibodies, and chimeric antibodies that have been further humanized. Except where context otherwise indicates, statements about (properties of, uses of, testing, and so on) chimeric antibodies apply to humanized antibodies, and statements about humanized antibodies pertain also to chimeric antibodies. Likewise, except where context dictates, such statements also should be understood to be applicable to antibodies and antigen binding fragments of such antibodies.

[0099] In some aspects of the disclosure, the binding agent is an antigen binding fragment of an antibody that specifically binds to a polypeptide in accordance with the invention. The antigen binding fragment (also referred to herein as “antigen binding portion”) may be an antigen binding fragment of any of the antibodies described herein. The antigen binding fragment can be any part of an antibody that has at least one antigen binding site, including, but not limited to, Fab, F(ab′)₂, dsFv, sFv, diabodies, triabodies, bis-scFvs, fragments expressed by a Fab expression library, domain antibodies, VhH domains, V-NAR domains, VH domains, VL domains, and the like. Antibody fragments of the invention, however, are not limited to these exemplary types of antibody fragments.

[0100] In exemplary aspects, the antigen binding fragment is a domain antibody. A domain antibody comprises a functional binding unit of an antibody, and can correspond to the variable regions of either the heavy (V_{H}) or light (V_{L}) chains of antibodies. A domain antibody can have a molecular weight of approximately 13 kDa, or approximately one-tenth the weight of a full antibody. Domain antibodies may be derived from full antibodies, such as those described herein. The antigen binding fragments in some embodiments are monomeric or polymeric, bispecific or trispecific, and bivalent or trivalent.

[0101] Antibody fragments that contain the antigen binding, or idiotope, of the antibody molecule share a common idiotype and are contemplated by the disclosure. Such antibody fragments may be generated by techniques known in the art and include, but are not limited to, the F(ab′)₂ fragment which may be produced by pepsin digestion of the antibody molecule; the Fab′ fragments which may be generated by reducing the disulfide bridges of the F(ab′)₂ fragment, and the two Fab′ fragments which may be generated by treating the antibody molecule with papain and a reducing agent.

[0102] In exemplary aspects, the binding agent provided herein is a single-chain variable region fragment (scFv) antibody fragment. An scFv may consist of a truncated Fab fragment comprising the variable (V) domain of an antibody heavy chain linked to a V domain of an antibody light chain via a synthetic peptide, and it can be generated using routine recombinant DNA technology techniques (see, e.g., Janeway et al., Immunobiology, 2^{nd} Edition, Garland Publishing, New York, (1996)). Similarly, disulfide-stabilized variable region fragments (dsFv) can be prepared by recombinant DNA technology (see, e.g., Reiter et al., Protein Engineering, 7, 697-704 (1994)).

[0103] Recombinant antibody fragments, e.g., scFvs of the disclosure, can also be engineered to assemble into stable multimeric oligomers of high binding avidity and specificity to different target antigens. Such diabodies (dimers), triabodies (trimers) or tetrabodies (tetramers) are well known in the art. See e.g., Kortt et al., Biomol Eng. 2001 18:95-108, (2001) and Todorovska et al., J Immunol Methods. 248:47-66, (2001).

[0104] In exemplary aspects, the binding agent is a bispecific antibody (bscAb). Bispecific antibodies are molecules comprising two single-chain Fv fragments joined via a glycine-serine linker using recombinant methods. The V light-chain (V_{L}) and V heavy-chain (V_{H}) domains of two antibodies of interest in exemplary embodiments are isolated using standard PCR methods. The V_{L} and V_{H} cDNAs obtained from each hybridoma are then joined to form a single-chain fragment in a two-step fusion PCR. Bispecific fusion proteins are prepared in a similar manner. Bispecific single-chain antibodies and bispecific fusion proteins are antibody substances included within the scope of the present invention. Exemplary bispecific antibodies are taught in U.S. Patent Application Publication No. 2005-0282233A1 and International Patent Application Publication No. WO 2005/087812, both applications of which are incorporated herein by reference in their entireties.

[0105] In exemplary aspects, the binding agent is a bispecific T-cell engaging antibody (BiTE) containing two scFvs produced as a single polypeptide chain. Methods of making and using BiTE antibodies are described in the art. See, e.g., Cioffi et al., Clin Cancer Res 18: 465, Brischwein et al., Mol Immunol 43:1129-43 (2006); Amann M et al., Cancer Res 68:143-51 (2008); Schlereth et al., Cancer Res 65: 2882-2889 (2005); and Schlereth et al., Cancer Immunol Immunother 55:785-796 (2006).

[0106] In exemplary aspects, the binding agent is a dual affinity re-targeting antibody (DART). DARTs are produced as separate polypeptides joined by a stabilizing interchain disulphide bond. Methods of making and using DART antibodies are described in the art. See, e.g., Rossi et al., MAbs 6: 381-91 (2014); Fournier and Schirrmacher, BioDrugs 27:35-53 (2013); Johnson et al., J Mol Biol 399:436-449 (2010); Brien et al., J Virol 87: 7747-7753 (2013); and Moore et al., Blood 117:4542 (2011).

[0107] In exemplary aspects, the binding agent is a tetravalent tandem diabody (TandAbs) in which an antibody fragment is produced as a non covalent homodimer folder in a head-to-tail arrrangement. TandAbs are known in the art. See, e.g., McAleese et al., Future Oncol 8: 687-695 (2012); Portner et al., Cancer Immunol Immunother 61:1869-1875 (2012); and Reusch et al., MAbs 6:728 (2014).

[0108] In exemplary aspects, the BiTE, DART, or TandAbs comprises the CDRs of any one of the antibodies described herein.

[0109] Suitable methods of making antibodies are known in the art. For instance, standard hybridoma methods are described in, e.g., Harlow and Lane (eds.), Antibodies: A Laboratory Manual, CSH Press (1988), and CA. Janeway et al. (eds.), Immunobiology, 5^{th} Ed., Garland Publishing, New York, N.Y. (2001)).

[0110] Monoclonal antibodies for use in the invention may be prepared using any technique that provides for the production of antibody molecules by continuous cell lines in culture. These include, but are not limited to, the hybridoma technique originally described by Koehler and Milstein (Nature 256: 495-497, 1975), the human B-cell hybridoma technique (Kosbor et al., Immunol Today 4:72, 1983; Cote et al., Proc Natl Acad Sci 80: 2026-2030, 1983) and the EBV-hybridoma technique (Cole et al., Monoclonal Antibodies and Cancer Therapy, Alan R Liss Inc, New York N.Y., pp 77-96, (1985).

[0111] Briefly, a polyclonal antibody is prepared by immunizing an animal with an immunogen comprising a polypeptide of the present invention and collecting antisera from that immunized animal. A wide range of animal species can be used for the production of antisera. In some aspects, an animal used for production of anti-antisera is a non-human animal including rabbits, mice, rats, hamsters, goat, sheep, pigs or horses. Because of the relatively large blood volume of rabbits, a rabbit, in some exemplary aspects, is a preferred choice for production of polyclonal antibodies. In an exemplary method for generating a polyclonal antisera immunoreactive with the chosen epitope, 50 μg of polypeptide antigen is emulsified in Freund's Complete Adjuvant for immunization of rabbits. At intervals of, for example, 21 days, 50 μg of epitope are emulsified in Freund's Incomplete Adjuvant for boosts. Polyclonal antisera may be obtained, after allowing time for antibody generation, simply by bleeding the animal and preparing serum samples from the whole blood.

[0112] Briefly, in exemplary embodiments, to generate monoclonal antibodies, a mouse is injected periodically with recombinant polypeptide against which the antibody is to be raised (e.g., 10-20 μg polypeptide emulsified in Freund's Complete Adjuvant). The mouse is given a final pre-fusion boost of a polypeptide containing the epitope that allows specific recognition of lymphatic endothelial cells in PBS, and four days later the mouse is sacrificed and its spleen removed. The spleen is placed in 10 ml serum-free RPMI 1640, and a single cell suspension is formed by grinding the spleen between the frosted ends of two glass microscope slides submerged in serum-free RPMI 1640, supplemented with 2 mM L-glutamine, 1 mM sodium pyruvate, 100 units/ml penicillin, and 100 μg/ml streptomycin (RPMI) (Gibco, Canada). The cell suspension is filtered through sterile 70-mesh Nitex cell strainer (Becton Dickinson, Parsippany, N.J.), and is washed twice by centrifuging at 200 g for 5 minutes and resuspending the pellet in 20 ml serum-free RPMI. Splenocytes taken from three naive Balb/c mice are prepared in a similar manner and used as a control. NS-1 myeloma cells, kept in log phase in RPMI with 11% fetal bovine serum (FBS) (Hyclone Laboratories, Inc., Logan, Utah) for three days prior to fusion, are centrifuged at 200 g for 5 minutes, and the pellet is washed twice.

[0113] Spleen cells (1×10⁸) are combined with 2.0×10⁷ NS-1 cells and centrifuged, and the supernatant is aspirated. The cell pellet is dislodged by tapping the tube, and 1 ml of 37° C. PEG 1500 (50% in 75 mM Hepes, pH 8.0) (Boehringer Mannheim) is added with stirring over the course of 1 minute, followed by the addition of 7 ml of serum-free RPMI over 7 minutes. An additional 8 ml RPMI is added and the cells are centrifuged at 200 g for 10 minutes. After discarding the supernatant, the pellet is resuspended in 200 ml RPMI containing 15% FBS, 100 μM sodium hypoxanthine, 0.4 μM aminopterin, 16 μM thymidine (HAT) (Gibco), 25 units/ml IL-6 (Boehringer Mannheim) and 1.5×10⁶ splenocytes/ml and plated into 10 Corning flat-bottom 96-well tissue culture plates (Corning, Corning N.Y.).

[0114] On days 2, 4, and 6, after the fusion, 100 μl of medium is removed from the wells of the fusion plates and replaced with fresh medium. On day 8, the fusion is screened by ELISA, testing for the presence of mouse IgG binding to polypeptide as follows. Immulon 4 plates (Dynatech, Cambridge, Mass.) are coated for 2 hours at 37° C. with 100 ng/well of ID 3Rα2 diluted in 25 mM Tris, pH 7.5. The coating solution is aspirated and 200 μl/well of blocking solution (0.5% fish skin gelatin (Sigma) diluted in CMF-PBS) is added and incubated for 30 minutes at 37° C. Plates are washed three times with PBS containing 0.05% Tween 20 (PBST) and 50 μl culture supernatant is added. After incubation at 37° C. for 30 minutes, and washing as above, 50 μl of horseradish peroxidase-conjugated goat anti-mouse IgG(Fc) (Jackson ImmunoResearch, West Grove, Pa.) diluted 1:3500 in PBST is added. Plates are incubated as above, washed four times with PBST, and 100 μl substrate, consisting of 1 mg/ml o-phenylene diamine (Sigma) and 0.1 μl/ml 30% H₂O₂ in 100 mM citrate, pH 4.5, are added. The color reaction is stopped after 5 minutes with the addition of 50 μl of 15% H₂SO₄. The A₄₉₀ absorbance is determined using a plate reader (Dynatech).

[0115] Selected fusion wells are cloned twice by dilution into 96-well plates and visual scoring of the number of colonies/well after 5 days. The monoclonal antibodies produced by hybridomas are isotyped using the Isostrip system (Boehringer Mannheim, Indianapolis, Ind.).

[0116] When the hybridoma technique is employed, myeloma cell lines may be used. Such cell lines suited for use in hybridoma-producing fusion procedures preferably are non-antibody-producing, have high fusion efficiency, and enzyme deficiencies that render them incapable of growing in certain selective media that support the growth of only the desired fused cells (hybridomas). For example, where the immunized animal is a mouse, one may use P3-X63/Ag8, P3-X63-Ag8.653, NS1/1.Ag 4 1, Sp210-Ag14, FO, NSO/U, MPC-11, MPC11-X45-GTG 1.7 and S194/15XX0 Bul; for rats, one may use R210.RCY3, Y3-Ag 1.2.3, IR983F and 4B210; and U-266, GM1500-GRG2, LICR-LON-HMy2 and UC729-6 are all useful in connection with cell fusions. It should be noted that the hybridomas and cell lines produced by such techniques for producing the monoclonal antibodies are contemplated to be compositions of the disclosure.

[0117] Depending on the host species, various adjuvants may be used to increase an immunological response. Such adjuvants include, but are not limited to, Freund's, mineral gels such as aluminum hydroxide, and surface active substances such as lysolecithin, pluronic polyols, polyanions, peptides, oil emulsions, keyhole limpet hemocyanin, and dinitrophenol. BCG (bacilli Calmette-Guerin) and Corynebacterium parvum are potentially useful human adjuvants.

[0118] Alternatively, other methods, such as EBV-hybridoma methods (Haskard and Archer, J. Immunol. Methods, 74(2), 361-67 (1984), and Roder et al.₅ Methods Enzymol., 121, 140-67 (1986)), and bacteriophage vector expression systems (see, e.g., Huse et al., Science, 246, 1275-81 (1989)) that are known in the art may be used. Further, methods of producing antibodies in non-human animals are described in, e.g., U.S. Pat. Nos. 5,545,806, 5,569,825, and 5,714,352, and U.S. Patent Application Publication No. 2002/0197266 A1).

[0119] Antibodies may also be produced by inducing in vivo production in the lymphocyte population or by screening recombinant immunoglobulin libraries or panels of highly specific binding reagents as disclosed in Orlandi et al. (Proc. Natl. Acad. Sci. 86: 3833-3837; 1989), and Winter and Milstein (Nature 349: 293-299, 1991).

[0120] Furthermore, phage display can be used to generate an antibody of the disclosure. In this regard, phage libraries encoding antigen-binding variable (V) domains of antibodies can be generated using standard molecular biology and recombinant DNA techniques (see, e.g., Sambrook et al. (eds.), Molecular Cloning, A Laboratory Manual, 3^{rd} Edition, Cold Spring Harbor Laboratory Press, New York (2001)). Phage encoding a variable region with the desired specificity are selected for specific binding to the desired antigen, and a complete or partial antibody is reconstituted comprising the selected variable domain. Nucleic acid sequences encoding the reconstituted antibody are introduced into a suitable cell line, such as a myeloma cell used for hybridoma production, such that antibodies having the characteristics of monoclonal antibodies are secreted by the cell (see, e.g., Janeway et al., supra, Huse et al., supra, and U.S. Pat. No. 6,265,150). Related methods also are described in U.S. Pat. Nos. 5,403,484; 5,571,698; 5,837,500; and 5,702,892. The techniques described in U.S. Pat. Nos. 5,780,279; 5,821,047; 5,824,520; 5,855,885; 5,858,657; 5,871,907; 5,969,108; 6,057,098; and 6,225,447, are also contemplated as useful in preparing antibodies according to the disclosure.

[0121] Antibodies can be produced by transgenic mice that are transgenic for specific heavy and light chain immunoglobulin genes. Such methods are known in the art and described in, for example U.S. Pat. Nos. 5,545,806 and 5,569,825, and Janeway et al., supra.

[0122] Methods for generating humanized antibodies are well known in the art and are described in detail in, for example, Janeway et al., supra, U.S. Pat. Nos. 5,225,539; 5,585,089; and 5,693,761; European Patent No. 0239400 BI; and United Kingdom Patent No. 2188638. Humanized antibodies can also be generated using the antibody resurfacing technology described in U.S. Pat. No. 5,639,641 and Pedersen et al., J. Mol. Biol., 235:959-973 (1994).

[0123] Techniques developed for the production of “chimeric antibodies,” the splicing of mouse antibody genes to human antibody genes to obtain a molecule with appropriate antigen specificity and biological activity, can be used (Morrison et al., Proc. Natl. Acad. Sci. 81: 6851-6855, 1984; Neuberger et al., Nature 312: 604-608, 1984; and Takeda et al., Nature 314: 452-454; 1985). Alternatively, techniques described for the production of single-chain antibodies (U.S. Pat. No. 4,946,778) can be adapted to produce IL13Rα2-specific single chain antibodies.

[0124] A preferred chimeric or humanized antibody has a human constant region, while the variable region, or at least a CDR, of the antibody is derived from a non-human species. Methods for humanizing non-human antibodies are well known in the art. (see U.S. Pat. Nos. 5,585,089, and 5,693,762). Generally, a humanized antibody has one or more amino acid residues introduced into a CDR region and/or into its framework region from a source which is non-human. Humanization can be performed, for example, using methods described in Jones et al. (Nature 321: 522-525, 1986), Riechmann et al., (Nature, 332: 323-327, 1988) and Verhoeyen et al. (Science 239:1534-1536, 1988), by substituting at least a portion of a rodent complementarity-determining region (CDR) for the corresponding region of a human antibody. Numerous techniques for preparing engineered antibodies are described, e.g., in Owens and Young, J. Immunol. Meth., 168:149-165 (1994). Further changes can then be introduced into the antibody framework to modulate affinity or immunogenicity.

[0125] Consistent with the foregoing description, compositions comprising CDRs may be generated using, at least in part, techniques known in the art to isolate CDRs. Complementarity-determining regions are characterized by six polypeptide loops, three loops for each of the heavy or light chain variable regions. The amino acid position in a CDR is defined by Kabat et al., “Sequences of Proteins of Immunological Interest,” U.S. Department of Health and Human Services, (1983), which is incorporated herein by reference. For example, hypervariable regions of human antibodies are roughly defined to be found at residues 28 to 35, from 49-59 and from residues 92-103 of the heavy and light chain variable regions [Janeway et al., supra]. The murine CDRs also are found at approximately these amino acid residues. It is understood in the art that CDR regions may be found within several amino acids of the approximated amino acid positions set forth above. An immunoglobulin variable region also consists of four “framework” regions surrounding the CDRs (FR1-4). The sequences of the framework regions of different light or heavy chains are highly conserved within a species, and are also conserved between human and murine sequences.

[0126] Compositions comprising one, two, and/or three CDRs of a heavy chain variable region or a light chain variable region of a monoclonal antibody are generated. Polypeptide compositions comprising one, two, three, four, five and/or six complementarity-determining regions of an antibody are also contemplated. Using the conserved framework sequences surrounding the CDRs, PCR primers complementary to these consensus framework sequences are generated to amplify the CDR sequence located between the primer regions. Techniques for cloning and expressing nucleotide and polypeptide sequences are well-established in the art [see e.g., Sambrook et al., Molecular Cloning: A Laboratory Manual, 2^{nd} Edition, Cold Spring Harbor, N.Y. (1989)]. The amplified CDR sequences are ligated into an appropriate plasmid. The plasmid comprising one, two, three, four, five and/or six cloned CDRs optionally contains additional polypeptide encoding regions linked to the CDR.

[0127] Framework regions (FR) of a murine antibody are humanized by substituting compatible human framework regions chosen from a large database of human antibody variable sequences, including over twelve hundred human V_{H} sequences and over one thousand V_{L} sequences. The database of antibody sequences used for comparison is downloaded from Andrew C. R. Martin's KabatMan web page (http://www.rubic.rdg.ac.uk/abs/). The Kabat method for identifying CDRs provides a means for delineating the approximate CDR and framework regions of any human antibody and comparing the sequence of a murine antibody for similarity to determine the CDRs and FRs. Best matched human V_{H} and V_{L} sequences are chosen on the basis of high overall framework matching, similar CDR length, and minimal mismatching of canonical and V_{H}/V_{L} contact residues. Human framework regions most similar to the murine sequence are inserted between the murine CDRs. Alternatively, the murine framework region may be modified by making amino acid substitutions of all or part of the native framework region that more closely resemble a framework region of a human antibody.

[0128] “Conservative” amino acid substitutions are made on the basis of similarity in polarity, charge, solubility, hydrophobicity, hydrophilicity, and/or the amphipathic nature of the residues involved. For example, nonpolar (hydrophobic) amino acids include alanine (Ala, A), leucine (Leu, L), isoleucine (Ile, I), valine (Val, V), proline (Pro, P), phenylalanine (Phe, F), tryptophan (Trp, W), and methionine (Met, M); polar neutral amino acids include glycine (Gly, G), serine (Ser, S), threonine (Thr, T), cysteine (Cys, C), tyrosine (Tyr, Y), asparagine (Asn, N), and glutamine (Gln, Q); positively charged (basic) amino acids include arginine (Arg, R), lysine (Lys, K), and histidine (His, H); and negatively charged (acidic) amino acids include aspartic acid (Asp, D) and glutamic acid (Glu, E). “Insertions” or “deletions” are preferably in the range of about 1 to 20 amino acids, more preferably 1 to 10 amino acids. The variation may be introduced by systematically making substitutions of amino acids in a polypeptide molecule using recombinant DNA techniques and assaying the resulting recombinant variants for activity. Nucleic acid alterations can be made at sites that differ in the nucleic acids from different species (variable positions) or in highly conserved regions (constant regions). Methods for expressing polypeptide compositions useful in the invention are described in greater detail below.

[0129] Additionally, another useful technique for generating antibodies for use in the methods of the invention may be one which uses a rational design-type approach. The goal of rational design is to produce structural analogs of biologically active polypeptides or compounds with which they interact (agonists, antagonists, inhibitors, peptidomimetics, binding partners, and the like). By creating such analogs, it is possible to fashion additional antibodies which are more immunoreactive than the native or natural molecule. In one approach, one would generate a three-dimensional structure for the antibodies or an epitope binding fragment thereof. This could be accomplished by x-ray crystallography, computer modeling or by a combination of both approaches. An alternative approach, “alanine scan,” involves the random replacement of residues throughout a molecule with alanine, and the resulting effect on function is determined.

[0130] It also is possible to solve the crystal structure of the specific antibodies. In principle, this approach yields a pharmacore upon which subsequent drug design can be based. It is possible to bypass protein crystallography altogether by generating anti-idiotypic antibodies to a functional, pharmacologically active antibody. As a mirror image of a mirror image, the binding site of anti-idiotype antibody is expected to be an analog of the original antigen. The anti-idiotype antibody is then be used to identify and isolate additional antibodies from banks of chemically- or biologically-produced peptides.

[0131] Chemically synthesized bispecific antibodies may be prepared by chemically cross-linking heterologous Fab or F(ab′)₂ fragments by means of chemicals such as heterobifunctional reagent succinimidyl-3-(2-pyridyldithiol)-propionate (SPDP, Pierce Chemicals, Rockford, Ill.). The Fab and F(ab′)₂ fragments can be obtained from intact antibody by digesting it with papain or pepsin, respectively (Karpovsky et al., J. Exp. Med. 160:1686-701, 1984; Titus et al., J. Immunol., 138:4018-22, 1987).

[0132] Methods of testing antibodies for the ability to bind to the epitope of the polypeptide of the invention, regardless of how the antibodies are produced, are known in the art and include any antibody-antigen binding assay such as, for example, radioimmunoassay (RIA), ELISA, Western blot, immunoprecipitation, and competitive inhibition assays (see, e.g., Janeway et al., infra, and U.S. Patent Application Publication No. 2002/0197266 A1).

[0133] Aptamers

[0134] Recent advances in the field of combinatorial sciences have identified short polymer sequences (e.g., oligonucleic acid or peptide molecules) with high affinity and specificity to a given target. For example, SELEX technology has been used to identify DNA and RNA aptamers with binding properties that rival mammalian antibodies, the field of immunology has generated and isolated antibodies or antibody fragments which bind to a myriad of compounds, and phage display has been utilized to discover new peptide sequences with very favorable binding properties. Based on the success of these molecular evolution techniques, it is certain that molecules can be created which bind to any target molecule. A loop structure is often involved with providing the desired binding attributes as in the case of aptamers, which often utilize hairpin loops created from short regions without complementary base pairing, naturally derived antibodies that utilize combinatorial arrangement of looped hyper-variable regions and new phage-display libraries utilizing cyclic peptides that have shown improved results when compared to linear peptide phage display results. Thus, sufficient evidence has been generated to indicate that high affinity ligands can be created and identified by combinatorial molecular evolution techniques. For the present disclosure, molecular evolution techniques can be used to isolate binding agents specific for the polypeptide disclosed herein. For more on aptamers, see generally, Gold, L., Singer, B., He, Y. Y., Brody. E., “Aptamers As Therapeutic And Diagnostic Agents,” J. Biotechnol. 74:5-13 (2000). Relevant techniques for generating aptamers are found in U.S. Pat. No. 6,699,843, which is incorporated herein by reference in its entirety.

[0135] In some embodiments, the aptamer is generated by preparing a library of nucleic acids; contacting the library of nucleic acids with a growth factor, wherein nucleic acids having greater binding affinity for the growth factor (relative to other library nucleic acids) are selected and amplified to yield a mixture of nucleic acids enriched for nucleic acids with relatively higher affinity and specificity for binding to the growth factor. The processes may be repeated, and the selected nucleic acids mutated and rescreened, whereby a growth factor aptamer is identified. Nucleic acids may be screened to select for molecules that bind to more than target. Binding more than one target can refer to binding more than one simultaneously or competitively. In some embodiments, a binding agent comprises at least one aptamer, wherein a first binding unit binds a first epitope of a polypeptide of the invention and a second binding unit binds a second epitope of the polypeptide.

[0136] Binding Agents: Primers, Primer Pairs, Primer Series

[0137] Also provided is a primer nucleic acid (or “primer”) comprising a nucleotide sequence which is complementary or substantially complementary to a portion of one of the nucleic acid molecules described herein. By “substantially complementary” as used herein means that the sequence is complementary at all but 3, 2, or 1 nucleotides. It is understood by the ordinarily skilled artisan that primers comprising a nucleotide sequence which is substantially complementary to a portion of one of the nucleic acid molecules described herein can hybridize to the nucleic acid molecule. The inventive primer in exemplary embodiments is modified to comprise a detectable label, such as, for instance, a radioisotope, a fluorophore, and an element particle. The inventive primer is useful in detecting the presence or absence of the fusion gene transcripts, the cDNA thereof, the nucleic acid encoding the fusion gene transcript, and the like. Both qualitative and quantitative analyses may be performed on cells comprising the inventive nucleic acid which encodes the polypeptide. Such analyses include, for example, any type of PCR based assay or hybridization assay, e.g., Southern blot, Northern blot. The sequence of the primer may be designed using online tools such as Primer3 software.

[0138] In exemplary aspects, the primer is at least 10 nucleotides in length and is substantially complementary to the sequence of any one of the fusion gene transcripts, the cDNA thereof, and the nucleic acid encoding the fusion gene transcripts described herein. For example, the primer is at least 10 nucleotides in length and is substantially complementary to the sequence of any one of SEQ ID NOs: 1-844, 1001-1844, and 2001-2844. In exemplary aspects, the primer is at least X and no more than Y nucleotides in length, wherein X is 10, 11, 12, 13, 14, or 15 and Y is 20, 21, 22, 23, 24, 25, 26, 27, 28, 29, or 30. In exemplary aspects, the primer is about 10 to about 20 nucleotides in length, about 10 to about 21 nucleotides in length, about 10 to about 22 nucleotides in length, about 10 to about 23 nucleotides in length, about 10 to about 24 nucleotides in length, about 10 to about 25 nucleotides in length, about 10 to about 26 nucleotides in length, about 10 to about 27 nucleotides in length, about 10 to about 28 nucleotides in length, about 10 to about 29 nucleotides in length, or about 10 to about 30 nucleotides in length. In exemplary aspects, the primer is about 11 to about 20 nucleotides in length, about 11 to about 21 nucleotides in length, about 11 to about 22 nucleotides in length, about 11 to about 23 nucleotides in length, about 11 to about 24 nucleotides in length, about 11 to about 25 nucleotides in length, about 11 to about 26 nucleotides in length, about 11 to about 27 nucleotides in length, about 11 to about 28 nucleotides in length, about 11 to about 29 nucleotides in length, or about 11 to about 30 nucleotides in length. In exemplary aspects, the primer is about 12 to about 20 nucleotides in length, about 12 to about 21 nucleotides in length, about 12 to about 22 nucleotides in length, about 12 to about 23 nucleotides in length, about 12 to about 24 nucleotides in length, about 12 to about 25 nucleotides in length, about 12 to about 26 nucleotides in length, about 12 to about 27 nucleotides in length, about 12 to about 28 nucleotides in length, about 12 to about 29 nucleotides in length, or about 12 to about 30 nucleotides in length. In exemplary aspects, the primer is about 13 to about 20 nucleotides in length, about 13 to about 21 nucleotides in length, about 13 to about 22 nucleotides in length, about 13 to about 23 nucleotides in length, about 13 to about 24 nucleotides in length, about 13 to about 25 nucleotides in length, about 13 to about 26 nucleotides in length, about 13 to about 27 nucleotides in length, about 13 to about 28 nucleotides in length, about 13 to about 29 nucleotides in length, or about 13 to about 30 nucleotides in length. In exemplary aspects, the primer is about 14 to about 20 nucleotides in length, about 14 to about 21 nucleotides in length, about 14 to about 22 nucleotides in length, about 14 to about 23 nucleotides in length, about 14 to about 24 nucleotides in length, about 14 to about 25 nucleotides in length, about 14 to about 26 nucleotides in length, about 14 to about 27 nucleotides in length, about 14 to about 28 nucleotides in length, about 14 to about 29 nucleotides in length, or about 14 to about 30 nucleotides in length. In exemplary aspects, the primer is about 15 to about 20 nucleotides in length, about 15 to about 21 nucleotides in length, about 15 to about 22 nucleotides in length, about 15 to about 23 nucleotides in length, about 15 to about 24 nucleotides in length, about 15 to about 25 nucleotides in length, about 15 to about 26 nucleotides in length, about 15 to about 27 nucleotides in length, about 15 to about 28 nucleotides in length, about 15 to about 29 nucleotides in length, or about 15 to about 30 nucleotides in length. In exemplary aspects, the primer is about 15 to about 30 nucleotides in length or about 20 to 30 nucleotides in length or about 25 to 30 nucleotides in length. In exemplary aspects, the primer is about 25 nucleotides in length.

[0139] In exemplary aspects, the binding agent is a primer pair comprising a primer as described herein and a second primer. When the binding agent is a primer pair, the primer pair typically comprises a forward primer and a reverse primer. In exemplary aspects, the forward primer comprises a sequence which binds upstream of the targeted sequence while the reverse primer comprises a sequence which binds downstream of the targeted sequence. In exemplary aspects, the targeted sequence is an exon of a gene listed in Column A or Column B of Table 1. In exemplary aspects, the exon is present in the sequence of any one of SEQ ID NOs: 1-844 or 1001-1844. In exemplary aspects, the binding agents of the invention comprises a series of primer pairs, wherein each primer pair of the series binds to a target sequence flanking an exon of each fusion coding sequence listed in the 9^{th} column from the left of Table 1. The series of primer pairs may be used to detect the presence or absence of the fusion transcript or the cDNA thereof.

[0140] In alternative embodiments, the targeted sequence comprises the junction of the fusion. The junction of the fusion genes and fusion transcripts of the invention are provided herein by way of providing the location of the junction of each cDNA of the fusion transcript in Table 5. In exemplary aspects, the binding agent comprises a primer pair which targets the junction of the fusion.

[0141] In exemplary aspects, the binding agent is a primer pair or a series of primer pairs as described herein, wherein the targeted sequence(s) is/are the cDNA of the fusion transcript.

[0142] Kits

[0143] The invention further provides kits comprising any one or a combination of the fusion transcripts, polypeptides, nucleic acid molecules, and/or binding agents. The kits are useful in diagnostic methods, research assays, and/or therapeutic methods relating to cancer and tumors. In exemplary embodiments, the kit comprises a binding agent specific for a fusion transcript described herein. In exemplary aspects, the kit comprises a binding agent specific for a nucleic acid encoding the fusion transcript. In exemplary aspects, the kit comprises a binding agent specific for a polypeptide. In exemplary aspects, the binding agents of the kit specifically bind to an epitope of the polypeptide or a target sequence of the fusion transcript or nucleic acid, which encompasses the junction.

[0144] In exemplary embodiments, the kit comprises a binding agent that specifically binds to a fusion polypeptide encoded by a fusion transcript encoded by a nucleic acid molecule comprising a structure A-B, wherein structure A is a portion of a gene listed in Column A of Table 1 and structure B is a portion of a gene listed in Column B of Table 1, wherein the gene listed in Column A and the gene listed in Column B are listed in the same row of Table 1, wherein structure B is located immediately 3′ to structure A. In exemplary aspects, the kit comprises a plurality of different binding agents, wherein each binding agent specifically binds to a different fusion gene, fusion transcript or polypeptide listed in one of Tables 1 to 4. In exemplary aspects, the kit comprises at least one binding agent that specifically binds to a fusion transcript encoded by a nucleic acid molecule comprising a structure A-B, wherein structure A is a portion of a gene listed in Column A of Table 1 and structure B is a portion of a gene listed in Column B of Table 1, wherein the gene listed in Column A and the gene listed in Column B are listed in the same row of Table 1 and the row is (a) marked with an asterisk in the 2^{nd} column from the left of Table 1, (b) not marked with a “#” in the 3^{rd} column from the left of Table 1, (c) not marked with a “̂” in the 4^{th} column from the left of Table 1, or (d) a combination thereof, wherein structure B is located immediately 3′ to structure A. In exemplary aspects, the plurality collectively binds to each and every one of the fusion polypeptides listed in Table 1, Table 2, Table 3, or Table 4. In exemplary aspects, the plurality collectively binds to each and every one of the fusion polypeptides listed in Table 1 marked with an asterisk in the 2^{nd} column from the left of Table 1. In exemplary aspects, the plurality collectively binds to each and every one of the fusion polypeptides listed in Table 1 not marked with a “#” in the 3^{rd} column from the left of Table 1. In exemplary aspects, the plurality collectively binds to each and every one of the fusion polypeptides listed in Table 1 not marked with a “̂” in the 4^{th} column from the left of Table 1.

[0145] In exemplary aspects, the kit comprises a combination of binding agents wherein the combination specifically binds to at least two different fusion transcripts described herein. In exemplary aspects, the kit comprises a combination of binding agents wherein the combination specifically binds to at least 3, at least 4, at least 5, at least 10, at least 15, at least 20, at least 25, at least 30, at least 40, at least 45, at least 50, at least 55, at least 60, at least 65, at least 70, at least 75, at least 80, at least 85, at least 90, at least 95, at least 100, at least 105, at least 110, at least 115 different fusion transcripts described in Table 1.

[0146] In exemplary aspects, the kit comprises a binding agent specific for a fusion transcript (or a polypeptide encoded thereby or a nucleic acid which encodes the fusion transcript) listed in a row Table 1 which is marked with an asterisk.

[0147] In exemplary aspects, the binding agents of the kits are primers, primer pairs, or primer pair series, as described herein.

[0148] Uses

[0149] The invention provides methods of using the fusion transcripts, polypeptides, nucleic acid molecules, and binding agents described herein. As described herein, the fusion transcripts of the invention are recurrent across multiple cancers and thus are useful in detecting a cancer or a tumor in a subject. In exemplary aspects, the fusion transcript occurs at a low frequency in the cancer or tumor.

[0150] In exemplary aspects, the binding agents are useful for detecting a cancer or a tumor in a subject. Accordingly, methods of detecting a cancer or a tumor in a subject are provided herein. In exemplary embodiments, the method comprises (i) contacting a binding agent (e.g., an antibody, antigen-binding portion thereof, and the like) that specifically binds to a polypeptide encoded by a fusion transcript of the invention with a sample obtained from the subject and (ii) determining the presence or absence of an immunoconjugate comprising the binding agent and the polypeptide, wherein a cancer or tumor is detected in the subject, when the immunoconjugate is determined as present. Suitable methods of determining the presence or absence of an immunoconjugate are known in the art and include immunoassays (e.g., Western blotting, an enzyme-linked immunosorbent assay (ELISA), a radioimmunoassay (RIA), and immunohistochemical assay.

[0151] In exemplary embodiments, the method comprises (i) contacting a binding agent that specifically binds to a fusion transcript of the invention with a sample obtained from the subject, and (ii) determining (a) the structure of the molecule bound to the binding agent or (b) the presence or absence of a double stranded nucleic acid molecule comprising the binding agent and the fusion transcript, when the binding agent binds to a junction region of the fusion transcript comprising a portion of the 3′ end of structure A and a portion of the 5′ end of structure B, wherein a cancer or tumor is detected in the subject, when the structure of the molecule is the structure of the fusion transcript or when the double stranded nucleic acid molecule is determined as present. In exemplary aspects, the binding agent is a primer pair which targets the junction of the fusion gene, the fusion transcript or the cDNA of the fusion transcript. Suitable methods of determining the structure of nucleic acids or the presence or absence of a double stranded nucleic acid molecule are known in the art and include Sanger sequencing, Next-Gen sequencing, eletrophoretic mobility shift assays, quantitative polymerase chain reaction (qPCR), including, but not limited to, real time PCR, Northern blotting and Southern blotting.

[0152] In exemplary aspects, the method is based on the detection of cDNA of one or more fusion transcripts. In some aspects, the method comprises producing cDNA with total cellular RNA isolated from cells obtained from the subject as templates. The method may then comprise contacting binding agents that specifically bind to the cDNAs of the fusion transcripts with the cDNAs and detecting binding of the binding agent to the cDNA. Suitable methods of isolating total cellular RNA and producing cDNA therefrom are known in the art and one such method is briefly described herein as Example 7.

[0153] In exemplary embodiments, the method comprises (i) generating a population of cDNAs from total RNA isolated from with a sample obtained from the subject, (ii) contacting a binding agent which specifically binds to a nucleic acid molecule comprising the reverse complement (e.g., the reverse complement RNA) sequence of a fusion transcript, with a sample obtained from the subject, and (ii) determining (a) the structure of the molecule bound to the binding agent or (b) the presence or absence of a double stranded nucleic acid molecule comprising the binding agent and the nucleic acid, when the binding agent binds to a sequence which is the reverse complement (e.g., the reverse complement RNA) of a junction region of the fusion transcript comprising a portion of the 3′ end of structure A and a portion of the 5′ end of structure B, wherein a cancer or tumor is detected in the subject, when the structure of the molecule is the structure of the nucleic acid or when the double stranded nucleic acid molecule is determined as present.

[0154] In exemplary embodiments, the method of detecting a cancer or a tumor in a subject comprises (i) assaying a sample obtained from the subject for expression of a fusion transcript of the invention, expression of a polypeptide encoded by a fusion transcript of the invention, or presence of a nucleic acid molecule encoding a fusion transcript of the invention, wherein a cancer or tumor is detected in the subject, when the sample is determined as positive for expression of the fusion transcript, expression of the polypeptide or presence of the nucleic acid molecule.

[0155] Methods of treating a cancer or a tumor in a subject are also provided herein. In exemplary embodiments, the method comprises (i) assaying a sample obtained from the subject for expression of a fusion transcript of the invention, a polypeptide encoded by a fusion transcript of the invention, or a nucleic acid molecule encoding a fusion transcript of the invention, and (ii) administering to the subject an anti-cancer therapeutic agent in an amount effective for treating a cancer or tumor, when the sample is determined as positive for expression of the fusion transcript, expression of the polypeptide or presence of the nucleic acid molecule.

[0156] Methods of determining a subject's need for an anti-cancer therapeutic agent is provided herein. In exemplary embodiments, the method comprises assaying a sample obtained from the subject for expression of a fusion transcript of the invention, a polypeptide encoded by a fusion transcript of the invention, or a nucleic acid molecule encoding a fusion transcript of the invention, wherein the subject needs an anti-cancer therapeutic agent, when the sample is determined as positive for expression of the fusion transcript, expression of the polypeptide or presence of the nucleic acid molecule.

[0157] With regard to the methods of treating a cancer or a tumor in a subject and methods of determining a subject's need for an anti-cancer therapeutic agent, the sample may be assayed for expression of the fusion transcript in accordance with any of the methods of detecting a cancer or a tumor in a subject are described herein. Also, with regard to these methods, in exemplary aspects, the anti-cancer therapeutic is one described herein under “Therapeutic Agents.”

[0158] Suitable methods of assaying samples for fusion transcripts, polypeptides encoded thereby, or for nucleic acids encoding the fusion transcripts are known in the art and include, but not limited to, Sanger sequencing, Next-Gen sequencing, eletrophoretic mobility shift assays, quantitative polymerase chain reaction (qPCR), real time PCR, Northern blotting, Southern blotting, immunoassays (e.g., Western blotting, an enzyme-linked immunosorbent assay (ELISA), a radioimmunoassay (RIA), and immunohistochemical assays).

[0159] Therapeutic Agents

[0160] Provided herein are therapeutic agents which target the fusion transcripts or polypeptides of the invention. In exemplary embodiments, the therapeutic agent an antibody or antigen binding fragment or the like which binds to the antigen (e.g., the polypeptide encoded by the fusion transcript) and which neutralizes the biological activity of the polypeptide.

[0161] In exemplary embodiments, the therapeutic agent is an antisense nucleic acid molecule which binds to the fusion transcript and prevents the production of the resulting polypeptide. In exemplary embodiments, the therapeutic agent is an antisense nucleic acid molecule which binds to a nucleic acid which encodes the fusion transcript and which prevents the production of the fusion transcript. The antisense molecule in exemplary aspects is about 5, about 10, about 15, about 20, about 25, about 30, about 35, about 40, about 45 or about 50 nucleotides in length. In exemplary aspects, the antisense molecule is about X to about Y nucleotides in length, wherein X is 10, 11, 12, 13, 14, or 15 and Y is 20, 21, 22, 23, 24, 25, 26, 27, 28, 29, or 30. In exemplary aspects, the antisense molecule is about 10 to about 20 nucleotides in length, about 10 to about 21 nucleotides in length, about 10 to about 22 nucleotides in length, about 10 to about 23 nucleotides in length, about 10 to about 24 nucleotides in length, about 10 to about 25 nucleotides in length, about 10 to about 26 nucleotides in length, about 10 to about 27 nucleotides in length, about 10 to about 28 nucleotides in length, about 10 to about 29 nucleotides in length, or about 10 to about 30 nucleotides in length. In exemplary aspects, the antisense molecule is about 11 to about 20 nucleotides in length, about 11 to about 21 nucleotides in length, about 11 to about 22 nucleotides in length, about 11 to about 23 nucleotides in length, about 11 to about 24 nucleotides in length, about 11 to about 25 nucleotides in length, about 11 to about 26 nucleotides in length, about 11 to about 27 nucleotides in length, about 11 to about 28 nucleotides in length, about 11 to about 29 nucleotides in length, or about 11 to about 30 nucleotides in length. In exemplary aspects, the antisense molecule is about 12 to about 20 nucleotides in length, about 12 to about 21 nucleotides in length, about 12 to about 22 nucleotides in length, about 12 to about 23 nucleotides in length, about 12 to about 24 nucleotides in length, about 12 to about 25 nucleotides in length, about 12 to about 26 nucleotides in length, about 12 to about 27 nucleotides in length, about 12 to about 28 nucleotides in length, about 12 to about 29 nucleotides in length, or about 12 to about 30 nucleotides in length. In exemplary aspects, the antisense molecule is about 13 to about 20 nucleotides in length, about 13 to about 21 nucleotides in length, about 13 to about 22 nucleotides in length, about 13 to about 23 nucleotides in length, about 13 to about 24 nucleotides in length, about 13 to about 25 nucleotides in length, about 13 to about 26 nucleotides in length, about 13 to about 27 nucleotides in length, about 13 to about 28 nucleotides in length, about 13 to about 29 nucleotides in length, or about 13 to about 30 nucleotides in length. In exemplary aspects, the antisense molecule is about 14 to about 20 nucleotides in length, about 14 to about 21 nucleotides in length, about 14 to about 22 nucleotides in length, about 14 to about 23 nucleotides in length, about 14 to about 24 nucleotides in length, about 14 to about 25 nucleotides in length, about 14 to about 26 nucleotides in length, about 14 to about 27 nucleotides in length, about 14 to about 28 nucleotides in length, about 14 to about 29 nucleotides in length, or about 14 to about 30 nucleotides in length. In exemplary aspects, the antisense molecule is about 15 to about 20 nucleotides in length, about 15 to about 21 nucleotides in length, about 15 to about 22 nucleotides in length, about 15 to about 23 nucleotides in length, about 15 to about 24 nucleotides in length, about 15 to about 25 nucleotides in length, about 15 to about 26 nucleotides in length, about 15 to about 27 nucleotides in length, about 15 to about 28 nucleotides in length, about 15 to about 29 nucleotides in length, or about 15 to about 30 nucleotides in length. In exemplary aspects, the antisense molecule is about 15 to about 30 nucleotides in length or about 20 to 30 nucleotides in length or about 25 to 30 nucleotides in length. In exemplary aspects, the antisense molecule is about 25 nucleotides in length.

[0162] In exemplary aspects, the antisense molecule is an antisense oligonucleotide or antisense nucleic acid analog which is complementary to at least a portion of a sequence of any one of SEQ ID NOs: 1-844, 1001-1844, and 2001-2844. The antisense molecule in some aspects is complementary to at least 15 contiguous bases of said sequence. The antisense molecule in some aspects is complementary to at least 20 contiguous bases of said sequence, at least 25 contiguous bases of the sequence. In exemplary aspects, the antisense molecule is an antisense oligonucleotide or antisense nucleic acid analog comprising at least 15 contiguous bases, which are complementary sequences to a portion of a sequence of any one of SEQ ID NOs: 1-844, 1001-1844, and 2001-2844. In exemplary aspects, the antisense molecule is an antisense oligonucleotide or antisense nucleic acid analog comprising at least 15 contiguous bases that differs by not more than 3 bases from a portion of 15 contiguous bases of said SEQ ID NOs.

[0163] The antisense molecule can be one which mediates RNA interference (RNAi). As known by one of ordinary skill in the art, RNAi is a ubiquitous mechanism of gene regulation in plants and animals in which target mRNAs are degraded in a sequence-specific manner (Sharp, Genes Dev., 15, 485-490 (2001); Hutvagner et al., Curr. Opin. Genet. Dev., 12, 225-232 (2002); Fire et al., Nature, 391, 806-811 (1998); Zamore et al., Cell, 101, 25-33 (2000)). The natural RNA degradation process is initiated by the dsRNA-specific endonuclease Dicer, which promotes cleavage of long dsRNA precursors into double-stranded fragments between 21 and 25 nucleotides long, termed small interfering RNA (siRNA; also known as short interfering RNA) (Zamore, et al., Cell. 101, 25-33 (2000); Elbashir et al., Genes Dev., 15, 188-200 (2001); Hammond et al., Nature, 404, 293-296 (2000); Bernstein et al., Nature, 409, 363-366 (2001)). siRNAs are incorporated into a large protein complex that recognizes and cleaves target mRNAs (Nykanen et al., Cell, 107, 309-321 (2001). It has been reported that introduction of dsRNA into mammalian cells does not result in efficient Dicer-mediated generation of siRNA and therefore does not induce RNAi (Caplen et al., Gene 252, 95-105 (2000); Ui-Tei et al., FEBS Lett, 479, 79-82 (2000)). The requirement for Dicer in maturation of siRNAs in cells can be bypassed by introducing synthetic 21-nucleotide siRNA duplexes, which inhibit expression of transfected and endogenous genes in a variety of mammalian cells (Elbashir et al., Nature, 411: 494-498 (2001)).

[0164] In this regard, the antisense molecule of the invention in some aspects mediates RNAi and in some aspects is a siRNA molecule specific for inhibiting the expression of the fusion transcript and/or the polypeptide encoded thereby. The term “siRNA” as used herein refers to an RNA (or RNA analog) comprising from about 10 to about 50 nucleotides (or nucleotide analogs) which is capable of directing or mediating RNAi. In exemplary embodiments, an siRNA molecule comprises about 15 to about 30 nucleotides (or nucleotide analogs) or about 20 to about 25 nucleotides (or nucleotide analogs), e.g., 21-23 nucleotides (or nucleotide analogs). The siRNA can be double or single stranded, preferably double-stranded.

[0165] In alternative aspects, the antisense molecule is alternatively a short hairpin RNA (shRNA) molecule specific for inhibiting the expression of the fusion transcript and/or the polypeptide encoded thereby. The term “shRNA” as used herein refers to a molecule of about 20 or more base pairs in which a single-standed RNA partially contains a palindromic base sequence and forms a double-strand structure therein (i.e., a hairpin structure). An shRNA can be an siRNA (or siRNA analog) which is folded into a hairpin structure. shRNAs typically comprise about 45 to about 60 nucleotides, including the approximately 21 nucleotide antisense and sense portions of the hairpin, optional overhangs on the non-loop side of about 2 to about 6 nucleotides long, and the loop portion that can be, e.g., about 3 to 10 nucleotides long. The shRNA can be chemically synthesized. Alternatively, the shRNA can be produced by linking sense and antisense strands of a DNA sequence in reverse directions and synthesizing RNA in vitro with T7 RNA polymerase using the DNA as a template.

[0166] Though not wishing to be bound by any theory or mechanism it is believed that after shRNA is introduced into a cell, the shRNA is degraded into a length of about 20 bases or more (e.g., representatively 21, 22, 23 bases), and causes RNAi, leading to an inhibitory effect. Thus, shRNA elicits RNAi and therefore can be used as an effective component of the disclosure. shRNA may preferably have a 3′-protruding end. The length of the double-stranded portion is not particularly limited, but is preferably about 10 or more nucleotides, and more preferably about 20 or more nucleotides. Here, the 3′-protruding end may be preferably DNA, more preferably DNA of at least 2 nucleotides in length, and even more preferably DNA of 2-4 nucleotides in length.

[0167] In exemplary aspects, the antisense molecule is a microRNA (miRNA). As used herein the term “microRNA” refers to a small (e.g., 15-22 nucleotides), non-coding RNA molecule which base pairs with mRNA molecules to silence gene expression via translational repression or target degradation. microRNA and the therapeutic potential thereof are described in the art. See, e.g., Mulligan, MicroRNA: Expression, Detection, and Therapeutic Strategies, Nova Science Publishers, Inc., Hauppauge, N.Y., 2011; Bader and Lammers, “The Therapeutic Potential of microRNAs” Innovations in Pharmaceutical Technology, pages 52-55 (March 2011)

[0168] In exemplary aspects, the antisense molecule is an antisense oligonucleotide comprising DNA or RNA or both DNA and RNA. In exemplary aspects, the antisense oligonucleotide comprises naturally-occurring nucleotides and/or naturally-occurring internucleotide linkages. The antisense oligonucleotide in some aspects is single-stranded and in other aspects is double-stranded. In exemplary aspects, the antisense oligonucleotide is synthesized and in other aspects is obtained (e.g., isolated and/or purified) from natural sources. In exemplary aspects, the antisense molecule is a phosphodiester oligonucleotide.

[0169] In alternative aspects, the antisense molecule is an antisense nucleic acid analog, e.g., comprising non-naturally-occurring nucleotides and/or non-naturally-occurring internucleotide linkages (e.g., phosphoroamidate linkages, phosphorothioate linkages). In exemplary aspects, the antisense nucleic acid analog comprises one or more modified nucleotides, including, but not limited to, 5-fluorouracil, 5-bromouracil, 5-chlorouracil, 5-iodouracil, hypoxanthine, xanthine, 4-acetylcytosine, 5-(carboxyhydroxymethyl) uracil, 5-carboxymethylaminomethyl-2-thiouridine, 5-carboxymethylaminomethyluracil, dihydrouracil, beta-D-galactosylqueuosine, inosine, N⁶-isopentenyladenine, 1-methylguanine, 1-methylinosine, 2,2-dimethylguanine, 2-methyladenine, 2-methylguanine, 3-methylcytosine, 5-methylcytosine, N-substituted adenine, 7-methylguanine, 5-methylammomethyluracil, 5-methoxyaminomethyl-2-thiouracil, beta-D-mannosylqueuosine, 5′-methoxycarboxymethyluracil, 5-methoxyuracil, 2-methylthio-N⁶-isopentenyladenine, uracil-5-oxyacetic acid (v), wybutoxosine, pseudouracil, queuosine, 2-thiocytosine, 5-methyl-2-thiouracil, 2-thiouracil, 4-thiouracil, 5-methyluracil, uracil-5-oxyacetic acid methylester, 3-(3-amino-3-N-2-carboxypropyl) uracil, and 2,6-diaminopurine.

[0170] In exemplary aspects, the antisense nucleic acid analog comprises non-naturally-occurring nucleotides which differ from naturally occurring nucleotides by comprising a ring structure other than ribose or 2-deoxyribose. In exemplary aspects, the antisense nucleic acid comprises non-naturally-occurring nucleotides which differ from naturally occurring nucleotides by comprising a chemical group in place of the phosphate group.

[0171] In exemplary aspects, the antisense nucleic acid analog comprises or is a methylphosphonate oligonucleotide, which are noncharged oligomers in which a non-bridging oxygen atom is replaced by a methyl group at each phosphorous in the oligonucleotide chain. In exemplary aspects, the antisense nucleic acid analog comprises or is a phosphorothioate, wherein at least one of the non-bridging oxygen atom is replaced by a sulfur at each phosphorous in the oligonucleotide chain.

[0172] In exemplary aspects, the antisense nucleic acid analog is an analog comprising a replacement of the hydrogen at the 2′-position of ribose with an O-alkyl group, e.g., methyl. In exemplary aspects, the antisense nucleic acid analog comprises a modified ribonucleotide wherein the 2′ hydroxyl of ribose is modified to methoxy (OMe) or methoxy-ethyl (MOE) group. In exemplary aspects, the antisense nucleic acid analog comprises a modified ribonucleotide wherein the 2′ hydroxyl of ribose is allyl, amino, azido, halo, thio, O-allyl, O—C₁-C₁₀ alkyl, O—C₁-C₁₀ substituted alkyl, O—C₁-C₁₀ alkoxy, O—C₁-C₁₀ substituted alkoxy, OCF₃, O(CH₂)₂SCH₃, O(CH₂)₂—O—N(R¹)(R²), or O(CH₂)—C(═O)—N(R¹)(R²), wherein each of R¹ and R² is independently selected from the group consisting of H, an amino protecting group or substituted or unsubstituted C₁-C₁₀ alkyl. In exemplary aspects, the antisense nucleic acid analog comprises a modified ribonucleotide wherein the 2′ hydroxyl of ribose is 2′F, SH, CN, OCN, CF₃, O-alkyl, S-Alkyl, N(R¹)alkyl, O-alkenyl, S-alkenyl, or N(R¹)-alkenyl, O-alkynyl, S-alkynyl, N(R¹)-alkynyl, O-alkylenyl, O-Alkyl, alknyyl, alkaryl, aralkyl, O-alkaryl, or O-aralkyl.

[0173] In exemplary aspects, the antisense nucleic acid analog comprises a substituted ring. In exemplary aspects, the antisense nucleic acid analog is or comprises a hexitol nucleic acid. In exemplary aspects, the antisense nucleic acid analog is or comprises a nucleotide with a bicyclic or tricyclic sugar moiety. In exemplary aspects, the bicyclic sugar moiety comprises a bridge between the 4′ and 2′ furanose ring atoms. Examplary moieties include, but are not limited to: —[C(Rₐ)(R_{b})]ₙ—, —[C(Rₐ)(R_{b})]ₙ-0-, —C(RₐR_{b})—N(R)-0- or, —C(RₐR_{b})-0-N(R)—; 4′-CH₂-2′, 4′-(CH₂)₂-2′, 4′-(CH₂)₃-2′, 4′-(CH₂)-0-2′ (LNA); 4′-(CH₂)—S-2′; 4′-(CH₂)₂-0-2′ (ENA); 4′-CH(CH₃)-0-2′ (cEt) and 4′-CH(CH₂OCH₃)-0-2′, 4′-C(CH₃)(CH₃)-0-2′, 4′-CH₂—N(OCH₃)-2′, 4′-CH₂-0-N(CH₃)-2′ 4′-CH₂-0-N(R)-2′, and 4′-CH₂—N(R)-0-2′-, wherein each R is, independently, H, a protecting group, or C₁C₁₂ alkyl; 4′-CH₂—N(R)-0-2′, wherein R is H, C1-C12 alkyl, or a protecting group, 4′-CH₂—C(H)(CH₃)-2′, 4′-CH₂—C(═CH₂)-2′. Such antisense nucleic acid analogs are known in the art. See, e.g., International Application Publication No. WO 2008/154401, U.S. Pat. No. 7,399,845, International Application Publication No. WO2009/006478, International Application Publication No. WO2008/150729, U.S. Application Publication No. US2004/0171570, U.S. Pat. No. 7,427,672, and Chattopadhyaya, et al, J. Org. Chem., 2009, 74, 118-134). In exemplary aspects, the antisense nucleic acid analog comprises a nucleoside comprising a bicyclic sugar moiety, or a bicyclic nucleoside (BNA). In exemplary aspects, the antisense nucleic acid analog comprises a BNA selected from the group consisting of: α-L-Methyleneoxy (4′-CH₂-0-2′) BNA, Aminooxy (4′-CH₂-0-N(R)-2′) BNA, β-D-Methyleneoxy (4′-CH₂-0-2′) BNA, Ethyleneoxy (4′-(CH₂)₂-0-2′) BNA, methylene-amino (4′-CH2-N(R)-2′) BNA, methyl carbocyclic (4′-CH₂—CH(CH₃)-2′) BNA, Methyl(methyleneoxy) (4′-CH(CH₃)-0-2′) BNA (also known as constrained ethyl or cEt), methylene-thio (4′-CH₂—S-2′) BNA, Oxyamino (4′-CH₂—N(R)-0-2′) BNA, and propylene carbocyclic (4′-(CH₂)₃-2′) BNA. Such BNAs are described in the art. See, e.g., International Patent Publication No. WO 2014/071078.

[0174] In exemplary aspects, the antisense nucleic acid analog comprises a modified backbone. In exemplary aspects, the antisense nucleic acid analog is or comprises a peptide nucleic acid (PNA) containing an uncharged flexible polyamide backbone comprising repeating N-(2-aminoethyl)glycine units to which the nucleobases are attached via methylene carbonyl linkers. In exemplary aspects, the antisense nucleic acid analog comprises a backbone substitution. In exemplary aspects, the antisense nucleic acid analog is or comprises an N3′→P5′ phosphoramidate, which results from the replacement of the oxygen at the 3′ position on ribose by an amine group. Such nucleic acid analogs are further described in Dias and Stein, Molec Cancer Ther 1: 347-355 (2002). In exemplary aspects, the antisense nucleic acid analog comprises a nucleotide comprising a conformational lock. In exemplary aspects, the antisense nucleic acid analog is or comprises a locked nucleic acid.

[0175] In exemplary aspects, the antisense nucleic acid analog comprises a 6-membered morpholine ring, in place of the ribose or 2-deoxyribose ring found in RNA or DNA. In exemplary aspects, the antisense nucleic acid analog comprises non-ionic phophorodiamidate intersubunit linkages in place of anionic phophodiester linkages found in RNA and DNA. In exemplary aspects, the nucleic acid analog comprises nucleobases (e.g., adenine (A), cytosine (C), guanine (G), thymine, thymine (T), uracil (U)) found in RNA and DNA. In exemplary aspects, the IRES inhibitor is a Morpholino oligomer comprising a polymer of subunits, each subunit of which comprises a 6-membered morpholine ring and a nucleobase (e.g., A, C, G, T, U), wherein the units are linked via non-ionic phophorodiamidate intersubunit linkages. For purposes herein, when referring to the sequence of a Morpholino oligomer, the conventional single-letter nucleobase codes (e.g., A, C, G, T, U) are used to refer to the nucleobase attached to the morpholine ring.

[0176] Biological Samples

[0177] With regard to the methods disclosed herein, in some embodiments, the sample comprises a bodily fluid, including, but not limited to, blood, plasma, serum, lymph, breast milk, saliva, mucous, semen, vaginal secretions, cellular extracts, inflammatory fluids, cerebrospinal fluid, feces, vitreous humor, or urine obtained from the subject. In some aspects, the sample is a composite panel of at least two of the foregoing samples. In some aspects, the sample is a composite panel of at least two of a blood sample, a plasma sample, a serum sample, and a urine sample. In exemplary aspects, the sample comprises blood or a fraction thereof (e.g., plasma, serum, fraction obtained via leukopheresis). In exemplary aspects, the biological sample comprises cancer cells or tumor cells. In exemplary aspects, the biological sample is a biopsied sample.

[0178] Subjects

[0179] With regard to the methods disclosed herein, the subject in exemplary aspects is a mammal, including, but not limited to, mammals of the order Rodentia, such as mice and hamsters, and mammals of the order Logomorpha, such as rabbits, mammals from the order Carnivora, including Felines (cats) and Canines (dogs), mammals from the order Artiodactyla, including Bovines (cows) and Swines (pigs) or of the order Perssodactyla, including Equines (horses). In some aspects, the mammals are of the order Primates, Ceboids, or Simoids (monkeys) or of the order Anthropoids (humans and apes). In some aspects, the mammal is a human.

[0180] Cancer and Tumors

[0181] The cancer in exemplary aspects is one selected from the group consisting of acute lymphocytic cancer, acute myeloid leukemia, alveolar rhabdomyosarcoma, bone cancer, brain cancer, breast cancer, cancer of the anus, anal canal, or anorectum, cancer of the eye, cancer of the intrahepatic bile duct, cancer of the joints, cancer of the neck, gallbladder, or pleura, cancer of the nose, nasal cavity, or middle ear, cancer of the oral cavity, cancer of the vulva, chronic lymphocytic leukemia, chronic myeloid cancer, colon cancer, esophageal cancer, cervical cancer, gastrointestinal carcinoid tumor, Hodgkin lymphoma, hypopharynx cancer, kidney cancer, larynx cancer, liver cancer, lung cancer, malignant mesothelioma, melanoma, multiple myeloma, nasopharynx cancer, non-Hodgkin lymphoma, ovarian cancer, pancreatic cancer, peritoneum, omentum, and mesentery cancer, pharynx cancer, prostate cancer, rectal cancer, renal cancer (e.g., renal cell carcinoma (RCC)), small intestine cancer, soft tissue cancer, stomach cancer, testicular cancer, thyroid cancer, ureter cancer, and urinary bladder cancer. In particular aspects, the cancer is selected from the group consisting of: head and neck, ovarian, cervical, bladder and oesophageal cancers, pancreatic, gastrointestinal cancer, gastric, breast, endometrial and colorectal cancers, hepatocellular carcinoma, glioblastoma, bladder, lung cancer, e.g., non-small cell lung cancer (NSCLC), bronchioloalveolar carcinoma.

[0182] As used herein, the term “tumor” refers to any tumor cell, including but not limited to a tumor cell of one of the following: Tumor Type Data Status Acute Myeloid Leukemia (AML), Breast cancer (BRCA), Chromophobe renal cell carcinoma (KICH), Clear cell kidney carcinoma (KIRC), Colon and rectal adenocarcinoma (COAD, READ), Cutaneous melanoma (SKCM), Glioblastoma multiforme (GBM), Head and neck squamous cell carcinoma (HNSC), Lower Grade Glioma (LGG), Lung adenocarcinoma (LUAD), Lung squamous cell carcinoma (LUSC), Ovarian serous cystadenocarcinoma (OV), Papillary thyroid carcinoma (THCA), Stomach adenocarcinoma (STAD), Prostate adenocarcinoma (PRAD), Uterine corpus endometrial carcinoma (UCEC), Urothelial bladder cancer (BLCA), Papillary kidney carcinoma (KIRP), Liver hepatocellular carcinoma (LIHC), Cervical cancer (CESC), Uterine carcinosarcoma (UCS), Adrenocortical carcinoma (ACC), Esophageal cancer (ESCA), Pheochromocytoma & Paraganglioma (PCPG), Pancreatic ductal adenocarcinoma (PAAD), Diffuse large B-cell lymphoma (DLBC), Cholangiocarcinoma (CHOL), Mesothelioma (MESO), Sarcoma (SARC), Testicular germ cell cancer (TGCT), Uveal melanoma (UVM).

[0183] The following examples serve only to illustrate the invention or provide background information relating to the invention. The following examples are not intended to limit the scope of the invention in any way.

### EXAMPLES

### Example 1

[0184] To fully characterize the landscape of gene fusions across multiple cancers, a novel algorithm, MOJO (Minimum Overlap Junction Optimizer) was developed. MOJO uses paired-end transcriptome sequencing data to detect fusions with high sensitivity and specificity. Extensive performance evaluations of MOJO in comparison with eight previously published methods was performed using a compendium of eighteen previously published cell line transcriptomes. MOJO demonstrated the highest sensitivity and specificity among the methods compared.

[0185] Using MOJO, fusion discovery on 9,704 tumors across 33 cancer types in the Cancer Genome Atlas (TCGA) was performed. Several heuristic filters were further developed and applied to exclude spurious recurrent fusions that could manifest in such large pan-cancer analysis. A subset of fusions detected in our screen could be due to germline gene fusions that are the result of copy number variation in human populations (Chase et al., Haematologica 95(1): 20-26 (2010)). To account for this possibility, 3,600 cell line and tissue transcriptomes from healthy individuals were analyzed and all fusions that were detected at <5× enrichment in primary tumors were excluded. These filtering criteria were extremely stringent in enriching for strictly somatic events. For example, we detected previously well characterized oncogenic fusion BCR-ABL1 in 7 normal tissues and is detected at similar frequency in the tumor transcriptomes. It was proposed that fusions detected in normal tissues are sub-clonal (i.e, fusion is generated in a very small sub-population of cells and selected because it confers a selective advantage). In all, 22% of the fusion genes were excluded after incorporating the normal data. Table 3 lists those fusions which remained after the filtering criteria was applied.

[0186] 22,289 high confidence somatic fusion calls comprising 16,531 distinct fusion genes were nominated. Across 33 cancer types, we identified 124 highly recurrent (≥5 tumors across cancers) protein coding fusion genes with breakpoints clustered in at least one of the genes involved in the fusion (low entropy), suggesting that these are not consequences of focal SCNAs. 26 (21%) of these are previously known, and, we found that 24 out of 33 cancer types studied here have at least one tumor with a known fusion. Interestingly, we found that 60% (14/22) of these known recurrent fusions in tumors of epithelial origin were detected in multiple cancer types. For example, we found targetable FGFR3::TACC3 fusion in twelve cancer types, seven more than previously reported. We found an ESR1::CCDC170 fusion in uterine corpus endometrial carcinoma, uterine carcinosarcoma and ovarian, in addition to the previously reported, breast cancer. All four cancers are estrogen driven suggesting a shared mechanism. Wnt pathway activating and potentially actionable PTPRK::RSPO3 is detected in esophageal and gastric tissue tumors, in addition to the colon and rectal cancers in which this fusion was first discovered.

[0187] Consistent with the patterns of previously known recurrent fusions across cancers, we found that 91.8% (90) of novel recurrent fusions were detected in multiple cancer types, and, therefore, highlighting the importance of screening all cancer diagnoses with a comprehensive panel of therapeutically responsive fusions. Among these, we identified 59 highly recurrent fusions that are detected in multiple cancers and are hypothesized to have a functional role (Table 1 fusions marked with * and not marked with #). These highly recurrent fusions present compelling hypotheses to their role in tumor progression.

[0188] For example, the fusion gene BMPR1B-PDLIM5, seen in 28 tumors of Breast, Prostate and Ovarian cancers (all hormone driven), generates a novel truncated PDLIM5 gene that loses a phosphorylation site and retains the C-terminus LIM domains. A previous study has shown that the phosphorylation site is essential to inhibit migration (Yan et al., Nat Commun 6:6137 (2015)). In an another example, we found 59 tumors in all of TCGA that have a fusion gene that results in BCAR4 fused to the 3′-end of the fusion. First identified in tamoxifen resistance screen, BCAR4 overexpression has been shown to induce anchorage independent growth in estrogen dependent ZR-75-1 breast cancer cell line (Godinho et al., Br J Cancer 103(8): 2384-1291 (2010)). We hypothesized that a fusion event is common mechanism with which the BCAR4 is over-expressed in cancers. In a third example, we discovered a novel fusion gene that is the result of a tandem duplication event that fuses LIM domain containing 7 (LMO7) and ubiquitin carboxyl-terminal esterase L3 (UCHL3). We found this fusion in 65 tumors across 16 cancers (6 in breast) with the most predominant isoform fusing the first exon of LMO7 to the second exon of UCHL3. The resulting protein is contains the complete enzymatic domain of UCHL3. Higher expression of UCHL3 has been previously reported to be associated with invasive breast cancer (Miyoshi et al., Cancer Sci 97(6): 523-529 (2006)). In a fourth example, we discovered a novel fusion that is the result of a translocation event and fuses the thymidylate synthetase gene (TYMS) on 18p11 to septin-9 (SEPT9) on 17q25. 11 tumors in three different cancer types are predicted to have this fusion. Interestingly, SEPT9 has been previously reported as a fusion partner of MLL in therapy related acute myeloid leukemia (Osaka et al., PNAS 96(11): 6428-6433 (1999)). SEPT9 overexpression has been shown to promote mesenchymal-like migration of renal cells and correspondingly, SEPT9 knockdown decreased migration (Dolat et al., J Cell Biol 207: 225-235 (2014); Estey et al., J Cell Biol 191: 741-749 (2010)).

[0189] Additional novel and highly recurrent fusions are functionally evaluated and biologically characterized as described herein.

### Example 2

[0190] This example describes the generation of stable cell lines expressing the fusions in MCF10A benign breast epithelial cells.

[0191] To functionally evaluate each fusion gene transcript, the fusion genes were synthesized and stable cell lines with the fusion gene integrated in the genome were generated. In one example, MCF10A, a breast epithelial cell line, was chosen as the genetic background in which the function of select fusions were analyzed. MCF10A is a non-malignant cell line that has been previously used to evaluate the effects of oncogenic mutations both in-vitro and in-vivo (Soule et al., Cancer Res 50(18): 60756086 (1990)). For the first phase of experiments, 14 fusion genes were selected, mainly based on their recurrence level as well as the ability to synthesize the construct. We synthesized the fusion genes and generated MCF10A cell lines stably expressing these fusion genes.

### Example 3

[0192] Using the stable cell lines described in Example 2, the role in proliferation of seven fusion gene transcripts was analyzed. In-vitro proliferation assays as essentially described in White et al., Nature 471 (7339): 518-522 (2011)) were performed in triplicate in 384-well plates. A total of seven stable cell lines, each expressing a different fusion gene transcript, was used in these assays. The stable cell lines expressed one of ARL15_NDUFS4; BMPR1B_PDLIM5; CAPZA2_MET; CD44_PDHX; LMO7_UCHL3. Each cell line was plated in 16 wells of a plate at a density of 400 cells/well. Proliferation rates were measured on Day 4 using the CellTiterGlo® assay kit from Promega (Madison, Wis.). Proliferation measurements were normalized for with- and across-plate batch effects and compared to a control cell line to determine change in proliferation. All seven cell lines showed statistically significant increase in proliferation (FIG. 1).

### Example 4

[0193] Five of the stable cell lines that demonstrated an in-vitro increase in proliferation were selected for in-vivo assay for tumor growth in mice. These were stable cells lines expressing ARL15_NDUFS4; BMPR1B_PDLIM5; CAPZA2_MET; CD44_PDHX; LMO7_UCHL3. Xenograft assays were performed as described in Moyano et al., J Clin Invest 116(1): 261-270 (2006). To determine if over expression of the fusions is itself sufficient to induce tumor growth in mice, mouse mammary fat pads were inoculated with MCF10A fusion-positive cell lines in the presence of Matrigel. The five fusion cell lines along with the GFP-only control and parental MCF10A cell line were tested. Three of the fusion cell lines, BMPR1B-PDLIM5, ZC3H7A-BCAR4 and LMO7-UCHL3 showed palpable tumors at week 5 with increasing tumor volume till week 9 and neither the GFP-only control nor the parental MCF10A control showed tumor growth (FIG. 2). For two fusion cell lines, ARL15-NDUFS4 and CAPZA2-MET, an in vivo phenotype was not observed. It is thought that the benign MCF10A genetic background may not be sufficient to induce tumorigenesis without supporting mutations. For example, unlike the three fusions that showed in-vivo tumor growths, these two fusions were only detected in one tumor sample each, in the breast cancer cohort. ARL15-NDUFS4 is detected at high frequency in 26 (5%) of lung squamous cell carcinoma and CAPZA2-MET in 4 (1%) lung adenocarcinoma samples suggesting that these fusions when expressed in tissue types other than that of MCF10A may exhibit a tumorigenic phenotypes. In addition, for a vast majority of these fusions, co-occurring mutations in a specific pathway that may occur, in conjunction with the fusion, to confer proliferation advantage to cells. Therefore, the stable cell lines will be tested and evaluated in other cell lines, including malignant ones.

### Example 5

[0194] Fusion transcripts BMPR1B-PDLIM5, ZC3H7A-BCAR4 or LMO7-UCHL3 are evaluated in additional genetic backgrounds: MCF7 (estrogen-receptor positive, invasive ductal breast carcinoma), MDA-MB-231 (triple negative breast cancer) and NIH3T3 (mouse embryonic fibroblast) cell lines. The fusion transcripts are stably expressed in these cells lines and then evaluated for a hormone dependence. The stable cell lines are used in in-vitro proliferation assays and in-vivo proliferation assays. In these assays, tumor progression in mice is monitored and siRNAs targeting the fusion junction to evaluate the tumor response to repression of fusion gene expression are administered to the mice. Tumor progression in the mice following siRNA administration is monitored.

[0195] Stable cells lines are made for each and every one of the 58 novel recurrent fusions reported here. The stable cell lines are then used in the proliferation and tumor growth assays described in Examples 3 and 4.

[0196] For fusions that do not show phenotype in the MCF10A background, the fusion transcript is expressed in the genetic background (tumor tissue type) where it is deemed as expressed at high frequency. For example, ARL15-NDUFS4, which is detected at high frequency in lung squamous cell carcinoma and which failed to show a phenotype in MCF10A, is expressed in SW900, a squamous cell carcinoma cell line and assay for phenotype. In this manner, a rigorous case-by-case approach is taken to identify the appropriate genetic background in which to evaluate the fusion. In addition, for fusions with co-occurring mutations, mutations are introduced in the transfected cell lines using CRISPR/Cas9 system and assayed for tumorigenic phenotypes.

### Example 6

[0197] To evaluate the fusion gene transcripts for cellular migration and invasion phenotypes, in vitro experiments are carried out as previously described (Ma et al., Nature 449(7163): 682-688 (2007)). Fusion gene transcripts produced in late stage tumors might confer a migratory or invasive phenotype that accelerate tumor progression. Using a Boyden chamber transwell migration and invasion assay, cell motility and their ability to migrate through the extra-cellular matrix or basement membrane extract is quantified.

### Example 7

[0198] The presence or absence of fusion gene transcripts is assayed in a biological sample obtained from a subject following the methods described in van Dongen et al., Leukemia 13(12): 1901-1928 (1999). Briefly, total cellular RNA is isolated from a tissue sample obtained from a subject using an RNeasy® purification kit (Qiagen, Venlo, Limburg). Using the isolated RNA as a template, cDNA is synthesized using the SuperScript® III Reverse Transcriptase kit (Life Technologies, Carlsbad, Calif.). A priori primers specific for the recurrent fusions reported here are designed using Primer3, a free online tool to design and analyze primers for PCR and real time PCR experiments. Primers are synthesized and used to assay for the presence or absence of each fusion transcript using PCR. Gels are run to identify and extract the PCR product. Each identified band is sequenced using Sanger sequencing. The sequence obtained is used to establish the presence or absence of the fusion. Further details for carrying this assay out are published in van Dongen et al., Leukemia 13(12): 1901-28 (1999). The output of the PCR reactions are also assessed for the presence of the fusion transcript by pooling the PCR products and sequencing them using next-generation sequencing.

[0199] A strictly high-throughput sequencing based assay is developed to detect the fusion transcripts. The primary component of this assay is the biotin-tagged capture probe sequences designed to capture the exons comprising the fusion transcripts. More specifically, each exon predicted to be involved in the fusion transcripts described here are targeted by the capture probe sequence. Using these probes, the cDNA sequences containing the targeted exons are isolated and subsequently sequenced using next-generation sequencing. A computational method, similar to MOJO, is used to identify fusion junctions from the sequencing output. An outline of our approach is described in Ueno et al., Cancer Sci 103-1: 131-135 (2012).

TABLE 5

| | | Location of | Location of |
|---|---|---|---|
| | | Junction is | Junction in |
| | SEQ ID NO: | SEQ ID NO: | SEQ ID NO: |
| Fusion transcript | X | X | (X + 1000) |
| ASCC1\|51008_MICU1\|10367 | seq_304 | 871-872 | 1178-1179 |
| ASCC1\|51008_MICU1\|10367 | seq_300 | 955-956 | 1223-1224 |
| ASCC1\|51008_MICU1\|10367 | seq_299 | 489-490 | 796-797 |
| ASCC1\|51008_MICU1\|10367 | seq_308 | 616-617 | 659-660 |
| ASCC1\|51008_MICU1\|10367 | seq_301 | 234-235 | 277-278 |
| ASCC1\|51008_MICU1\|10367 | seq_302 | 573-574 | 841-842 |
| ASCC1\|51008_MICU1\|10367 | seq_303 | 489-490 | 796-797 |
| ASCC1\|51008_MICU1\|10367 | seq_309 | 573-574 | 841-842 |
| ASCC1\|51008_MICU1\|10367 | seq_305 | 934-935 | 1218-1219 |
| ASCC1\|51008_MICU1\|10367 | seq_307 | 552-553 | 836-837 |
| ASCC1\|51008_MICU1\|10367 | seq_306 | 552-553 | 836-837 |
| ASCC1\|51008_MICU1\|10367 | seq_310 | 234-235 | 277-278 |
| CMTM7\|112616_CMTM8\|152189 | seq_350 | 333-334 | 569-570 |
| CMTM7\|112616_CMTM8\|152189 | seq_351 | 333-334 | 569-570 |
| CMTM7\|112616_CMTM8\|152189 | seq_349 | 333-334 | 569-570 |
| CMTM7\|112616_CMTM8\|152189 | seq_348 | 159-160 | 395-396 |
| MYH9\|4627_TXN2\|25828 | seq_521 | 333-334 | 564-565 |
| MYH9\|4627_TXN2\|25828 | seq_522 | 0-1 | 721-722 |
| PPFIBP1\|8496_C12orf70\|341346 | seq_810 | NA | 254-255 |
| FLJ22447\|400221_PRKCH\|5583 | seq_134 | 0-1 | 221-222 |
| FLJ22447\|400221_PRKCH\|5583 | seq_802 | NA | 221-222 |
| FLJ22447\|400221_PRKCH\|5583 | seq_133 | 0-1 | 221-222 |
| FLJ22447\|400221_PRKCH\|5583 | seq_803 | NA | 221-222 |
| KAT6B\|23522_ADK\|132 | seq_641 | 621-622 | 949-950 |
| KAT6B\|23522_ADK\|132 | seq_642 | 621-622 | 1114-1115 |
| USP22\|23326_MYH10\|4628 | seq_165 | 690-691 | 894-895 |
| USP22\|23326_MYH10\|4628 | seq_163 | 690-691 | 894-895 |
| USP22\|23326_MYH10\|4628 | seq_166 | 654-655 | 654-655 |
| USP22\|23326_MYH10\|4628 | seq_169 | 375-376 | 959-960 |
| USP22\|23326_MYH10\|4628 | seq_162 | 654-655 | 654-655 |
| USP22\|23326_MYH10\|4628 | seq_161 | 690-691 | 894-895 |
| USP22\|23326_MYH10\|4628 | seq_168 | 375-376 | 959-960 |
| USP22\|23326_MYH10\|4628 | seq_164 | 654-655 | 654-655 |
| USP22\|23326_MYH10\|4628 | seq_167 | 375-376 | 959-960 |
| TTYH3\|80727_MAD1L1\|8379 | seq_653 | 123-124 | 310-311 |
| TTYH3\|80727_MAD1L1\|8379 | seq_651 | 123-124 | 310-311 |
| TTYH3\|80727_MAD1L1\|8379 | seq_648 | 123-124 | 310-311 |
| TTYH3\|80727_MAD1L1\|8379 | seq_644 | 123-124 | 310-311 |
| TTYH3\|80727_MAD1L1\|8379 | seq_654 | 123-124 | 310-311 |
| TTYH3\|80727_MAD1L1\|8379 | seq_652 | 123-124 | 310-311 |
| TTYH3\|80727_MAD1L1\|8379 | seq_645 | 123-124 | 310-311 |
| TTYH3\|80727_MAD1L1\|8379 | seq_657 | 123-124 | 310-311 |
| TTYH3\|80727_MAD1L1\|8379 | seq_656 | 123-124 | 310-311 |
| TTYH3\|80727_MAD1L1\|8379 | seq_655 | 405-406 | 592-593 |
| TTYH3\|80727_MAD1L1\|8379 | seq_647 | 123-124 | 310-311 |
| TTYH3\|80727_MAD1L1\|8379 | seq_658 | 405-406 | 592-593 |
| TTYH3\|80727_MAD1L1\|8379 | seq_643 | 123-124 | 310-311 |
| TTYH3\|80727_MAD1L1\|8379 | seq_646 | 123-124 | 310-311 |
| TTYH3\|80727_MAD1L1\|8379 | seq_649 | 123-124 | 310-311 |
| TTYH3\|80727_MAD1L1\|8379 | seq_650 | 405-406 | 592-593 |
| NCOA3\|8202_EYA2\|2139 | seq_391 | 0-1 | 242-243 |
| NCOA3\|8202_EYA2\|2139 | seq_393 | 0-1 | 242-243 |
| NCOA3\|8202_EYA2\|2139 | seq_392 | 0-1 | 163-164 |
| EXOC4\|60412_CHCHD3\|54927 | seq_137 | 1514-1515 | 1549-1550 |
| EXOC4\|60412_CHCHD3\|54927 | seq_152 | 1182-1183 | 1217-1218 |
| EXOC4\|60412_CHCHD3\|54927 | seq_139 | 110-111 | 360-361 |
| EXOC4\|60412_CHCHD3\|54927 | seq_143 | 879-880 | 1225-1226 |
| EXOC4\|60412_CHCHD3\|54927 | seq_154 | 344-345 | 397-398 |
| EXOC4\|60412_CHCHD3\|54927 | seq_150 | 1182-1183 | 1217-1218 |
| EXOC4\|60412_CHCHD3\|54927 | seq_149 | 1182-1183 | 1217-1218 |
| EXOC4\|60412_CHCHD3\|54927 | seq_148 | 879-880 | 1225-1226 |
| EXOC4\|60412_CHCHD3\|54927 | seq_155 | 1182-1183 | 1217-1218 |
| EXOC4\|60412_CHCHD3\|54927 | seq_146 | 879-880 | 1225-1226 |
| EXOC4\|60412_CHCHD3\|54927 | seq_142 | 1211-1212 | 1557-1558 |
| EXOC4\|60412_CHCHD3\|54927 | seq_136 | 110-111 | 360-361 |
| EXOC4\|60412_CHCHD3\|54927 | seq_153 | 1182-1183 | 1217-1218 |
| EXOC4\|60412_CHCHD3\|54927 | seq_145 | 879-880 | 1225-1226 |
| EXOC4\|60412_CHCHD3\|54927 | seq_151 | 110-111 | 360-361 |
| EXOC4\|60412_CHCHD3\|54927 | seq_159 | 1211-1212 | 1557-1558 |
| EXOC4\|60412_CHCHD3\|54927 | seq_140 | 344-345 | 397-398 |
| EXOC4\|60412_CHCHD3\|54927 | seq_144 | 1514-1515 | 1549-1550 |
| EXOC4\|60412_CHCHD3\|54927 | seq_147 | 1211-1212 | 1557-1558 |
| EXOC4\|60412_CHCHD3\|54927 | seq_158 | 1514-1515 | 1549-1550 |
| EXOC4\|60412_CHCHD3\|54927 | seq_156 | 344-345 | 397-398 |
| WASF2\|10163_AHDC1\|27245 | seq_206 | 0-1 | 355-356 |
| WASF2\|10163_AHDC1\|27245 | seq_205 | 0-1 | 355-356 |
| MLL5\|55904_LHFPL3\|375612 | seq_637 | 411-412 | 411-412 |
| MLL5\|55904_LHFPL3\|375612 | seq_634 | 411-412 | 411-412 |
| MLL5\|55904_LHFPL3\|375612 | seq_635 | 1623-1624 | 2083-2084 |
| MLL5\|55904_LHFPL3\|375612 | seq_633 | 1185-1186 | 2246-2247 |
| MLL5\|55904_LHFPL3\|375612 | seq_636 | 1185-1186 | 2246-2247 |
| MLL5\|55904_LHFPL3\|375612 | seq_638 | 1623-1624 | 2083-2084 |
| PPP1CB\|5500_PLB1\|151056 | seq_194 | 100-101 | 205-206 |
| PPP1CB\|5500_PLB1\|151056 | seq_195 | 184-185 | 549-550 |
| PPP1CB\|5500_PLB1\|151056 | seq_202 | 52-53 | 417-418 |
| PPP1CB\|5500_PLB1\|151056 | seq_191 | 52-53 | 417-418 |
| PPP1CB\|5500_PLB1\|151056 | seq_196 | 52-53 | 417-418 |
| PPP1CB\|5500_PLB1\|151056 | seq_190 | 100-101 | 205-206 |
| PPP1CB\|5500_PLB1\|151056 | seq_192 | 52-53 | 417-418 |
| PPP1CB\|5500_PLB1\|151056 | seq_199 | 52-53 | 417-418 |
| PPP1CB\|5500_PLB1\|151056 | seq_200 | 100-101 | 205-206 |
| PPP1CB\|5500_PLB1\|151056 | seq_198 | 52-53 | 417-418 |
| PPP1CB\|5500_PLB1\|151056 | seq_197 | 52-53 | 417-418 |
| PPP1CB\|5500_PLB1\|151056 | seq_188 | 184-185 | 549-550 |
| PPP1CB\|5500_PLB1\|151056 | seq_201 | 184-185 | 549-550 |
| PPP1CB\|5500_PLB1\|151056 | seq_193 | 100-101 | 205-206 |
| PPP1CB\|5500_PLB1\|151056 | seq_189 | 184-185 | 549-550 |
| IFT43\|112752_TTLL5\|23093 | seq_292 | 147-148 | 181-182 |
| IFT43\|112752_TTLL5\|23093 | seq_293 | 147-148 | 181-182 |
| IFT43\|112752_TTLL5\|23093 | seq_291 | 215-216 | 249-250 |
| FAM190A\|401145_MMRN1\|22915 | seq_687 | 0-1 | 299-300 |
| QKI\|9444_PACRG\|135138 | seq_278 | 402-403 | 953-954 |
| QKI\|9444_PACRG\|135138 | seq_276 | 402-403 | 953-954 |
| QKI\|9444_PACRG\|135138 | seq_279 | 285-286 | 836-837 |
| QKI\|9444_PACRG\|135138 | seq_277 | 142-143 | 693-694 |
| FAM3B\|54097_BACE2\|25825 | seq_345 | 618-619 | 764-765 |
| FAM3B\|54097_BACE2\|25825 | seq_347 | 618-619 | 764-765 |
| FAM3B\|54097_BACE2\|25825 | seq_346 | 205-206 | 205-206 |
| FAM3B\|54097_BACE2\|25825 | seq_343 | 618-619 | 764-765 |
| FAM3B\|54097_BACE2\|25825 | seq_342 | 474-475 | 620-621 |
| FAM3B\|54097_BACE2\|25825 | seq_340 | 474-475 | 620-621 |
| FAM3B\|54097_BACE2\|25825 | seq_341 | 474-475 | 620-621 |
| FAM3B\|54097_BACE2\|25825 | seq_344 | 163-164 | 309-310 |
| THSD4\|79875_LRRC49\|54839 | seq_213 | 464-465 | 543-544 |
| THSD4\|79875_LRRC49\|54839 | seq_212 | 99-100 | 178-179 |
| THSD4\|79875_LRRC49\|54839 | seq_208 | 99-100 | 178-179 |
| THSD4\|79875_LRRC49\|54839 | seq_207 | 174-175 | 688-689 |
| THSD4\|79875_LRRC49\|54839 | seq_209 | 29-30 | 108-109 |
| THSD4\|79875_LRRC49\|54839 | seq_214 | 174-175 | 688-689 |
| THSD4\|79875_LRRC49\|54839 | seq_210 | 1152-1153 | 1231-1232 |
| THSD4\|79875_LRRC49\|54839 | seq_215 | 1152-1153 | 1231-1232 |
| THSD4\|79875_LRRC49\|54839 | seq_211 | 99-100 | 178-179 |
| EIF2C2\|27161_PTK2\|5747 | seq_506 | 22-23 | 63-64 |
| EIF2C2\|27161_PTK2\|5747 | seq_505 | 0-1 | 63-64 |
| EIF2C2\|27161_PTK2\|5747 | seq_507 | 22-23 | 63-64 |
| EIF2C2\|27161_PTK2\|5747 | seq_504 | 22-23 | 63-64 |
| EIF2C2\|27161_PTK2\|5747 | seq_503 | 22-23 | 63-64 |
| EIF2C2\|27161_PTK2\|5747 | seq_509 | 0-1 | 63-64 |
| EIF2C2\|27161_PTK2\|5747 | seq_502 | 22-23 | 63-64 |
| EIF2C2\|27161_PTK2\|5747 | seq_508 | 22-23 | 63-64 |
| SLPI\|6590_WFDC2\|10406 | seq_532 | 394-395 | 416-417 |
| SLPI\|6590_WFDC2\|10406 | seq_533 | 244-245 | 266-267 |
| BMPR1B\|658_PDLIM5\|10611 | seq_466 | 1076-1077 | 1350-1351 |
| BMPR1B\|658_PDLIM5\|10611 | seq_453 | 585-586 | 739-740 |
| BMPR1B\|658_PDLIM5\|10611 | seq_455 | 0-1 | 257-258 |
| BMPR1B\|658_PDLIM5\|10611 | seq_473 | 0-1 | 257-258 |
| BMPR1B\|658_PDLIM5\|10611 | seq_472 | 0-1 | 257-258 |
| BMPR1B\|658_PDLIM5\|10611 | seq_457 | 143-144 | 297-298 |
| BMPR1B\|658_PDLIM5\|10611 | seq_459 | 0-1 | 257-258 |
| BMPR1B\|658_PDLIM5\|10611 | seq_470 | 0-1 | 257-258 |
| BMPR1B\|658_PDLIM5\|10611 | seq_461 | 1076-1077 | 1350-1351 |
| BMPR1B\|658_PDLIM5\|10611 | seq_456 | 585-586 | 655-656 |
| BMPR1B\|658_PDLIM5\|10611 | seq_458 | 585-586 | 739-740 |
| BMPR1B\|658_PDLIM5\|10611 | seq_469 | 1076-1077 | 1230-1231 |
| BMPR1B\|658_PDLIM5\|10611 | seq_464 | 585-586 | 859-860 |
| BMPR1B\|658_PDLIM5\|10611 | seq_467 | 0-1 | 162-163 |
| BMPR1B\|658_PDLIM5\|10611 | seq_462 | 585-586 | 859-860 |
| BMPR1B\|658_PDLIM5\|10611 | seq_463 | 0-1 | 162-163 |
| BMPR1B\|658_PDLIM5\|10611 | seq_454 | 1076-1077 | 1146-1147 |
| BMPR1B\|658_PDLIM5\|10611 | seq_474 | 0-1 | 257-258 |
| BMPR1B\|658_PDLIM5\|10611 | seq_465 | 1076-1077 | 1146-1147 |
| BMPR1B\|658_PDLIM5\|10611 | seq_475 | 585-586 | 655-656 |
| BMPR1B\|658_PDLIM5\|10611 | seq_471 | 143-144 | 213-214 |
| NSD1\|64324_ZNF346\|23567 | seq_26 | 5509-5510 | 5647-5648 |
| NSD1\|64324_ZNF346\|23567 | seq_25 | 7-8 | 695-696 |
| NSD1\|64324_ZNF346\|23567 | seq_12 | 4765-4766 | 4903-4904 |
| NSD1\|64324_ZNF346\|23567 | seq_41 | 1063-1064 | 1156-1157 |
| NSD1\|64324_ZNF346\|23567 | seq_24 | 4453-4454 | 5141-5142 |
| NSD1\|64324_ZNF346\|23567 | seq_33 | 2740-2741 | 3428-3429 |
| NSD1\|64324_ZNF346\|23567 | seq_28 | 3958-3959 | 4118-4119 |
| NSD1\|64324_ZNF346\|23567 | seq_35 | 256-257 | 416-417 |
| NSD1\|64324_ZNF346\|23567 | seq_20 | 256-257 | 416-417 |
| NSD1\|64324_ZNF346\|23567 | seq_32 | 1063-1064 | 1201-1202 |
| NSD1\|64324_ZNF346\|23567 | seq_30 | 3487-3488 | 3504-3505 |
| NSD1\|64324_ZNF346\|23567 | seq_29 | 4702-4703 | 4862-4863 |
| NSD1\|64324_ZNF346\|23567 | seq_31 | 7-8 | 695-696 |
| NSD1\|64324_ZNF346\|23567 | seq_37 | 5200-5201 | 5217-5218 |
| NSD1\|64324_ZNF346\|23567 | seq_17 | 2989-2990 | 3149-3150 |
| NSD1\|64324_ZNF346\|23567 | seq_18 | 3709-3710 | 4397-4398 |
| NSD1\|64324_ZNF346\|23567 | seq_14 | 3487-3488 | 3504-3505 |
| NSD1\|64324_ZNF346\|23567 | seq_10 | 4456-4457 | 4473-4474 |
| NSD1\|64324_ZNF346\|23567 | seq_7 | 7-8 | 695-696 |
| NSD1\|64324_ZNF346\|23567 | seq_13 | 2740-2741 | 3428-3429 |
| NSD1\|64324_ZNF346\|23567 | seq_15 | 3796-3797 | 3934-3935 |
| NSD1\|64324_ZNF346\|23567 | seq_11 | 4456-4457 | 4473-4474 |
| NSD1\|64324_ZNF346\|23567 | seq_23 | 3796-3797 | 3934-3935 |
| NSD1\|64324_ZNF346\|23567 | seq_16 | 256-257 | 416-417 |
| NSD1\|64324_ZNF346\|23567 | seq_21 | 3709-3710 | 4397-4398 |
| NSD1\|64324_ZNF346\|23567 | seq_6 | 4702-4703 | 4862-4863 |
| NSD1\|64324_ZNF346\|23567 | seq_19 | 2989-2990 | 3149-3150 |
| NSD1\|64324_ZNF346\|23567 | seq_34 | 4453-4454 | 5141-5142 |
| NSD1\|64324_ZNF346\|23567 | seq_38 | 4765-4766 | 4903-4904 |
| NSD1\|64324_ZNF346\|23567 | seq_8 | 1063-1064 | 1201-1202 |
| NSD1\|64324_ZNF346\|23567 | seq_27 | 5509-5510 | 5647-5648 |
| NSD1\|64324_ZNF346\|23567 | seq_39 | 5200-5201 | 5217-5218 |
| NSD1\|64324_ZNF346\|23567 | seq_22 | 3958-3959 | 4118-4119 |
| LMO7\|4008_UCHL3\|7347 | seq_666 | 69-70 | 404-405 |
| LMO7\|4008_UCHL3\|7347 | seq_668 | 345-346 | 364-365 |
| LMO7\|4008_UCHL3\|7347 | seq_665 | 366-367 | 1626-1627 |
| LMO7\|4008_UCHL3\|7347 | seq_663 | 210-211 | 545-546 |
| LMO7\|4008_UCHL3\|7347 | seq_669 | 618-619 | 1878-1879 |
| LMO7\|4008_UCHL3\|7347 | seq_670 | 69-70 | 404-405 |
| LMO7\|4008_UCHL3\|7347 | seq_667 | 225-226 | 1485-1486 |
| LMO7\|4008_UCHL3\|7347 | seq_664 | 462-463 | 797-798 |
| TNRC18\|84629_RNF216\|54476 | seq_811 | NA | 106-107 |
| TNRC18\|84629_RNF216\|54476 | seq_575 | 4833-4834 | 5182-5183 |
| LRBA\|987_SH3D19\|152503 | seq_535 | 216-217 | 501-502 |
| LRBA\|987_SH3D19\|152503 | seq_536 | 216-217 | 460-461 |
| LRBA\|987_SH3D19\|152503 | seq_534 | 216-217 | 501-502 |
| LRBA\|987_SH3D19\|152503 | seq_537 | 216-217 | 501-502 |
| NCOR2\|9612_SCARB1\|949 | seq_228 | 1479-1480 | 1800-1801 |
| NCOR2\|9612_SCARB1\|949 | seq_216 | 1482-1483 | 1754-1755 |
| NCOR2\|9612_SCARB1\|949 | seq_218 | 815-816 | 1136-1137 |
| NCOR2\|9612_SCARB1\|949 | seq_231 | 705-706 | 1026-1027 |
| NCOR2\|9612_SCARB1\|949 | seq_229 | 815-816 | 1087-1088 |
| NCOR2\|9612_SCARB1\|949 | seq_232 | 1479-1480 | 1800-1801 |
| NCOR2\|9612_SCARB1\|949 | seq_217 | 762-763 | 1034-1035 |
| NCOR2\|9612_SCARB1\|949 | seq_225 | 1479-1480 | 1800-1801 |
| NCOR2\|9612_SCARB1\|949 | seq_230 | 1479-1480 | 1800-1801 |
| NCOR2\|9612_SCARB1\|949 | seq_223 | 762-763 | 1083-1084 |
| NCOR2\|9612_SCARB1\|949 | seq_242 | 705-706 | 1026-1027 |
| NCOR2\|9612_SCARB1\|949 | seq_219 | 705-706 | 977-978 |
| NCOR2\|9612_SCARB1\|949 | seq_222 | 762-763 | 1083-1084 |
| NCOR2\|9612_SCARB1\|949 | seq_236 | 1482-1483 | 1599-1600 |
| NCOR2\|9612_SCARB1\|949 | seq_233 | 762-763 | 1083-1084 |
| NCOR2\|9612_SCARB1\|949 | seq_227 | 705-706 | 1026-1027 |
| NCOR2\|9612_SCARB1\|949 | seq_234 | 1876-1877 | 1993-1994 |
| NCOR2\|9612_SCARB1\|949 | seq_238 | 1873-1874 | 2194-2195 |
| NCOR2\|9612_SCARB1\|949 | seq_226 | 705-706 | 1026-1027 |
| NCOR2\|9612_SCARB1\|949 | seq_220 | 1479-1480 | 1800-1801 |
| NCOR2\|9612_SCARB1\|949 | seq_240 | 815-816 | 1136-1137 |
| NCOR2\|9612_SCARB1\|949 | seq_243 | 815-816 | 1136-1137 |
| NCOR2\|9612_SCARB1\|949 | seq_239 | 1482-1483 | 1599-1600 |
| NCOR2\|9612_SCARB1\|949 | seq_237 | 411-412 | 732-733 |
| NCOR2\|9612_SCARB1\|949 | seq_221 | 762-763 | 1083-1084 |
| NCOR2\|9612_SCARB1\|949 | seq_235 | 1482-1483 | 1803-1804 |
| NCOR2\|9612_SCARB1\|949 | seq_224 | 815-816 | 1136-1137 |
| EXT1\|2131_SAMD12\|401474 | seq_801 | NA | 1735-1736 |
| EXT1\|2131_SAMD12\|401474 | seq_800 | NA | 1735-1736 |
| MATR3\|9782_CTNNA1\|1495 | seq_105 | 0-1 | 162-163 |
| MATR3\|9782_CTNNA1\|1495 | seq_106 | 0-1 | 279-280 |
| SORL1\|6653_TECTA\|7007 | seq_5 | 1211-1212 | 1340-1341 |
| SORL1\|6653_TECTA\|7007 | seq_4 | 528-529 | 657-658 |
| SORL1\|6653_TECTA\|7007 | seq_3 | 528-529 | 657-658 |
| SORL1\|6653_TECTA\|7007 | seq_2 | 1685-1686 | 1814-1815 |
| SORL1\|6653_TECTA\|7007 | seq_1 | 758-759 | 887-888 |
| EIF3B\|8662_MAD1L1\|8379 | seq_121 | 2154-2155 | 2237-2238 |
| EIF3B\|8662_MAD1L1\|8379 | seq_130 | 1338-1339 | 1655-1656 |
| EIF3B\|8662_MAD1L1\|8379 | seq_123 | 2154-2155 | 2237-2238 |
| EIF3B\|8662_MAD1L1\|8379 | seq_128 | 1338-1339 | 1655-1656 |
| EIF3B\|8662_MAD1L1\|8379 | seq_132 | 2154-2155 | 2237-2238 |
| EIF3B\|8662_MAD1L1\|8379 | seq_116 | 1338-1339 | 1655-1656 |
| EIF3B\|8662_MAD1L1\|8379 | seq_124 | 2154-2155 | 2237-2238 |
| EIF3B\|8662_MAD1L1\|8379 | seq_122 | 2154-2155 | 2237-2238 |
| EIF3B\|8662_MAD1L1\|8379 | seq_131 | 1338-1339 | 1655-1656 |
| EIF3B\|8662_MAD1L1\|8379 | seq_125 | 0-1 | 1101-1102 |
| EIF3B\|8662_MAD1L1\|8379 | seq_119 | 1338-1339 | 1655-1656 |
| EIF3B\|8662_MAD1L1\|8379 | seq_126 | 1338-1339 | 1655-1656 |
| EIF3B\|8662_MAD1L1\|8379 | seq_117 | 1338-1339 | 1655-1656 |
| EIF3B\|8662_MAD1L1\|8379 | seq_127 | 2154-2155 | 2237-2238 |
| EIF3B\|8662_MAD1L1\|8379 | seq_129 | 2154-2155 | 2237-2238 |
| CD44\|960_PDHX\|8050 | seq_701 | 233-234 | 667-668 |
| CD44\|960_PDHX\|8050 | seq_700 | 261-262 | 695-696 |
| CD44\|960_PDHX\|8050 | seq_697 | 436-437 | 870-871 |
| CD44\|960_PDHX\|8050 | seq_699 | 436-437 | 870-871 |
| CD44\|960_PDHX\|8050 | seq_702 | 667-668 | 1101-1102 |
| CD44\|960_PDHX\|8050 | seq_705 | 67-68 | 501-502 |
| CD44\|960_PDHX\|8050 | seq_703 | 667-668 | 1101-1102 |
| CD44\|960_PDHX\|8050 | seq_704 | 67-68 | 501-502 |
| CD44\|960_PDHX\|8050 | seq_698 | 67-68 | 501-502 |
| C7orf50\|84310_MAD1L1\|8379 | seq_354 | 129-130 | 199-200 |
| C7orf50\|84310_MAD1L1\|8379 | seq_352 | 129-130 | 170-171 |
| C7orf50\|84310_MAD1L1\|8379 | seq_355 | 129-130 | 199-200 |
| C7orf50\|84310_MAD1L1\|8379 | seq_353 | 129-130 | 189-190 |
| CAPZA2\|830_MET\|4233 | seq_672 | 39-40 | 142-143 |
| CAPZA2\|830_MET\|4233 | seq_678 | 39-40 | 142-143 |
| CAPZA2\|830_MET\|4233 | seq_673 | 103-104 | 206-207 |
| CAPZA2\|830_MET\|4233 | seq_681 | 0-1 | 142-143 |
| CAPZA2\|830_MET\|4233 | seq_674 | 39-40 | 142-143 |
| CAPZA2\|830_MET\|4233 | seq_675 | 39-40 | 142-143 |
| CAPZA2\|830_MET\|4233 | seq_684 | 39-40 | 142-143 |
| CAPZA2\|830_MET\|4233 | seq_676 | 39-40 | 142-143 |
| CAPZA2\|830_MET\|4233 | seq_683 | 39-40 | 142-143 |
| CAPZA2\|830_MET\|4233 | seq_680 | 39-40 | 142-143 |
| CAPZA2\|830_MET\|4233 | seq_682 | 39-40 | 142-143 |
| CAPZA2\|830_MET\|4233 | seq_677 | 39-40 | 142-143 |
| CAPZA2\|830_MET\|4233 | seq_671 | 39-40 | 142-143 |
| CAPZA2\|830_MET\|4233 | seq_679 | 585-586 | 688-689 |
| FRS2\|10818_LYZ\|4069 | seq_806 | NA | 182-183 |
| FRS2\|10818_LYZ\|4069 | seq_807 | NA | 278-279 |
| KIF26B\|55083_SMYD3\|64754 | seq_260 | 204-205 | 311-312 |
| KIF26B\|55083_SMYD3\|64754 | seq_249 | 1350-1351 | 1790-1791 |
| KIF26B\|55083_SMYD3\|64754 | seq_245 | 4677-4678 | 4677-4678 |
| KIF26B\|55083_SMYD3\|64754 | seq_252 | 399-400 | 773-774 |
| KIF26B\|55083_SMYD3\|64754 | seq_259 | 204-205 | 311-312 |
| KIF26B\|55083_SMYD3\|64754 | seq_255 | 1350-1351 | 1790-1791 |
| KIF26B\|55083_SMYD3\|64754 | seq_256 | 999-1000 | 1439-1440 |
| KIF26B\|55083_SMYD3\|64754 | seq_254 | 3549-3550 | 3549-3550 |
| KIF26B\|55083_SMYD3\|64754 | seq_248 | 465-466 | 905-906 |
| KIF26B\|55083_SMYD3\|64754 | seq_251 | 1166-1167 | 1606-1607 |
| KIF26B\|55083_SMYD3\|64754 | seq_253 | 1350-1351 | 1790-1791 |
| KIF26B\|55083_SMYD3\|64754 | seq_258 | 204-205 | 311-312 |
| KIF26B\|55083_SMYD3\|64754 | seq_247 | 465-466 | 905-906 |
| KIF26B\|55083_SMYD3\|64754 | seq_246 | 465-466 | 905-906 |
| KIF26B\|55083_SMYD3\|64754 | seq_250 | 465-466 | 905-906 |
| LYPD6\|130574_LYPD6B\|130576 | seq_61 | 0-1 | 506-507 |
| LYPD6\|130574_LYPD6B\|130576 | seq_62 | 0-1 | 610-611 |
| ZBTB20\|26137_LSAMP\|4045 | seq_812 | NA | 62-63 |
| SRPK2\|6733_PUS7\|54517 | seq_184 | 71-72 | 159-160 |
| SRPK2\|6733_PUS7\|54517 | seq_183 | 71-72 | 159-160 |
| ARL15\|54622_NDUFS4\|4724 | seq_798 | 193-194 | 287-288 |
| ARL15\|54622_NDUFS4\|4724 | seq_796 | 253-254 | 347-348 |
| ARL15\|54622_NDUFS4\|4724 | seq_797 | 48-49 | 142-143 |
| ARL15\|54622_NDUFS4\|4724 | seq_799 | 462-463 | 556-557 |
| LOC100499467\|100499467_SLC39A11\|201266 | seq_808 | NA | 602-603 |
| LOC100499467\|100499467_SLC39A11\|201266 | seq_809 | NA | 602-603 |
| FRMD6\|122786_LOC283553\|283553 | seq_805 | NA | 347-348 |
| FRMD6\|122786_LOC283553\|283553 | seq_804 | NA | 284-285 |
| SH3PXD2A\|9644_OBFC1\|79991 | seq_101 | 72-73 | 212-213 |
| SH3PXD2A\|9644_OBFC1\|79991 | seq_102 | 306-307 | 446-447 |
| SH3PXD2A\|9644_OBFC1\|79991 | seq_100 | 96-97 | 163-164 |
| COL14A1\|7373_DEPTOR\|64798 | seq_275 | 2349-2350 | 2614-2615 |
| COL14A1\|7373_DEPTOR\|64798 | seq_268 | 1737-1738 | 2002-2003 |
| COL14A1\|7373_DEPTOR\|64798 | seq_270 | 88-89 | 353-354 |
| COL14A1\|7373_DEPTOR\|64798 | seq_272 | 436-437 | 701-702 |
| COL14A1\|7373_DEPTOR\|64798 | seq_269 | 205-206 | 470-471 |
| COL14A1\|7373_DEPTOR\|64798 | seq_267 | 1513-1514 | 2043-2044 |
| COL14A1\|7373_DEPTOR\|64798 | seq_273 | 771-772 | 1016-1017 |
| COL14A1\|7373_DEPTOR\|64798 | seq_274 | 1383-1384 | 1913-1914 |
| COL14A1\|7373_DEPTOR\|64798 | seq_271 | 877-878 | 1142-1143 |
| COL14A1\|7373_DEPTOR\|64798 | seq_266 | 2479-2480 | 2744-2745 |
| ASH1L\|55870_GON4L\|54856 | seq_49 | 420-421 | 900-901 |
| ASH1L\|55870_GON4L\|54856 | seq_45 | 420-421 | 900-901 |
| ASH1L\|55870_GON4L\|54856 | seq_54 | 420-421 | 900-901 |
| ASH1L\|55870_GON4L\|54856 | seq_51 | 420-421 | 678-679 |
| ASH1L\|55870_GON4L\|54856 | seq_46 | 420-421 | 678-679 |
| ASH1L\|55870_GON4L\|54856 | seq_44 | 420-421 | 900-901 |
| ASH1L\|55870_GON4L\|54856 | seq_50 | 420-421 | 900-901 |
| ASH1L\|55870_GON4L\|54856 | seq_53 | 420-421 | 900-901 |
| ASH1L\|55870_GON4L\|54856 | seq_48 | 420-421 | 900-901 |
| ASH1L\|55870_GON4L\|54856 | seq_60 | 420-421 | 900-901 |
| ASH1L\|55870_GON4L\|54856 | seq_58 | 420-421 | 678-679 |
| ASH1L\|55870_GON4L\|54856 | seq_55 | 420-421 | 900-901 |
| ZC3H7A\|29066_BCAR4\|400500 | seq_319 | 0-1 | 135-136 |
| STX5\|6811_WDR74\|54663 | seq_525 | 423-424 | 580-581 |
| STX5\|6811_WDR74\|54663 | seq_529 | 0-1 | 138-139 |
| STX5\|6811_WDR74\|54663 | seq_527 | 135-136 | 336-337 |
| STX5\|6811_WDR74\|54663 | seq_526 | 0-1 | 592-593 |
| STX5\|6811_WDR74\|54663 | seq_531 | 0-1 | 1065-1066 |
| STX5\|6811_WDR74\|54663 | seq_530 | 423-424 | 580-581 |
| STX5\|6811_WDR74\|54663 | seq_528 | 135-136 | 336-337 |
| TANC1\|85461_PKP4\|8502 | seq_358 | 0-1 | 79-80 |
| TANC1\|85461_PKP4\|8502 | seq_356 | 0-1 | 79-80 |
| TANC1\|85461_PKP4\|8502 | seq_363 | 0-1 | 79-80 |
| TANC1\|85461_PKP4\|8502 | seq_359 | 0-1 | 79-80 |
| TANC1\|85461_PKP4\|8502 | seq_364 | 0-1 | 79-80 |
| TANC1\|85461_PKP4\|8502 | seq_366 | 0-1 | 79-80 |
| TANC1\|85461_PKP4\|8502 | seq_367 | 0-1 | 79-80 |
| PDE4D\|5144_DEPDC1B\|55789 | seq_296 | 78-79 | 489-490 |
| PDE4D\|5144_DEPDC1B\|55789 | seq_294 | 42-43 | 288-289 |
| PDE4D\|5144_DEPDC1B\|55789 | seq_295 | 42-43 | 288-289 |
| PDE4D\|5144_DEPDC1B\|55789 | seq_298 | 0-1 | 293-294 |
| PDE4D\|5144_DEPDC1B\|55789 | seq_297 | 78-79 | 489-490 |
| TFDP1\|7027_TMCO3\|55002 | seq_286 | 186-187 | 405-406 |
| TFDP1\|7027_TMCO3\|55002 | seq_289 | 23-24 | 293-294 |
| TFDP1\|7027_TMCO3\|55002 | seq_288 | 0-1 | 119-120 |
| TFDP1\|7027_TMCO3\|55002 | seq_282 | 0-1 | 119-120 |
| TFDP1\|7027_TMCO3\|55002 | seq_290 | 79-80 | 298-299 |
| TFDP1\|7027_TMCO3\|55002 | seq_284 | 186-187 | 405-406 |
| TFDP1\|7027_TMCO3\|55002 | seq_287 | 186-187 | 405-406 |
| TFDP1\|7027_TMCO3\|55002 | seq_285 | 79-80 | 298-299 |
| TFDP1\|7027_TMCO3\|55002 | seq_283 | 79-80 | 298-299 |
| TFDP1\|7027_TMCO3\|55002 | seq_280 | 186-187 | 405-406 |
| TFDP1\|7027_TMCO3\|55002 | seq_281 | 12-13 | 231-232 |
| SMARCC1\|6599_MAP4\|4134 | seq_73 | 1993-1994 | 2210-2211 |
| SMARCC1\|6599_MAP4\|4134 | seq_82 | 1993-1994 | 2210-2211 |
| SMARCC1\|6599_MAP4\|4134 | seq_76 | 315-316 | 433-434 |
| SMARCC1\|6599_MAP4\|4134 | seq_84 | 2320-2321 | 2438-2439 |
| SMARCC1\|6599_MAP4\|4134 | seq_74 | 1993-1994 | 2210-2211 |
| SMARCC1\|6599_MAP4\|4134 | seq_99 | 315-316 | 433-434 |
| SMARCC1\|6599_MAP4\|4134 | seq_65 | 1993-1994 | 2210-2211 |
| SMARCC1\|6599_MAP4\|4134 | seq_83 | 195-196 | 313-314 |
| SMARCC1\|6599_MAP4\|4134 | seq_88 | 1993-1994 | 2210-2211 |
| SMARCC1\|6599_MAP4\|4134 | seq_70 | 195-196 | 313-314 |
| SMARCC1\|6599_MAP4\|4134 | seq_81 | 1993-1994 | 2210-2211 |
| SMARCC1\|6599_MAP4\|4134 | seq_89 | 2320-2321 | 2438-2439 |
| SMARCC1\|6599_MAP4\|4134 | seq_67 | 1993-1994 | 2210-2211 |
| SMARCC1\|6599_MAP4\|4134 | seq_96 | 1993-1994 | 2210-2211 |
| SMARCC1\|6599_MAP4\|4134 | seq_90 | 1993-1994 | 2210-2211 |
| SMARCC1\|6599_MAP4\|4134 | seq_64 | 2320-2321 | 2438-2439 |
| SMARCC1\|6599_MAP4\|4134 | seq_87 | 1993-1994 | 2210-2211 |
| SMARCC1\|6599_MAP4\|4134 | seq_66 | 2320-2321 | 2438-2439 |
| SMARCC1\|6599_MAP4\|4134 | seq_97 | 2320-2321 | 2438-2439 |
| SMARCC1\|6599_MAP4\|4134 | seq_95 | 2320-2321 | 2438-2439 |
| SMARCC1\|6599_MAP4\|4134 | seq_71 | 1993-1994 | 2210-2211 |
| SMARCC1\|6599_MAP4\|4134 | seq_79 | 2320-2321 | 2438-2439 |
| SMARCC1\|6599_MAP4\|4134 | seq_85 | 2320-2321 | 2438-2439 |
| SMARCC1\|6599_MAP4\|4134 | seq_68 | 195-196 | 313-314 |
| SMARCC1\|6599_MAP4\|4134 | seq_69 | 1993-1994 | 2210-2211 |
| SMARCC1\|6599_MAP4\|4134 | seq_77 | 2320-2321 | 2438-2439 |
| SMARCC1\|6599_MAP4\|4134 | seq_98 | 315-316 | 433-434 |
| SMARCC1\|6599_MAP4\|4134 | seq_86 | 2320-2321 | 2438-2439 |
| SMARCC1\|6599_MAP4\|4134 | seq_75 | 2320-2321 | 2438-2439 |
| SMARCC1\|6599_MAP4\|4134 | seq_91 | 2320-2321 | 2438-2439 |
| SMARCC1\|6599_MAP4\|4134 | seq_78 | 2320-2321 | 2438-2439 |
| SMARCC1\|6599_MAP4\|4134 | seq_80 | 1993-1994 | 2210-2211 |
| SMARCC1\|6599_MAP4\|4134 | seq_72 | 2320-2321 | 2438-2439 |
| SMARCC1\|6599_MAP4\|4134 | seq_94 | 1993-1994 | 2210-2211 |
| SMARCC1\|6599_MAP4\|4134 | seq_93 | 1993-1994 | 2210-2211 |
| SMARCC1\|6599_MAP4\|4134 | seq_92 | 2320-2321 | 2438-2439 |
| HP1BP3\|50809_EIF4G3\|8672 | seq_715 | 0-1 | 212-213 |
| HP1BP3\|50809_EIF4G3\|8672 | seq_718 | 54-55 | 1504-1505 |
| HP1BP3\|50809_EIF4G3\|8672 | seq_719 | 0-1 | 732-733 |
| HP1BP3\|50809_EIF4G3\|8672 | seq_717 | 0-1 | 446-447 |
| HP1BP3\|50809_EIF4G3\|8672 | seq_716 | 0-1 | 112-113 |
| DNAJC24\|120526_IMMP1L\|196294 | seq_813 | 108-109 | 227-228 |
| GRB7\|2886_ERBB2\|2064 | seq_814 | 1452-1453 | 1727-1728 |
| GRB7\|2886_ERBB2\|2064 | seq_815 | 0-1 | 70-71 |
| GRB7\|2886_ERBB2\|2064 | seq_816 | 809-810 | 1727-1728 |
| GRB7\|2886_ERBB2\|2064 | seq_817 | 155-156 | 430-431 |
| GRB7\|2886_ERBB2\|2064 | seq_818 | 0-1 | 70-71 |
| GRB7\|2886_ERBB2\|2064 | seq_819 | 155-156 | 430-431 |
| GRB7\|2886_ERBB2\|2064 | seq_820 | 0-1 | 225-226 |
| GRB7\|2886_ERBB2\|2064 | seq_821 | 0-1 | 225-226 |
| GRB7\|2886_ERBB2\|2064 | seq_822 | 0-1 | 70-71 |
| GRB7\|2886_ERBB2\|2064 | seq_823 | 0-1 | 225-226 |
| GRB7\|2886_ERBB2\|2064 | seq_824 | 0-1 | 225-226 |
| LITAF\|9516_BCAR4\|400500 | seq_825 | 0-1 | 65-66 |
| LITAF\|9516_BCAR4\|400500 | seq_826 | 0-1 | 65-66 |
| LITAF\|9516_BCAR4\|400500 | seq_827 | 0-1 | 129-130 |
| LITAF\|9516_BCAR4\|400500 | seq_828 | 0-1 | 228-229 |
| LYPD6\|130574_LYPD6B\|130576 | seq_829 | 0-1 | 208-209 |
| LYPD6\|130574_LYPD6B\|130576 | seq_830 | 0-1 | 208-209 |
| LYPD6\|130574_LYPD6B\|130576 | seq_831 | 0-1 | 208-209 |
| LYPD6\|130574_LYPD6B\|130576 | seq_832 | 0-1 | 709-710 |
| LYPD6\|130574_LYPD6B\|130576 | seq_833 | 0-1 | 218-219 |
| LYPD6\|130574_LYPD6B\|130576 | seq_834 | 0-1 | 610-611 |
| LYPD6\|130574_LYPD6B\|130576 | seq_835 | 0-1 | 709-710 |
| REXO1\|57455_KLF16\|83855 | seq_836 | 157-158 | 252-253 |
| RGNEF\|64283_BTF3\|689 | seq_837 | 475-476 | 651-652 |
| RGNEF\|64283_BTF3\|689 | seq_838 | 33-34 | 209-210 |
| RGNEF\|64283_BTF3\|689 | seq_839 | 0-1 | 165-166 |
| RGNEF\|64283_BTF3\|689 | seq_840 | 33-34 | 209-210 |
| SLPI\|6590_WFDC2\|10406 | seq_841 | 244-245 | 266-267 |
| SLPI\|6590_WFDC2\|10406 | seq_842 | 394-395 | 416-417 |
| TYMS\|7298_SEPT9\|10801 | seq_843 | 454-455 | 593-594 |
| WASF2\|10163_IFI6\|2537 | seq_844 | 0-1 | 182-183 |

“0-1” or “NA” indicates no junction found in the indicated sequence
SEQ ID NO: X is the SEQ ID NO: of the sequence listing. For example, “seq_304” refers to SEQ ID NO: 304 of the sequence listing. SEQ ID NO: (X + 1000) is the SEQ ID NO: of the sequence listing with 1000 added to the X in the same row. For example, wherein SEQ ID NO: X is “seq_304” SEQ ID NO: (X + 1000) refers to SEQ ID NO: 1304 of the sequence listing.

[0200] All references, including publications, patent applications, and patents, cited herein are hereby incorporated by reference to the same extent as if each reference were individually and specifically indicated to be incorporated by reference and were set forth in its entirety herein.

[0201] The use of the terms “a” and “an” and “the” and similar referents in the context of describing the invention (especially in the context of the following claims) are to be construed to cover both the singular and the plural, unless otherwise indicated herein or clearly contradicted by context. The terms “comprising,” “having,” “including,” and “containing” are to be construed as open-ended terms (i.e., meaning “including, but not limited to,”) unless otherwise noted.

[0202] Recitation of ranges of values herein are merely intended to serve as a shorthand method of referring individually to each separate value falling within the range and each endpoint, unless otherwise indicated herein, and each separate value and endpoint is incorporated into the specification as if it were individually recited herein.

[0203] All methods described herein can be performed in any suitable order unless otherwise indicated herein or otherwise clearly contradicted by context. The use of any and all examples, or exemplary language (e.g., “such as”) provided herein, is intended merely to better illuminate the invention and does not pose a limitation on the scope of the invention unless otherwise claimed. No language in the specification should be construed as indicating any non-claimed element as essential to the practice of the invention.

[0204] Preferred embodiments of this invention are described herein, including the best mode known to the inventors for carrying out the invention. Variations of those preferred embodiments may become apparent to those of ordinary skill in the art upon reading the foregoing description. The inventors expect skilled artisans to employ such variations as appropriate, and the inventors intend for the invention to be practiced otherwise than as specifically described herein. Accordingly, this invention includes all modifications and equivalents of the subject matter recited in the claims appended hereto as permitted by applicable law. Moreover, any combination of the above-described elements in all possible variations thereof is encompassed by the invention unless otherwise indicated herein or otherwise clearly contradicted by context.

The application's sequence listing, which the Patent Office published only in electronic form, follows.

SEQUENCE LISTING (2844 sequences)

SEQ ID NO: 1 - DNA, 1227 bp, Homo sapiens
atggcgacacggagcagcaggagggagtcgcgactcccgttcctattcaccctggtcgcactgctgccgcccggagctctctgcgaagtctggacgcagaggctgcacggcggcagcgcgcccttgccccaggaccggggcttcctcgtggtgcagggcgacccgcgcgagctgcggctgtgggcgcgcggggatgccaggggggcgagccgcgcggacgagaagccgctccggaggaaacggagcgctgccctgcagcccgagcccatcaaggtgtacggacaggttagtctgaatgattcccacaatcagatggtggtgcactgggctggagagaaaagcaacgtgatcgtggccttggcccgagatagcctggcattggcgaggcccaagagcagtgatgtgtacgtgtcttacgactatggaaaatcattcaagaaaatttcagacaagttaaactttggcttgggaaataggagtgaagctgttatcgcccagttctaccacagccctgcggacaacaagcggtacatctttgcagacgcttatgcccagtacctctggatcacgtttgacttctgcaacactcttcaaggcttttccatcccatttcgggcagctgatctcctcctacacagtaaggcctccaaccttctcttgggctttgacaggtcccaccccaacaagcagctgtggaagtcagatgactttggccagacctggatcatgattcaggaacatgtcaagtccttttcttggtgtcagaacctcaaagataacaccattggcatcgaggagaatgcagtctccctgacctgtcgctttcacgtcaccgtctttaaattcataggggattacgacgaagttcaccttcactgtgcagtgtcactctgcgactcagaaaagtactcctgtaaaatcacttgcccacacaattccaggattgccacagattacacaaaagagcccaaagaacagatcatttcagtgggacctattaggagaaaaaggctggactggtgtgaggacaatggagggtgtgagcagatttgcacgagccgggtggatgggcctctctgcagctgtgtaacaggaaccctgcaggaggacggcaagagctgcagagcctctaattcttcaatggaacttcaagtctggacgcttcttctcatcatgatccagatttcattatggcattttgtctataaatcaggcacgacctcataa

SEQ ID NO: 2 - DNA, 2154 bp, Homo sapiens
atggcgacacggagcagcaggagggagtcgcgactcccgttcctattcaccctggtcgcactgctgccgcccggagctctctgcgaagtctggacgcagaggctgcacggcggcagcgcgcccttgccccaggaccggggcttcctcgtggtgcagggcgacccgcgcgagctgcggctgtgggcgcgcggggatgccaggggggcgagccgcgcggacgagaagccgctccggaggaaacggagcgctgccctgcagcccgagcccatcaaggtgtacggacaggttagtctgaatgattcccacaatcagatggtggtgcactgggctggagagaaaagcaacgtgatcgtggccttggcccgagatagcctggcattggcgaggcccaagagcagtgatgtgtacgtgtcttacgactatggaaaatcattcaagaaaatttcagacaagttaaactttggcttgggaaataggagtgaagctgttatcgcccagttctaccacagccctgcggacaacaagcggtacatctttgcagacgcttatgcccagtacctctggatcacgtttgacttctgcaacactcttcaaggcttttccatcccatttcgggcagctgatctcctcctacacagtaaggcctccaaccttctcttgggctttgacaggtcccaccccaacaagcagctgtggaagtcagatgactttggccagacctggatcatgattcaggaacatgtcaagtccttttcttggggaattgatccctatgacaaaccaaataccatctacattgaacgacatgaaccctctggctactccactgtcttccgaagtacagatttcttccagtcccgggaaaaccaggaagtgatccttgaggaagtgagagattttcagcttcgggacaagtacatgtttgctacaaaggtggtgcatctcttgggcagtgaacagcagtcttctgtccagctctgggtctcctttggccggaagcccatgagagcagcccagtttgtcacaagacatcctattaatgaatattacatcgcagatgcctccgaggaccaggtgtttgtgtgtgtcagccacagtaacaaccgcaccaatttatacatctcagaggcagaggggctgaagttctccctgtccttggagaacgtgctctattacagcccaggaggggccggcagtgacaccttggtgaggtattttgcaaatgaaccatttgctgacttccaccgagtggaaggattgcaaggagtctacattgctactctgattaatggttctatgaatgaggagaacatgagatcggtcatcacctttgacaaagggggaacctgggagtttcttcaggctccagccttcacgggatatggagagaaaatcaattgtgagctttcccagggctgttcccttcatctggctcagcgcctcagtcagctcctcaacctccagctccggagaatgcccatcctgtccaaggagtcggctccaggcctcatcatcgccactggctcagtgggaaagaacttggctagcaagacaaacgtgtacatctctagcagtgctggagccaggtggcgagaggcacttcctggacctcactactacacatggggagaccacggcggaatcatcacggctattgcccagggcatggaaaccaacgagctaaagtgtcagaacctcaaagataacaccattggcatcgaggagaatgcagtctccctgacctgtcgctttcacgtcaccgtctttaaattcataggggattacgacgaagttcaccttcactgtgcagtgtcactctgcgactcagaaaagtactcctgtaaaatcacttgcccacacaattccaggattgccacagattacacaaaagagcccaaagaacagatcatttcagtgggacctattaggagaaaaaggctggactggtgtgaggacaatggagggtgtgagcagatttgcacgagccgggtggatgggcctctctgcagctgtgtaacaggaaccctgcaggaggacggcaagagctgcagagcctctaattcttcaatggaacttcaagtctggacgcttcttctcatcatgatccagatttcattatggcattttgtctataaatcaggcacgacctcataa

SEQ ID NO: 3 - DNA, 6798 bp, Homo sapiens
atggcgacacggagcagcaggagggagtcgcgactcccgttcctattcaccctggtcgcactgctgccgcccggagctctctgcgaagtctggacgcagaggctgcacggcggcagcgcgcccttgccccaggaccggggcttcctcgtggtgcagggcgacccgcgcgagctgcggctgtgggcgcgcggggatgccaggggggcgagccgcgcggacgagaagccgctccggaggaaacggagcgctgccctgcagcccgagcccatcaaggtgtacggacaggttagtctgaatgattcccacaatcagatggtggtgcactgggctggagagaaaagcaacgtgatcgtggccttggcccgagatagcctggcattggcgaggcccaagagcagtgatgtgtacgtgtcttacgactatggaaaatcattcaagaaaatttcagacaagttaaactttggcttgggaaataggagtgaagctgttatcgcccagttctaccacagccctgcggacaacaagcgggtcaataacaacggagttgtttccttcaatgtgctagtgagccagttcacgccagaatcctttcccctgacagatgggagagccttcgtcgccccattttgggcagatgtgcacaatggaattcgaggcgagatctattacagagagaccatggagcctgccatcttgaaaagagccaccaaggacatcaggaagtacttcaaagacatggcaaccttctctgccacttgggttttcattgtgacatgggaggaagtcacgttttatggaggcagcagcaccacacctgtgaacaccttccaggccgtcctagtgtccgatggctcctatacattcaccctcttcaattattacgaaatcaactggaccacggggacggcgagtggcggcgaccccctgacaggtcttggtggagtgatggcacaggcaggatttaatggtggaaacctcaccaatttcttcagcctcccggggtcaagaacccccgagatcgtgaatatccaggagaccacaaacgtcaatgttccaggccgctgggcatttaaagttgatggaaaggaaattgacccagccaatggctgcacctcaaggggacaattccttcggcgaggggaggtgttttgggatgacttgaactgcaccgtcaagtgccgctgtctggatttcaacaatgagatctactgccaggaggcttcctgtagcccctacgaggtgtgcgaacccaaaggcaaattcttctactgcagcgctgtggagaccagcacatgcgtggtgtttggggagccacactaccacacttttgacggcttcctcttccacttccaaggctcctgtgcctacttgctggcccgacagtgtttgcagacttccagcctccctttcttcagtgtggaggccaagaatgaacaccgcagaggttcagccgtctcctgggtgaaggagctctcagtggaggtgaatggctacaagattctcatccccaaaggaagctatggaagagtcaaggttaatgacctagtgacttctttgcctgtcaccttagacttggggacagtgaaaatctaccagagtggcatatctactgccgtggaaacagattttgggctcttagtgacttttgatggccagcactacgcctccatttccgtcccaggctcctatataaactccacctgtggactctgtggaaactataataaaaacccactggatgacttcctccgcccggatggcaggccggccatgtctgtcctggatctgggagagagctggcgtgtgtaccacgcagactggaagtgcgactccggctgcgtcgacaactgcacccagtgcgacgctgccactgaagccctctactttggctctgactactgcggcttcctcaacaagacagacggccctctgtgggagtgtggcactgtcgtggaccccactgcttttgtgcacagctgcgtgtatgacctgtgcagtgtgagggacaatggcacgctcctctgccaagccatccaggcctatgctcttgtgtgccaagcccttggcattccaattggagactggcgaacccagactgggtgtgtgtccacagtgcagtgcccgagcttcagccactactccgtgtgcacaagcagctgccccgacacatgctccgacctgacggcctcgcggaactgcgccacgccgtgcacagagggctgcgagtgcaaccagggcttcgtcctcagcaccagccagtgcgtccctctgcacaagtgcggctgcgacttcgacggccactactacaccatgggggagttcttctgggccacggccaactgcactgtgcaatgcctgtgcgaggagggcggggacgtctactgcttcaacaagacctgcggcagcggggaggtgtgcgccgtggaggacggctaccagggctgcttccccaagcgggagaccgtgtgcctgctcagccagaaccaggtgctgcacacctttgacggcgcctcctacgccttcccctccgagttctcctacaccctcctgaagacctgccctgagcgcccagagtacttggaaatcgacatcaacaagaagaagcccgatgcaggacctgcttggctgcggggacttcggatcctggtggccgaccaggaggtcaagataggaggcatcggggcttcggaagtcaagttgaatggtcaggaagtggaattgccttttttccatccttcggggaagctggaaatttatcgaaacaaaaacagtacgacagtggagtccaagggcgtggtgactgtccagtactcagacataggtctattgtacatccggctgtccaccacatacttcaattgcacagggggcttgtgcggcttctacaatgccaacgccagtgacgagttctgtctccccaacggcaagtgcacggacaacctggcagtgttcctggaaagctggacaactttcgaggagatctgcaatggagagtgtggggacctgctgaaggcctgcaacaatgactcggagctgctcaagttttatcgaagccgctccaggtgcggcatcatcaacgacccctccaacagctccttcctggagtgccatggggtggtgaacgtcactgcctattaccgcacctgccttttccgcctgtgccagagtgggggcaatgagtcagagctctgtgactctgtggcccggtatgcaagcgcctgcaagaatgcggacgtggaggtggggccctggcggacctatgacttctgcccactggagtgcccagagaacagccactttgaggagtgcatcacatgtacagagacctgtgagacccttaccctgggccccatctgcgtggatagctgctctgagggatgtcagtgtgatgagggctatgctctactgggcagccagtgtgtcacgcggagtgagtgtggctgcaactttgaggggcaccaacttgccaccaatgagaccttctgggtggacctggactgccagatcttctgctattgcagtggcacagacaacagggtccactgcgagaccattccctgcaaggatgatgagtactgcatggaggaaggtggcctgtactactgccaagcccgcaccgacgcctcctgcatcgtctcaggctacggccactacctcacctttgatggcttcccctttgacttccagaccagctgcccactcatcctgtgcaccacaggaagcaggccaagctcagactctttccccaagtttgttgtcacagccaagaatgaggaccgggacccgtcactggccttgtgggttaagcaggtggacgtgaccgtgtttggctacagcatcgtgatccaccgagcttacaagcacactgtgctggtcaacagtgaacggctctatctgcccctgaagctggggcaagggaagataaatatcttttcctttggcttccacgtggtggtggaaactgattttggcctgaaggttgtatatgactggaagaccttcctgtccatcacagtccctcggagcatgcagaacagcacctatggtctgtgtggccgctacaacggcaaccctgatgatgacctggagatgcccatgggtctgcttgcatcgagtgtcaatgagtttgggcagagctgggtgaagagggacaccttctgccaggtgggctgtggggaccgctgtccgtcctgtgccaaggtggaaggtttctccaaagtgcagcagctgtgcagcctgatccccaaccagaacgctgccttctccaagtgtcacagcaaagttaaccccaccttcttctataagaactgcctgtttgactcttgcatcgatgggggcgcggtgcagaccgcctgcagctggctgcagaactacgccagcacctgccagactcaggggattacggtgactggctggaggaattacacgtcctgcactgtcacctgccctccaaacagccattacgagagctgcgtgagtgtctgccagccccgctgcgccgccatccgcctgaagagtgactgcagccactactgcgtggagggctgtcactgcgacgctggctacgtcctcaacggcaagagctgcatcctgccccacagctgcggctgctactccgatggcaaatattacgagcccaagcagctattttggaacagcgactgcacgcggcgctgccgctgtttccgtcgcaacgtgattcagtgcgacccgcgccaatgcaagtcagacgaggagtgtgcgctgcgcaacggggtgcgcggctgcttcagcaccaagacctcctactgcctggcggccggcggcggcgtcttccgcaccttcgacggcgccttcctgcgcttcccagccaactgcgccttcgtgctgtccaccatctgccagaaactgcccgacatctccttccagcttatcatcaacttcgacaagtggtcggcccccaacctcaccatcatttcgcccgtctacttctacattaacgaagagcagattctcatcaacgaccggaacacggtcaaggtgaatggcacacaagtgaatgttccatttataactggtttggcaaccaaaatctacagcagtgaggggtttctggtgattgacaccagcccagacatccagatatactacaatggtttcaacgtcattaaaatcagcatcagcgagaggctgcagaacaaagtgtgcggtctctgtggcaacttcaacggggacctaacagatgattatgtgaccttgcgagggaagccggtggtaagcagcgtggtgctggcccagagctggaaaaccaatggcatgcagaagagacctcttgcccccagctgcaacgagctgcagttctcacagtatgcagccatgtgtgacaatgtgcacatccagaagatgcagggtgatggctactgcctgaagctcaccgacatgaagggcttcttccagccctgctatgggcttctcgatcccctcccattctacgagtcctgctacctggacggctgctacagccacaagaagttccagctgtgcggctccctggccgcctacggggaggcctgccgctccttcgggatccttagcaccgagtggattgagaaggagaattgctcaggagtggttgaagatccctgtgtgggggcggactgtcccaaccgaacttgcgagctgggcaatggcagggagctgtgtggctgcatcgagccacccccctatggaaataactcacatgacattatcgatgcagaggtgacctgcaaagcagcccaaatggaagtgtccatatctaagtgcaagctcttccagctcggttttgagagggagggcgtgaggatcaatgacagacagtgcaccggcatcgagggggaagattttatctcctttcagatcaacaacaccaaagggaattgtggaaacattgtgcagtccaatggcacgcatatcatgtataaaaacacactctggatcgaaagcgccaacaacactggcaacatcatcaccagggaccgcacgatcaatgtggaattttcatgtgcttatgagctggatatcaagatctccttggattctgttgtgaagcctatgctaagtgtaattaacctgacagttccaacccaagaaggcagcttcatcaccaagatggctctctacaaaaacgcctcctacaaacatccttaccgccagggtgaagtagtgttgacgactcgagatgtgctgtatgtaggggtttttgtggttggagctgacgccacacatttaatcctaacactcaacaaatgctatgccacacccacccgagatagcaatgataagctccgatatttcatcattgaaggagggtgtcagaacctcaaagataacaccattggcatcgaggagaatgcagtctccctgacctgtcgctttcacgtcaccgtctttaaattcataggggattacgacgaagttcaccttcactgtgcagtgtcactctgcgactcagaaaagtactcctgtaaaatcacttgcccacacaattccaggattgccacagattacacaaaagagcccaaagaacagatcatttcagtgggacctattaggagaaaaaggctggactggtgtgaggacaatggagggtgtgagcagatttgcacgagccgggtggatgggcctctctgcagctgtgtaacaggaaccctgcaggaggacggcaagagctgcagagcctctaattcttcaatggaacttcaagtctggacgcttcttctcatcatgatccagatttcattatggcattttgtctataaatcaggcacgacctcataa

SEQ ID NO: 4 - DNA, 6510 bp, Homo sapiens
atggcgacacggagcagcaggagggagtcgcgactcccgttcctattcaccctggtcgcactgctgccgcccggagctctctgcgaagtctggacgcagaggctgcacggcggcagcgcgcccttgccccaggaccggggcttcctcgtggtgcagggcgacccgcgcgagctgcggctgtgggcgcgcggggatgccaggggggcgagccgcgcggacgagaagccgctccggaggaaacggagcgctgccctgcagcccgagcccatcaaggtgtacggacaggttagtctgaatgattcccacaatcagatggtggtgcactgggctggagagaaaagcaacgtgatcgtggccttggcccgagatagcctggcattggcgaggcccaagagcagtgatgtgtacgtgtcttacgactatggaaaatcattcaagaaaatttcagacaagttaaactttggcttgggaaataggagtgaagctgttatcgcccagttctaccacagccctgcggacaacaagcgggtgaacaccttccaggccgtcctagtgtccgatggctcctatacattcaccctcttcaattattacgaaatcaactggaccacggggacggcgagtggcggcgaccccctgacaggtcttggtggagtgatggcacaggcaggatttaatggtggaaacctcaccaatttcttcagcctcccggggtcaagaacccccgagatcgtgaatatccaggagaccacaaacgtcaatgttccaggccgctgggcatttaaagttgatggaaaggaaattgacccagccaatggctgcacctcaaggggacaattccttcggcgaggggaggtgttttgggatgacttgaactgcaccgtcaagtgccgctgtctggatttcaacaatgagatctactgccaggaggcttcctgtagcccctacgaggtgtgcgaacccaaaggcaaattcttctactgcagcgctgtggagaccagcacatgcgtggtgtttggggagccacactaccacacttttgacggcttcctcttccacttccaaggctcctgtgcctacttgctggcccgacagtgtttgcagacttccagcctccctttcttcagtgtggaggccaagaatgaacaccgcagaggttcagccgtctcctgggtgaaggagctctcagtggaggtgaatggctacaagattctcatccccaaaggaagctatggaagagtcaaggttaatgacctagtgacttctttgcctgtcaccttagacttggggacagtgaaaatctaccagagtggcatatctactgccgtggaaacagattttgggctcttagtgacttttgatggccagcactacgcctccatttccgtcccaggctcctatataaactccacctgtggactctgtggaaactataataaaaacccactggatgacttcctccgcccggatggcaggccggccatgtctgtcctggatctgggagagagctggcgtgtgtaccacgcagactggaagtgcgactccggctgcgtcgacaactgcacccagtgcgacgctgccactgaagccctctactttggctctgactactgcggcttcctcaacaagacagacggccctctgtgggagtgtggcactgtcgtggaccccactgcttttgtgcacagctgcgtgtatgacctgtgcagtgtgagggacaatggcacgctcctctgccaagccatccaggcctatgctcttgtgtgccaagcccttggcattccaattggagactggcgaacccagactgggtgtgtgtccacagtgcagtgcccgagcttcagccactactccgtgtgcacaagcagctgccccgacacatgctccgacctgacggcctcgcggaactgcgccacgccgtgcacagagggctgcgagtgcaaccagggcttcgtcctcagcaccagccagtgcgtccctctgcacaagtgcggctgcgacttcgacggccactactacaccatgggggagttcttctgggccacggccaactgcactgtgcaatgcctgtgcgaggagggcggggacgtctactgcttcaacaagacctgcggcagcggggaggtgtgcgccgtggaggacggctaccagggctgcttccccaagcgggagaccgtgtgcctgctcagccagaaccaggtgctgcacacctttgacggcgcctcctacgccttcccctccgagttctcctacaccctcctgaagacctgccctgagcgcccagagtacttggaaatcgacatcaacaagaagaagcccgatgcaggacctgcttggctgcggggacttcggatcctggtggccgaccaggaggtcaagataggaggcatcggggcttcggaagtcaagttgaatggtcaggaagtggaattgccttttttccatccttcggggaagctggaaatttatcgaaacaaaaacagtacgacagtggagtccaagggcgtggtgactgtccagtactcagacataggtctattgtacatccggctgtccaccacatacttcaattgcacagggggcttgtgcggcttctacaatgccaacgccagtgacgagttctgtctccccaacggcaagtgcacggacaacctggcagtgttcctggaaagctggacaactttcgaggagatctgcaatggagagtgtggggacctgctgaaggcctgcaacaatgactcggagctgctcaagttttatcgaagccgctccaggtgcggcatcatcaacgacccctccaacagctccttcctggagtgccatggggtggtgaacgtcactgcctattaccgcacctgccttttccgcctgtgccagagtgggggcaatgagtcagagctctgtgactctgtggcccggtatgcaagcgcctgcaagaatgcggacgtggaggtggggccctggcggacctatgacttctgcccactggagtgcccagagaacagccactttgaggagtgcatcacatgtacagagacctgtgagacccttaccctgggccccatctgcgtggatagctgctctgagggatgtcagtgtgatgagggctatgctctactgggcagccagtgtgtcacgcggagtgagtgtggctgcaactttgaggggcaccaacttgccaccaatgagaccttctgggtggacctggactgccagatcttctgctattgcagtggcacagacaacagggtccactgcgagaccattccctgcaaggatgatgagtactgcatggaggaaggtggcctgtactactgccaagcccgcaccgacgcctcctgcatcgtctcaggctacggccactacctcacctttgatggcttcccctttgacttccagaccagctgcccactcatcctgtgcaccacaggaagcaggccaagctcagactctttccccaagtttgttgtcacagccaagaatgaggaccgggacccgtcactggccttgtgggttaagcaggtggacgtgaccgtgtttggctacagcatcgtgatccaccgagcttacaagcacactgtgctggtcaacagtgaacggctctatctgcccctgaagctggggcaagggaagataaatatcttttcctttggcttccacgtggtggtggaaactgattttggcctgaaggttgtatatgactggaagaccttcctgtccatcacagtccctcggagcatgcagaacagcacctatggtctgtgtggccgctacaacggcaaccctgatgatgacctggagatgcccatgggtctgcttgcatcgagtgtcaatgagtttgggcagagctgggtgaagagggacaccttctgccaggtgggctgtggggaccgctgtccgtcctgtgccaaggtggaaggtttctccaaagtgcagcagctgtgcagcctgatccccaaccagaacgctgccttctccaagtgtcacagcaaagttaaccccaccttcttctataagaactgcctgtttgactcttgcatcgatgggggcgcggtgcagaccgcctgcagctggctgcagaactacgccagcacctgccagactcaggggattacggtgactggctggaggaattacacgtcctgcactgtcacctgccctccaaacagccattacgagagctgcgtgagtgtctgccagccccgctgcgccgccatccgcctgaagagtgactgcagccactactgcgtggagggctgtcactgcgacgctggctacgtcctcaacggcaagagctgcatcctgccccacagctgcggctgctactccgatggcaaatattacgagcccaagcagctattttggaacagcgactgcacgcggcgctgccgctgtttccgtcgcaacgtgattcagtgcgacccgcgccaatgcaagtcagacgaggagtgtgcgctgcgcaacggggtgcgcggctgcttcagcaccaagacctcctactgcctggcggccggcggcggcgtcttccgcaccttcgacggcgccttcctgcgcttcccagccaactgcgccttcgtgctgtccaccatctgccagaaactgcccgacatctccttccagcttatcatcaacttcgacaagtggtcggcccccaacctcaccatcatttcgcccgtctacttctacattaacgaagagcagattctcatcaacgaccggaacacggtcaaggtgaatggcacacaagtgaatgttccatttataactggtttggcaaccaaaatctacagcagtgaggggtttctggtgattgacaccagcccagacatccagatatactacaatggtttcaacgtcattaaaatcagcatcagcgagaggctgcagaacaaagtgtgcggtctctgtggcaacttcaacggggacctaacagatgattatgtgaccttgcgagggaagccggtggtaagcagcgtggtgctggcccagagctggaaaaccaatggcatgcagaagagacctcttgcccccagctgcaacgagctgcagttctcacagtatgcagccatgtgtgacaatgtgcacatccagaagatgcagggtgatggctactgcctgaagctcaccgacatgaagggcttcttccagccctgctatgggcttctcgatcccctcccattctacgagtcctgctacctggacggctgctacagccacaagaagttccagctgtgcggctccctggccgcctacggggaggcctgccgctccttcgggatccttagcaccgagtggattgagaaggagaattgctcaggagtggttgaagatccctgtgtgggggcggactgtcccaaccgaacttgcgagctgggcaatggcagggagctgtgtggctgcatcgagccacccccctatggaaataactcacatgacattatcgatgcagaggtgacctgcaaagcagcccaaatggaagtgtccatatctaagtgcaagctcttccagctcggttttgagagggagggcgtgaggatcaatgacagacagtgcaccggcatcgagggggaagattttatctcctttcagatcaacaacaccaaagggaattgtggaaacattgtgcagtccaatggcacgcatatcatgtataaaaacacactctggatcgaaagcgccaacaacactggcaacatcatcaccagggaccgcacgatcaatgtggaattttcatgtgcttatgagctggatatcaagatctccttggattctgttgtgaagcctatgctaagtgtaattaacctgacagttccaacccaagaaggcagcttcatcaccaagatggctctctacaaaaacgcctcctacaaacatccttaccgccagggtgaagtagtgttgacgactcgagatgtgctgtatgtaggggtttttgtggttggagctgacgccacacatttaatcctaacactcaacaaatgctatgccacacccacccgagatagcaatgataagctccgatatttcatcattgaaggagggtgtcagaacctcaaagataacaccattggcatcgaggagaatgcagtctccctgacctgtcgctttcacgtcaccgtctttaaattcataggggattacgacgaagttcaccttcactgtgcagtgtcactctgcgactcagaaaagtactcctgtaaaatcacttgcccacacaattccaggattgccacagattacacaaaagagcccaaagaacagatcatttcagtgggacctattaggagaaaaaggctggactggtgtgaggacaatggagggtgtgagcagatttgcacgagccgggtggatgggcctctctgcagctgtgtaacaggaaccctgcaggaggacggcaagagctgcagagcctctaattcttcaatggaacttcaagtctggacgcttcttctcatcatgatccagatttcattatggcattttgtctataaatcaggcacgacctcataa

SEQ ID NO: 5 - DNA, 1680 bp, Homo sapiens
atggcgacacggagcagcaggagggagtcgcgactcccgttcctattcaccctggtcgcactgctgccgcccggagctctctgcgaagtctggacgcagaggctgcacggcggcagcgcgcccttgccccaggaccggggcttcctcgtggtgcagggcgacccgcgcgagctgcggctgtgggcgcgcggggatgccaggggggcgagccgcgcggacgagaagccgctccggaggaaacggagcgctgccctgcagcccgagcccatcaaggtgtacggacaggttagtctgaatgattcccacaatcagatggtggtgcactgggctggagagaaaagcaacgtgatcgtggccttggcccgagatagcctggcattggcgaggcccaagagcagtgatgtgtacgtgtcttacgactatggaaaatcattcaagaaaatttcagacaagttaaactttggcttgggaaataggagtgaagctgttatcgcccagttctaccacagccctgcggacaacaagcggtacatctttgcagacgcttatgcccagtacctctggatcacgtttgacttctgcaacactcttcaaggcttttccatcccatttcgggcagctgatctcctcctacacagtaaggcctccaaccttctcttgggctttgacaggtcccaccccaacaagcagctgtggaagtcagatgactttggccagacctggatcatgattcaggaacatgtcaagtccttttcttggggaattgatccctatgacaaaccaaataccatctacattgaacgacatgaaccctctggctactccactgtcttccgaagtacagatttcttccagtcccgggaaaaccaggaagtgatccttgaggaagtgagagattttcagcttcgggacaagtacatgtttgctacaaaggtggtgcatctcttgggcagtgaacagcagtcttctgtccagctctgggtctcctttggccggaagcccatgagagcagcccagtttgtcacaagacatcctattaatgaatattacatcgcagatgcctccgaggaccaggtgtttgtgtgtgtcagccacagtaacaaccgcaccaatttatacatctcagaggcagaggggctgaagttctccctgtccttggagaacgtgctctattacagcccaggaggggccggcagtgacaccttggtgaggtgtcagaacctcaaagataacaccattggcatcgaggagaatgcagtctccctgacctgtcgctttcacgtcaccgtctttaaattcataggggattacgacgaagttcaccttcactgtgcagtgtcactctgcgactcagaaaagtactcctgtaaaatcacttgcccacacaattccaggattgccacagattacacaaaagagcccaaagaacagatcatttcagtgggacctattaggagaaaaaggctggactggtgtgaggacaatggagggtgtgagcagatttgcacgagccgggtggatgggcctctctgcagctgtgtaacaggaaccctgcaggaggacggcaagagctgcagagcctctaattcttcaatggaacttcaagtctggacgcttcttctcatcatgatccagatttcattatggcattttgtctataaatcaggcacgacctcataa

SEQ ID NO: 6 - DNA, 5412 bp, Homo sapiens
atgcccctgaagacaaggacagccctttcggatgatccagattccagtaccagtacattaggaaacatgctagaattacctggaacttcatcatcatctacttcacaggaattgccattttgtcaacctaagaaaaagtctacgccactgaagtatgaagttggagatctcatctgggcaaaattcaagagacgcccatggtggccctgcaggatttgttctgatccgttgattaacacacattcaaaaatgaaagtttccaaccggaggccctatcggcagtactacgtggaggcttttggagatccttctgagagagcctgggtggctggaaaagcaatcgtcatgtttgaaggcagacatcaattcgaagagctacctgtccttaggagaagagggaaacagaaagaaaaaggatataggcataaggttcctcagaaaattttgagtaaatgggaagccagtgttggacttgcagaacagtatgatgttcccaaggggtcaaagaaccgaaaatgtattcctggttcaatcaagttggacagtgaagaagatatgccatttgaagactgcacaaatgatcctgagtcagaacatgacctgttgcttaatggctgtttgaaatcactggcttttgattctgaacattctgcagatgagaaggaaaagccttgcgctaaatctcgagccagaaagagctctgataatccaaaaaggactagtgtgaaaaagggccacatacaatttgaagcacataaagatgaacggaggggaaagattccagagaaccttggcctaaactttatctctggggatatatctgatacgcaggcctctaatgaactttccaggatagcaaatagcctcacagggtccaacactgccccaggaagttttctgttttcttcctgtggaaaaaacactgcaaagaaagaatttgagacttcaaatggtgactctttattgggcttgcctgagggtgctttgatctcaaagtgttctcgagagaagaataaaccccaacgaagcctggtgtgtggttcaaaagtgaagctctgctatattggagcaggtgatgaggaaaagcgaagtgattccattagtatctgtaccacttctgatgatggaagcagtgacctggatcccatagaacacagctcagagtctgataacagtgtccttgaaattccagatgctttcgatagaacagagaacatgttatctatgcagaaaaatgaaaagataaagtattctaggtttgctgccacaaacactagggtaaaagcaaaacagaagcctctcattagtaactcacatacagaccacttaatgggttgtactaagagtgcagagcctggaaccgagacgtctcaggttaatctctctgatctgaaggcatctactcttgttcacaaaccccagtcagattttacaaatgatgctctctctccaaaattcaacctgtcatcaagcatatccagtgagaactcgttaataaagggtggggcagcaaatcaagctctattacattcgaaaagcaaacagcccaagttccgaagtataaagtgcaaacacaaagaaaatccagttatggcagaacccccagttataaatgaggagtgcagtttgaaatgctgctcttctgataccaaaggctctcctttggccagcatttctaaaagtgggaaagtggatggtctaaaactactgaacaatatgcatgagaaaaccagggattcaagtgacatagaaacagcagtggtgaaacatgttttatccgagttgaaggaactctcttacagatccttaggtgaggatgtcagtgactctggaacatcaaagccatcaaaaccattacttttctcttctgcttctagtcagaatcacatacctattgaaccagactacaaattcagtacattgctaatgatgttgaaagatatgcatgatagtaagacgaaggagcagcggttgatgactgctcaaaacctggtctcttaccggagtcctggtcgtggggactgttctactaatagtcctgtaggagtctctaaggttttggtttcaggaggctccacacacaattcagagaaaaagggagatggcactcagaactccgccaatcctagccctagtgggggtgactctgcattatctggcgagttgtctgcttccctacctggcttactgtccgacaagagagacctccctgcttctggtaaaagtcgttcagactgtgttactaggcgcaactgtggacgatcaaagccttcatccaaattgcgagatgctttttcagcccaaatggtaaagaacacagtgaaccgtaaagccttaaagaccgagcgcaaaagaaaactgaatcagcttccaagtgtgactcttgatgctgtactgcagggagaccgagaacgtggaggttcattgagaggtggggcagaagatcctagtaaagaggatccccttcagataatgggccacttaacaagtgaagatggtgaccatttttctgatgtgcatttcgatagcaaggttaagcaatctgatcctggtaaaatttctgaaaaaggactctcttttgaaaacggaaaaggcccagagctggactctgtaatgaacagtgagaatgatgaactcaatggtgtaaatcaagtggtgcctaaaaagcggtggcagcgtttaaaccaaaggcgcactaaacctcgtaagcgcatgaacagatttaaagagaaagaaaactctgagtgtgcctttagggtcttacttcctagtgaccctgtgcaggaggggcgggatgagtttccagagcatagaactccttcagcaagcatacttgaggaaccactgacagagcaaaatcatgctgactgcttagattcagctgggccacggttaaatgtttgtgataaatccagtgccagcattggtgacatggaaaaggagccaggaattcccagtttgacaccacaggctgagctccctgaaccagctgtgcggtcagagaagaaacgccttaggaagccaagcaagtggcttttggaatatacagaagaatatgatcagatatttgctcctaagaaaaaacaaaagaaggtacaggagcaggtgcacaaggtaagttcccgctgtgaagaggaaagccttctagcccgaggtcgatctagtgctcagaacaagcaggtggacgagaattctttgatttcaaccaaagaagagcctccagttcttgaaagggaggctccgtttttggagggccccttggctcagtcagaacttggaggtggacatgctgagttgccgcagctgaccttgtctgtgcctgtggctccggaagtctctccacggcctgcccttgagtctgaggaattgctagttaaaacgccaggaaattatgaaagtaaacgtcaaagaaaaccaactaagaaacttcttgaatccaatgatttagaccctggatttatgcccaagaagggggaccttggcctttctaaaaagtgctatgaagctggtcacctggagaatggcataactgaatcttgtgccacatcttattcaaaagattttggtggaggcactaccaagatatttgacaagccaaggaagcgaaaacgacagaggcatgctgcagccaagatgcagtgtaaaaaagtgaaaaatgatgactcgtcaaaagagattccaggctcagagggagaactaatgcctcacaggacggccacaagccccaaggagactgttgaggaaggtgtagaacacgatcccgggatgcctgcctctaaaaaaatgcagggtgaacgcggtggaggagctgcactcaaggagaatgtctgtcagaattgtgaaaaattgggtgagctgctgttatgtgaggctcagtgctgtggggctttccacctggagtgccttggattgactgagatgccaagaggaaaatttatctgcaatgaatgtcgcacaggaatccatacctgttttgtatgtaagcagagtggggaagatgttaaaaggtgccttctacccttgtgtggaaagttttaccatgaagagtgtgtccagaagtacccacccactgttatgcagaacaagggcttccggtgctccctccacatctgtataacctgtcatgctgctaatccagccaatgtttctgcatctaaaggtcggttgatgcgctgtgtccgctgtcctgtggcataccacgccaatgacttttgcctggctgctgggtcaaagatccttgcatctaatagtatcatctgccctaatcactttacccctaggcggggctgccgaaatcatgagcatgttaatgttagctggtgctttgtgtgctcagaaggaggcagccttctgtgctgtgattcttgccctgctgcttttcatcgtgaatgcctgaacattgatatccctgaaggaaactggtattgcaatgactgtaaagcaggcaaaaagccacactacagggagattgtctgggtaaaagttggacgatacaggtggtggccagctgagatctgccatcctcgagctgttccttccaacattgataagatgagacatgatgtgggagagttcccagtcctcttttttggatctaatgactatttgtggactcaccaggcccgagtcttcccttacatggagggtgacgtgagcagcaaggataagatgggcaaaggagtggatgggacatataaaaaagtggagcacatgatccagaagaaccaatgtctcttcaccaacacccagtgtaaggtttgctgcgccttgcttatttctgagtcccagaagctggcacattaccagagcaaaaaacatgccaacaaagtgaagagatacctagcaatccatggaatggagacattaaagggggaaacgaagaagctagactcagatcagaagagcagcagaagcaaagacaagaaccagtgctgccccatctgtaacatgaccttttcctcccctgtcgtggcccagtcgcactacctggggaagacccacgcaaagaacttaaagctgaagcagcagtccactaaggtggaagccttgcaccagaatagagagatgatagacccagacaagttctgcagcctctgccatgcaactttcaacgaccctgtcatggctcaacaacattatgtgggcaagaaacacagaaaacaggagaccaagctcaaactaatggcacgctatgggcggctggcggaccctgctgtcactgactttccagctggaaagggctacccctgcaaaacatgtaagatagtgctgaactccatagaacagtaccaagctcatgtcagcggcttcaaacacaagaaccagtcaccaaaaacagtggcatcatccctgggccagattccaatgcaaaggcaacccattcagaaagactcaaccaccttggaagactag

SEQ ID NO: 7 - DNA, 621 bp, Homo sapiens
atgaaagtggagcacatgatccagaagaaccaatgtctcttcaccaacacccagtgtaaggtttgctgcgccttgcttatttctgagtcccagaagctggcacattaccagagcagcagaagcaaagacaagaaccagtgctgccccatctgtaacatgaccttttcctcccctgtcgtggcccagtcgcactacctggggaagacccacgcaaagaacttaaagctgaagcagcagtccactaaggtggaagccttgcaccagaatagagagatgatagacccagacaagttctgcagcctctgccatgcaactttcaacgaccctgtcatggctcaacaacattatgtgggcaagaaacacagaaaacaggagaccaagctcaaactaatggcacgctatgggcggctggcggaccctgctgtcactgactttccagctggaaagggctacccctgcaaaacatgtaagatagtgctgaactccatagaacagtaccaagctcatgtcagcggcttcaaacacaagaaccagtcaccaaaaacagtggcatcatccctgggccagattccaatgcaaaggcaacccattcagaaagactcaaccaccttggaagactag

SEQ ID NO: 8 - DNA, 1677 bp, Homo sapiens
atggatcagacctgtgaactacccagaagaaattgtctgctgcccttttccaatccagtgaatttagatgcccctgaagacaaggacagccctttcggtaatggtcaatccaatttttctgagccacttaatgggtgtactatgcagttatcgactgtcagtggaacatcccaaaatgcttatggacaagattctccatcttgttacattccactgcggagactacaggatttggcctccatgatcaatgtagagtatttaaatgggtctgctgatggatcagaatcctttcaagaccctgaaaaaagtgattcaagagctcagacgccaattgtttgcacttccttgagtcctggtggtcctacagcacttgctatgaaacaggaaccctcttgtaataactcccctgaactccaggtaaaagtaacaaagactatcaagaatggctttctgcactttgagaattttacttgtgtggacgatgcagatgtagattctgaaatggacccagaacagccagtcacagaggatgagagtatagaggagatctttgaggaaactcagaccaatgccacctgcaattatgagactaaatcagagaatggtgtaaaagtggccatgggaagtgaacaagacagcacaccagagagtagacacggtgcagtcaaatcgccattcttgccattagctcctcagactgaaacacagaaaaataagcaaagaaatgaagtggacggcagcaatgaaaaagcagcccttctcccagcccccttttcactaggagacacaaacattacaatagaagagcaattaaactcaataaatttatcttttcaggatgatccagattccagtaccagtacattaggaaacatgctagaattacctggaacttcatcatcatctacttcacaggaattgccattttgtcaacctaagaaaaagtctacgccactgaagtatgaagttggagatctcatctgggcaaaattcaagagacgcccatggtggccctgcaggatttgttctgatccgttgattaacacacattcaaaaatgaaagtggagcacatgatccagaagaaccaatgtctcttcaccaacacccagtgtaaggtttgctgcgccttgcttatttctgagtcccagaagctggcacattaccagagcagcagaagcaaagacaagaaccagtgctgccccatctgtaacatgaccttttcctcccctgtcgtggcccagtcgcactacctggggaagacccacgcaaagaacttaaagctgaagcagcagtccactaaggtggaagccttgcaccagaatagagagatgatagacccagacaagttctgcagcctctgccatgcaactttcaacgaccctgtcatggctcaacaacattatgtgggcaagaaacacagaaaacaggagaccaagctcaaactaatggcacgctatgggcggctggcggaccctgctgtcactgactttccagctggaaagggctacccctgcaaaacatgtaagatagtgctgaactccatagaacagtaccaagctcatgtcagcggcttcaaacacaagaaccagtcaccaaaaacagtggcatcatccctgggccagattccaatgcaaaggcaacccattcagaaagactcaaccaccttggaagactag

SEQ ID NO: 9 - DNA, 1850 bp, Homo sapiens
atggatcagacctgtgaactacccagaagaaattgtctgctgcccttttccaatccagtgaatttagatgcccctgaagacaaggacagccctttcggtaatggtcaatccaatttttctgagccacttaatgggtgtactatgcagttatcgactgtcagtggaacatcccaaaatgcttatggacaagattctccatcttgttacattccactgcggagactacaggatttggcctccatgatcaatgtagagtatttaaatgggtctgctgatggatcagaatcctttcaagaccctgaaaaaagtgattcaagagctcagacgccaattgtttgcacttccttgagtcctggtggtcctacagcacttgctatgaaacaggaaccctcttgtaataactcccctgaactccaggtaaaagtaacaaagactatcaagaatggctttctgcactttgagaattttacttgtgtggacgatgcagatgtagattctgaaatggacccagaacagccagtcacagaggatgagagtatagaggagatctttgaggaaactcagaccaatgccacctgcaattatgagactaaatcagagaatggtgtaaaagtggccatgggaagtgaacaagacagcacaccagagagtagacacggtgcagtcaaatcgccattcttgccattagctcctcagactgaaacacagaaaaataagcaaagaaatgaagtggacggcagcaatgaaaaagcagcccttctcccagcccccttttcactaggagacacaaacattacaatagaagagcaattaaactcaataaatttatcttttcaggatgatccagattccagtaccagtacattaggaaacatgctagaattacctggaacttcatcatcatctacttcacaggaattgccattttgtcaacctaagaaaaagtctacgccactgaagtatgaagttggagatctcatctgggcaaaattcaagagacgcccatggtggccctgcaggatttgttctgatccgttgattaacacacattcaaaaatgaaagtttccaaccggaggccctatcggcagtactacgtggaggcttttggagatccttctgagagagcctgggtggctggaaaagcaatcgtcatgtttgaaggcagacatcaattcgaagagctacctgtccttaggagaagagggaaacagaaagaaaaaggatataggcataagtggagcacatgatccagaagaaccaatgtctcttcaccaacacccagtgtaaggtttgctgcgccttgcttatttctgagtcccagaagctggcacattaccagagcagcagaagcaaagacaagaaccagtgctgccccatctgtaacatgaccttttcctcccctgtcgtggcccagtcgcactacctggggaagacccacgcaaagaacttaaagctgaagcagcagtccactaaggtggaagccttgcaccagaatagagagatgatagacccagacaagttctgcagcctctgccatgcaactttcaacgaccctgtcatggctcaacaacattatgtgggcaagaaacacagaaaacaggagaccaagctcaaactaatggcacgctatgggcggctggcggaccctgctgtcactgactttccagctggaaagggctacccctgcaaaacatgtaagatagtgctgaactccatagaacagtaccaagctcatgtcagcggcttcaaacacaagaaccagtcaccaaaaacagtggcatcatccctgggccagattccaatgcaaaggcaacccattcagaaagactcaaccaccttggaagactag

SEQ ID NO: 10 - DNA, 5070 bp, Homo sapiens
atggatcagacctgtgaactacccagaagaaattgtctgctgcccttttccaatccagtgaatttagatgcccctgaagacaaggacagccctttcggtaatggtcaatccaatttttctgagccacttaatgggtgtactatgcagttatcgactgtcagtggaacatcccaaaatgcttatggacaagattctccatcttgttacattccactgcggagactacaggatttggcctccatgatcaatgtagagtatttaaatgggtctgctgatggatcagaatcctttcaagaccctgaaaaaagtgattcaagagctcagacgccaattgtttgcacttccttgagtcctggtggtcctacagcacttgctatgaaacaggaaccctcttgtaataactcccctgaactccaggtaaaagtaacaaagactatcaagaatggctttctgcactttgagaattttacttgtgtggacgatgcagatgtagattctgaaatggacccagaacagccagtcacagaggatgagagtatagaggagatctttgaggaaactcagaccaatgccacctgcaattatgagactaaatcagagaatggtgtaaaagtggccatgggaagtgaacaagacagcacaccagagagtagacacggtgcagtcaaatcgccattcttgccattagctcctcagactgaaacacagaaaaataagcaaagaaatgaagtggacggcagcaatgaaaaagcagcccttctcccagcccccttttcactaggagacacaaacattacaatagaagagcaattaaactcaataaatttatcttttcaggatgatccagattccagtaccagtacattaggaaacatgctagaattacctggaacttcatcatcatctacttcacaggaattgccatttgttcctcagaaaattttgagtaaatgggaagccagtgttggacttgcagaacagtatgatgttcccaaggggtcaaagaaccgaaaatgtattcctggttcaatcaagttggacagtgaagaagatatgccatttgaagactgcacaaatgatcctgagtcagaacatgacctgttgcttaatggctgtttgaaatcactggcttttgattctgaacattctgcagatgagaaggaaaagccttgcgctaaatctcgagccagaaagagctctgataatccaaaaaggactagtgtgaaaaagggccacatacaatttgaagcacataaagatgaacggaggggaaagattccagagaaccttggcctaaactttatctctggggatatatctgatacgcaggcctctaatgaactttccaggatagcaaatagcctcacagggtccaacactgccccaggaagttttctgttttcttcctgtggaaaaaacactgcaaagaaagaatttgagacttcaaatggtgactctttattgggcttgcctgagggtgctttgatctcaaagtgttctcgagagaagaataaaccccaacgaagcctggtgtgtggttcaaaagtgaagctctgctatattggagcaggtgatgaggaaaagcgaagtgattccattagtatctgtaccacttctgatgatggaagcagtgacctggatcccatagaacacagctcagagtctgataacagtgtccttgaaattccagatgctttcgatagaacagagaacatgttatctatgcagaaaaatgaaaagataaagtattctaggtttgctgccacaaacactagggtaaaagcaaaacagaagcctctcattagtaactcacatacagaccacttaatgggttgtactaagagtgcagagcctggaaccgagacgtctcaggttaatctctctgatctgaaggcatctactcttgttcacaaaccccagtcagattttacaaatgatgctctctctccaaaattcaacctgtcatcaagcatatccagtgagaactcgttaataaagggtggggcagcaaatcaagctctattacattcgaaaagcaaacagcccaagttccgaagtataaagtgcaaacacaaagaaaatccagttatggcagaacccccagttataaatgaggagtgcagtttgaaatgctgctcttctgataccaaaggctctcctttggccagcatttctaaaagtgggaaagtggatggtctaaaactactgaacaatatgcatgagaaaaccagggattcaagtgacatagaaacagcagtggtgaaacatgttttatccgagttgaaggaactctcttacagatccttaggtgaggatgtcagtgactctggaacatcaaagccatcaaaaccattacttttctcttctgcttctagtcagaatcacatacctattgaaccagactacaaattcagtacattgctaatgatgttgaaagatatgcatgatagtaagacgaaggagcagcggttgatgactgctcaaaacctggtctcttaccggagtcctggtcgtggggactgttctactaatagtcctgtaggagtctctaaggttttggtttcaggaggctccacacacaattcagagaaaaagggagatggcactcagaactccgccaatcctagccctagtgggggtgactctgcattatctggcgagttgtctgcttccctacctggcttactgtccgacaagagagacctccctgcttctggtaaaagtcgttcagactgtgttactaggcgcaactgtggacgatcaaagccttcatccaaattgcgagatgctttttcagcccaaatggtaaagaacacagtgaaccgtaaagccttaaagaccgagcgcaaaagaaaactgaatcagcttccaagtgtgactcttgatgctgtactgcagggagaccgagaacgtggaggttcattgagaggtggggcagaagatcctagtaaagaggatccccttcagataatgggccacttaacaagtgaagatggtgaccatttttctgatgtgcatttcgatagcaaggttaagcaatctgatcctggtaaaatttctgaaaaaggactctcttttgaaaacggaaaaggcccagagctggactctgtaatgaacagtgagaatgatgaactcaatggtgtaaatcaagtggtgcctaaaaagcggtggcagcgtttaaaccaaaggcgcactaaacctcgtaagcgcatgaacagatttaaagagaaagaaaactctgagtgtgcctttagggtcttacttcctagtgaccctgtgcaggaggggcgggatgagtttccagagcatagaactccttcagcaagcatacttgaggaaccactgacagagcaaaatcatgctgactgcttagattcagctgggccacggttaaatgtttgtgataaatccagtgccagcattggtgacatggaaaaggagccaggaattcccagtttgacaccacaggctgagctccctgaaccagctgtgcggtcagagaagaaacgccttaggaagccaagcaagtggcttttggaatatacagaagaatatgatcagatatttgctcctaagaaaaaacaaaagaaggtacaggagcaggtgcacaaggtaagttcccgctgtgaagaggaaagccttctagcccgaggtcgatctagtgctcagaacaagcaggtggacgagaattctttgatttcaaccaaagaagagcctccagttcttgaaagggaggctccgtttttggagggccccttggctcagtcagaacttggaggtggacatgctgagttgccgcagctgaccttgtctgtgcctgtggctccggaagtctctccacggcctgcccttgagtctgaggaattgctagttaaaacgccaggaaattatgaaagtaaacgtcaaagaaaaccaactaagaaacttcttgaatccaatgatttagaccctggatttatgcccaagaagggggaccttggcctttctaaaaagtgctatgaagctggtcacctggagaatggcataactgaatcttgtgccacatcttattcaaaagattttggtggaggcactaccaagatatttgacaagccaaggaagcgaaaacgacagaggcatgctgcagccaagatgcagtgtaaaaaagtgaaaaatgatgactcgtcaaaagagattccaggctcagagggagaactaatgcctcacaggacggccacaagccccaaggagactgttgaggaaggtgtagaacacgatcccgggatgcctgcctctaaaaaaatgcagggtgaacgcggtggaggagctgcactcaaggagaatgtctgtcagaattgtgaaaaattgggtgagctgctgttatgtgaggctcagtgctgtggggctttccacctggagtgccttggattgactgagatgccaagaggaaaatttatctgcaatgaatgtcgcacagtggagcacatgatccagaagaaccaatgtctcttcaccaacacccagtgtaaggtttgctgcgccttgcttatttctgagtcccagaagctggcacattaccagagcagcagaagcaaagacaagaaccagtgctgccccatctgtaacatgaccttttcctcccctgtcgtggcccagtcgcactacctggggaagacccacgcaaagaacttaaagctgaagcagcagtccactaaggtggaagccttgcaccagaatagagagatgatagacccagacaagttctgcagcctctgccatgcaactttcaacgaccctgtcatggctcaacaacattatgtgggcaagaaacacagaaaacaggagaccaagctcaaactaatggcacgctatgggcggctggcggaccctgctgtcactgactttccagctggaaagggctacccctgcaaaacatgtaagatagtgctgaactccatagaacagtaccaagctcatgtcagcggcttcaaacacaagaaccagtcaccaaaaacagtggcatcatccctgggccagattccaatgcaaaggcaacccattcagaaagactcaaccaccttggaagactag

SEQ ID NO: 11 - DNA, 5166 bp, Homo sapiens
atggatcagacctgtgaactacccagaagaaattgtctgctgcccttttccaatccagtgaatttagatgcccctgaagacaaggacagccctttcggtaatggtcaatccaatttttctgagccacttaatgggtgtactatgcagttatcgactgtcagtggaacatcccaaaatgcttatggacaagattctccatcttgttacattccactgcggagactacaggatttggcctccatgatcaatgtagagtatttaaatgggtctgctgatggatcagaatcctttcaagaccctgaaaaaagtgattcaagagctcagacgccaattgtttgcacttccttgagtcctggtggtcctacagcacttgctatgaaacaggaaccctcttgtaataactcccctgaactccaggtaaaagtaacaaagactatcaagaatggctttctgcactttgagaattttacttgtgtggacgatgcagatgtagattctgaaatggacccagaacagccagtcacagaggatgagagtatagaggagatctttgaggaaactcagaccaatgccacctgcaattatgagactaaatcagagaatggtgtaaaagtggccatgggaagtgaacaagacagcacaccagagagtagacacggtgcagtcaaatcgccattcttgccattagctcctcagactgaaacacagaaaaataagcaaagaaatgaagtggacggcagcaatgaaaaagcagcccttctcccagcccccttttcactaggagacacaaacattacaatagaagagcaattaaactcaataaatttatcttttcaggatgatccagattccagtaccagtacattaggaaacatgctagaattacctggaacttcatcatcatctacttcacaggaattgccatttgttcctcagaaaattttgagtaaatgggaagccagtgttggacttgcagaacagtatgatgttcccaaggggtcaaagaaccgaaaatgtattcctggttcaatcaagttggacagtgaagaagatatgccatttgaagactgcacaaatgatcctgagtcagaacatgacctgttgcttaatggctgtttgaaatcactggcttttgattctgaacattctgcagatgagaaggaaaagccttgcgctaaatctcgagccagaaagagctctgataatccaaaaaggactagtgtgaaaaagggccacatacaatttgaagcacataaagatgaacggaggggaaagattccagagaaccttggcctaaactttatctctggggatatatctgatacgcaggcctctaatgaactttccaggatagcaaatagcctcacagggtccaacactgccccaggaagttttctgttttcttcctgtggaaaaaacactgcaaagaaagaatttgagacttcaaatggtgactctttattgggcttgcctgagggtgctttgatctcaaagtgttctcgagagaagaataaaccccaacgaagcctggtgtgtggttcaaaagtgaagctctgctatattggagcaggtgatgaggaaaagcgaagtgattccattagtatctgtaccacttctgatgatggaagcagtgacctggatcccatagaacacagctcagagtctgataacagtgtccttgaaattccagatgctttcgatagaacagagaacatgttatctatgcagaaaaatgaaaagataaagtattctaggtttgctgccacaaacactagggtaaaagcaaaacagaagcctctcattagtaactcacatacagaccacttaatgggttgtactaagagtgcagagcctggaaccgagacgtctcaggttaatctctctgatctgaaggcatctactcttgttcacaaaccccagtcagattttacaaatgatgctctctctccaaaattcaacctgtcatcaagcatatccagtgagaactcgttaataaagggtggggcagcaaatcaagctctattacattcgaaaagcaaacagcccaagttccgaagtataaagtgcaaacacaaagaaaatccagttatggcagaacccccagttataaatgaggagtgcagtttgaaatgctgctcttctgataccaaaggctctcctttggccagcatttctaaaagtgggaaagtggatggtctaaaactactgaacaatatgcatgagaaaaccagggattcaagtgacatagaaacagcagtggtgaaacatgttttatccgagttgaaggaactctcttacagatccttaggtgaggatgtcagtgactctggaacatcaaagccatcaaaaccattacttttctcttctgcttctagtcagaatcacatacctattgaaccagactacaaattcagtacattgctaatgatgttgaaagatatgcatgatagtaagacgaaggagcagcggttgatgactgctcaaaacctggtctcttaccggagtcctggtcgtggggactgttctactaatagtcctgtaggagtctctaaggttttggtttcaggaggctccacacacaattcagagaaaaagggagatggcactcagaactccgccaatcctagccctagtgggggtgactctgcattatctggcgagttgtctgcttccctacctggcttactgtccgacaagagagacctccctgcttctggtaaaagtcgttcagactgtgttactaggcgcaactgtggacgatcaaagccttcatccaaattgcgagatgctttttcagcccaaatggtaaagaacacagtgaaccgtaaagccttaaagaccgagcgcaaaagaaaactgaatcagcttccaagtgtgactcttgatgctgtactgcagggagaccgagaacgtggaggttcattgagaggtggggcagaagatcctagtaaagaggatccccttcagataatgggccacttaacaagtgaagatggtgaccatttttctgatgtgcatttcgatagcaaggttaagcaatctgatcctggtaaaatttctgaaaaaggactctcttttgaaaacggaaaaggcccagagctggactctgtaatgaacagtgagaatgatgaactcaatggtgtaaatcaagtggtgcctaaaaagcggtggcagcgtttaaaccaaaggcgcactaaacctcgtaagcgcatgaacagatttaaagagaaagaaaactctgagtgtgcctttagggtcttacttcctagtgaccctgtgcaggaggggcgggatgagtttccagagcatagaactccttcagcaagcatacttgaggaaccactgacagagcaaaatcatgctgactgcttagattcagctgggccacggttaaatgtttgtgataaatccagtgccagcattggtgacatggaaaaggagccaggaattcccagtttgacaccacaggctgagctccctgaaccagctgtgcggtcagagaagaaacgccttaggaagccaagcaagtggcttttggaatatacagaagaatatgatcagatatttgctcctaagaaaaaacaaaagaaggtacaggagcaggtgcacaaggtaagttcccgctgtgaagaggaaagccttctagcccgaggtcgatctagtgctcagaacaagcaggtggacgagaattctttgatttcaaccaaagaagagcctccagttcttgaaagggaggctccgtttttggagggccccttggctcagtcagaacttggaggtggacatgctgagttgccgcagctgaccttgtctgtgcctgtggctccggaagtctctccacggcctgcccttgagtctgaggaattgctagttaaaacgccaggaaattatgaaagtaaacgtcaaagaaaaccaactaagaaacttcttgaatccaatgatttagaccctggatttatgcccaagaagggggaccttggcctttctaaaaagtgctatgaagctggtcacctggagaatggcataactgaatcttgtgccacatcttattcaaaagattttggtggaggcactaccaagatatttgacaagccaaggaagcgaaaacgacagaggcatgctgcagccaagatgcagtgtaaaaaagtgaaaaatgatgactcgtcaaaagagattccaggctcagagggagaactaatgcctcacaggacggccacaagccccaaggagactgttgaggaaggtgtagaacacgatcccgggatgcctgcctctaaaaaaatgcagggtgaacgcggtggaggagctgcactcaaggagaatgtctgtcagaattgtgaaaaattgggtgagctgctgttatgtgaggctcagtgctgtggggctttccacctggagtgccttggattgactgagatgccaagaggaaaatttatctgcaatgaatgtcgcacagtggagcacatgatccagaagaaccaatgtctcttcaccaacacccagtgtaaggtttgctgcgccttgcttatttctgagtcccagaagctggcacattaccagagcaaaaaacatgccaacaaagtgaagagatacctagcaatccatggaatggagacattaaagggggaaacgaagaagctagactcagatcagaagagcagcagaagcaaagacaagaaccagtgctgccccatctgtaacatgaccttttcctcccctgtcgtggcccagtcgcactacctggggaagacccacgcaaagaacttaaagctgaagcagcagtccactaaggtggaagccttgcaccagaatagagagatgatagacccagacaagttctgcagcctctgccatgcaactttcaacgaccctgtcatggctcaacaacattatgtgggcaagaaacacagaaaacaggagaccaagctcaaactaatggcacgctatgggcggctggcggaccctgctgtcactgactttccagctggaaagggctacccctgcaaaacatgtaagatagtgctgaactccatagaacagtaccaagctcatgtcagcggcttcaaacacaagaaccagtcaccaaaaacagtggcatcatccctgggccagattccaatgcaaaggcaacccattcagaaagactcaaccaccttggaagactag

SEQ ID NO: 12 - DNA, 5379 bp, Homo sapiens
atggatcagacctgtgaactacccagaagaaattgtctgctgcccttttccaatccagtgaatttagatgcccctgaagacaaggacagccctttcggtaatggtcaatccaatttttctgagccacttaatgggtgtactatgcagttatcgactgtcagtggaacatcccaaaatgcttatggacaagattctccatcttgttacattccactgcggagactacaggatttggcctccatgatcaatgtagagtatttaaatgggtctgctgatggatcagaatcctttcaagaccctgaaaaaagtgattcaagagctcagacgccaattgtttgcacttccttgagtcctggtggtcctacagcacttgctatgaaacaggaaccctcttgtaataactcccctgaactccaggtaaaagtaacaaagactatcaagaatggctttctgcactttgagaattttacttgtgtggacgatgcagatgtagattctgaaatggacccagaacagccagtcacagaggatgagagtatagaggagatctttgaggaaactcagaccaatgccacctgcaattatgagactaaatcagagaatggtgtaaaagtggccatgggaagtgaacaagacagcacaccagagagtagacacggtgcagtcaaatcgccattcttgccattagctcctcagactgaaacacagaaaaataagcaaagaaatgaagtggacggcagcaatgaaaaagcagcccttctcccagcccccttttcactaggagacacaaacattacaatagaagagcaattaaactcaataaatttatcttttcaggatgatccagattccagtaccagtacattaggaaacatgctagaattacctggaacttcatcatcatctacttcacaggaattgccattttgtcaacctaagaaaaagtctacgccactgaagtatgaagttggagatctcatctgggcaaaattcaagagacgcccatggtggccctgcaggatttgttctgatccgttgattaacacacattcaaaaatgaaagtttccaaccggaggccctatcggcagtactacgtggaggcttttggagatccttctgagagagcctgggtggctggaaaagcaatcgtcatgtttgaaggcagacatcaattcgaagagctacctgtccttaggagaagagggaaacagaaagaaaaaggatataggcataaggttcctcagaaaattttgagtaaatgggaagccagtgttggacttgcagaacagtatgatgttcccaaggggtcaaagaaccgaaaatgtattcctggttcaatcaagttggacagtgaagaagatatgccatttgaagactgcacaaatgatcctgagtcagaacatgacctgttgcttaatggctgtttgaaatcactggcttttgattctgaacattctgcagatgagaaggaaaagccttgcgctaaatctcgagccagaaagagctctgataatccaaaaaggactagtgtgaaaaagggccacatacaatttgaagcacataaagatgaacggaggggaaagattccagagaaccttggcctaaactttatctctggggatatatctgatacgcaggcctctaatgaactttccaggatagcaaatagcctcacagggtccaacactgccccaggaagttttctgttttcttcctgtggaaaaaacactgcaaagaaagaatttgagacttcaaatggtgactctttattgggcttgcctgagggtgctttgatctcaaagtgttctcgagagaagaataaaccccaacgaagcctggtgtgtggttcaaaagtgaagctctgctatattggagcaggtgatgaggaaaagcgaagtgattccattagtatctgtaccacttctgatgatggaagcagtgacctggatcccatagaacacagctcagagtctgataacagtgtccttgaaattccagatgctttcgatagaacagagaacatgttatctatgcagaaaaatgaaaagataaagtattctaggtttgctgccacaaacactagggtaaaagcaaaacagaagcctctcattagtaactcacatacagaccacttaatgggttgtactaagagtgcagagcctggaaccgagacgtctcaggttaatctctctgatctgaaggcatctactcttgttcacaaaccccagtcagattttacaaatgatgctctctctccaaaattcaacctgtcatcaagcatatccagtgagaactcgttaataaagggtggggcagcaaatcaagctctattacattcgaaaagcaaacagcccaagttccgaagtataaagtgcaaacacaaagaaaatccagttatggcagaacccccagttataaatgaggagtgcagtttgaaatgctgctcttctgataccaaaggctctcctttggccagcatttctaaaagtgggaaagtggatggtctaaaactactgaacaatatgcatgagaaaaccagggattcaagtgacatagaaacagcagtggtgaaacatgttttatccgagttgaaggaactctcttacagatccttaggtgaggatgtcagtgactctggaacatcaaagccatcaaaaccattacttttctcttctgcttctagtcagaatcacatacctattgaaccagactacaaattcagtacattgctaatgatgttgaaagatatgcatgatagtaagacgaaggagcagcggttgatgactgctcaaaacctggtctcttaccggagtcctggtcgtggggactgttctactaatagtcctgtaggagtctctaaggttttggtttcaggaggctccacacacaattcagagaaaaagggagatggcactcagaactccgccaatcctagccctagtgggggtgactctgcattatctggcgagttgtctgcttccctacctggcttactgtccgacaagagagacctccctgcttctggtaaaagtcgttcagactgtgttactaggcgcaactgtggacgatcaaagccttcatccaaattgcgagatgctttttcagcccaaatggtaaagaacacagtgaaccgtaaagccttaaagaccgagcgcaaaagaaaactgaatcagcttccaagtgtgactcttgatgctgtactgcagggagaccgagaacgtggaggttcattgagaggtggggcagaagatcctagtaaagaggatccccttcagataatgggccacttaacaagtgaagatggtgaccatttttctgatgtgcatttcgatagcaaggttaagcaatctgatcctggtaaaatttctgaaaaaggactctcttttgaaaacggaaaaggcccagagctggactctgtaatgaacagtgagaatgatgaactcaatggtgtaaatcaagtggtgcctaaaaagcggtggcagcgtttaaaccaaaggcgcactaaacctcgtaagcgcatgaacagatttaaagagaaagaaaactctgagtgtgcctttagggtcttacttcctagtgaccctgtgcaggaggggcgggatgagtttccagagcatagaactccttcagcaagcatacttgaggaaccactgacagagcaaaatcatgctgactgcttagattcagctgggccacggttaaatgtttgtgataaatccagtgccagcattggtgacatggaaaaggagccaggaattcccagtttgacaccacaggctgagctccctgaaccagctgtgcggtcagagaagaaacgccttaggaagccaagcaagtggcttttggaatatacagaagaatatgatcagatatttgctcctaagaaaaaacaaaagaaggtacaggagcaggtgcacaaggtaagttcccgctgtgaagaggaaagccttctagcccgaggtcgatctagtgctcagaacaagcaggtggacgagaattctttgatttcaaccaaagaagagcctccagttcttgaaagggaggctccgtttttggagggccccttggctcagtcagaacttggaggtggacatgctgagttgccgcagctgaccttgtctgtgcctgtggctccggaagtctctccacggcctgcccttgagtctgaggaattgctagttaaaacgccaggaaattatgaaagtaaacgtcaaagaaaaccaactaagaaacttcttgaatccaatgatttagaccctggatttatgcccaagaagggggaccttggcctttctaaaaagtgctatgaagctggtcacctggagaatggcataactgaatcttgtgccacatcttattcaaaagattttggtggaggcactaccaagatatttgacaagccaaggaagcgaaaacgacagaggcatgctgcagccaagatgcagtgtaaaaaagtgaaaaatgatgactcgtcaaaagagattccaggctcagagggagaactaatgcctcacaggacggccacaagccccaaggagactgttgaggaaggtgtagaacacgatcccgggatgcctgcctctaaaaaaatgcagggtgaacgcggtggaggagctgcactcaaggagaatgtctgtcagaattgtgaaaaattgggtgagctgctgttatgtgaggctcagtgctgtggggctttccacctggagtgccttggattgactgagatgccaagaggaaaatttatctgcaatgaatgtcgcacagtggagcacatgatccagaagaaccaatgtctcttcaccaacacccagtgtaaggtttgctgcgccttgcttatttctgagtcccagaagctggcacattaccagagcagcagaagcaaagacaagaaccagtgctgccccatctgtaacatgaccttttcctcccctgtcgtggcccagtcgcactacctggggaagacccacgcaaagaacttaaagctgaagcagcagtccactaaggtggaagccttgcaccagaatagagagatgatagacccagacaagttctgcagcctctgccatgcaactttcaacgaccctgtcatggctcaacaacattatgtgggcaagaaacacagaaaacaggagaccaagctcaaactaatggcacgctatgggcggctggcggaccctgctgtcactgactttccagctggaaagggctacccctgcaaaacatgtaagatagtgctgaactccatagaacagtaccaagctcatgtcagcggcttcaaacacaagaaccagtcaccaaaaacagtggcatcatccctgggccagattccaatgcaaaggcaacccattcagaaagactcaaccaccttggaagactag

SEQ ID NO: 13 - DNA, 3450 bp, Homo sapiens
atgaaagtttccaaccggaggccctatcggcagtactacgtggaggcttttggagatccttctgagagagcctgggtggctggaaaagcaatcgtcatgtttgaaggcagacatcaattcgaagagctacctgtccttaggagaagagggaaacagaaagaaaaaggatataggcataaggttcctcagaaaattttgagtaaatgggaagccagtgttggacttgcagaacagtatgatgttcccaaggggtcaaagaaccgaaaatgtattcctggttcaatcaagttggacagtgaagaagatatgccatttgaagactgcacaaatgatcctgagtcagaacatgacctgttgcttaatggctgtttgaaatcactggcttttgattctgaacattctgcagatgagaaggaaaagccttgcgctaaatctcgagccagaaagagctctgataatccaaaaaggactagtgtgaaaaagggccacatacaatttgaagcacataaagatgaacggaggggaaagattccagagaaccttggcctaaactttatctctggggatatatctgatacgcaggcctctaatgaactttccaggatagcaaatagcctcacagggtccaacactgccccaggaagttttctgttttcttcctgtggaaaaaacactgcaaagaaagaatttgagacttcaaatggtgactctttattgggcttgcctgagggtgctttgatctcaaagtgttctcgagagaagaataaaccccaacgaagcctggtgtgtggttcaaaagtgaagctctgctatattggagcaggtgatgaggaaaagcgaagtgattccattagtatctgtaccacttctgatgatggaagcagtgacctggatcccatagaacacagctcagagtctgataacagtgtccttgaaattccagatgctttcgatagaacagagaacatgttatctatgcagaaaaatgaaaagataaagtattctaggtttgctgccacaaacactagggtaaaagcaaaacagaagcctctcattagtaactcacatacagaccacttaatgggttgtactaagagtgcagagcctggaaccgagacgtctcaggttaatctctctgatctgaaggcatctactcttgttcacaaaccccagtcagattttacaaatgatgctctctctccaaaattcaacctgtcatcaagcatatccagtgagaactcgttaataaagggtggggcagcaaatcaagctctattacattcgaaaagcaaacagcccaagttccgaagtataaagtgcaaacacaaagaaaatccagttatggcagaacccccagttataaatgaggagtgcagtttgaaatgctgctcttctgataccaaaggctctcctttggccagcatttctaaaagtgggaaagtggatggtctaaaactactgaacaatatgcatgagaaaaccagggattcaagtgacatagaaacagcagtggtgaaacatgttttatccgagttgaaggaactctcttacagatccttaggtgaggatgtcagtgactctggaacatcaaagccatcaaaaccattacttttctcttctgcttctagtcagaatcacatacctattgaaccagactacaaattcagtacattgctaatgatgttgaaagatatgcatgatagtaagacgaaggagcagcggttgatgactgctcaaaacctggtctcttaccggagtcctggtcgtggggactgttctactaatagtcctgtaggagtctctaaggttttggtttcaggaggctccacacacaattcagagaaaaagggagatggcactcagaactccgccaatcctagccctagtgggggtgactctgcattatctggcgagttgtctgcttccctacctggcttactgtccgacaagagagacctccctgcttctggtaaaagtcgttcagactgtgttactaggcgcaactgtggacgatcaaagccttcatccaaattgcgagatgctttttcagcccaaatggtaaagaacacagtgaaccgtaaagccttaaagaccgagcgcaaaagaaaactgaatcagcttccaagtgtgactcttgatgctgtactgcagggagaccgagaacgtggaggttcattgagaggtggggcagaagatcctagtaaagaggatccccttcagataatgggccacttaacaagtgaagatggtgaccatttttctgatgtgcatttcgatagcaaggttaagcaatctgatcctggtaaaatttctgaaaaaggactctcttttgaaaacggaaaaggcccagagctggactctgtaatgaacagtgagaatgatgaactcaatggtgtaaatcaagtggtgcctaaaaagcggtggcagcgtttaaaccaaaggcgcactaaacctcgtaagcgcatgaacagatttaaagagaaagaaaactctgagtgtgcctttagggtcttacttcctagtgaccctgtgcaggaggggcgggatgagtttccagagcatagaactccttcagcaagcatacttgaggaaccactgacagagcaaaatcatgctgactgcttagattcagctgggccacggttaaatgtttgtgataaatccagtgccagcattggtgacatggaaaaggagccaggaattcccagtttgacaccacaggctgagctccctgaaccagtggagcacatgatccagaagaaccaatgtctcttcaccaacacccagtgtaaggtttgctgcgccttgcttatttctgagtcccagaagctggcacattaccagagcaaaaaacatgccaacaaagtgaagagatacctagcaatccatggaatggagacattaaagggggaaacgaagaagctagactcagatcagaagagcagcagaagcaaagacaagaaccagtgctgccccatctgtaacatgaccttttcctcccctgtcgtggcccagtcgcactacctggggaagacccacgcaaagaacttaaagctgaagcagcagtccactaaggtggaagccttgcaccagaatagagagatgatagacccagacaagttctgcagcctctgccatgcaactttcaacgaccctgtcatggctcaacaacattatgtgggcaagaaacacagaaaacaggagaccaagctcaaactaatggcacgctatgggcggctggcggaccctgctgtcactgactttccagctggaaagggctacccctgcaaaacatgtaagatagtgctgaactccatagaacagtaccaagctcatgtcagcggcttcaaacacaagaaccagtcaccaaaaacagtggcatcatccctgggccagattccaatgcaaaggcaacccattcagaaagactcaaccaccttggaagactag

SEQ ID NO: 14 - DNA, 4101 bp, Homo sapiens
atggatcagacctgtgaactacccagaagaaattgtctgctgcccttttccaatccagtgaatttagatgcccctgaagacaaggacagccctttcggtaatggtcaatccaatttttctgagccacttaatgggtgtactatgcagttatcgactgtcagtggaacatcccaaaatgcttatggacaagattctccatcttgttacattccactgcggagactacaggatttggcctccatgatcaatgtagagtatttaaatgggtctgctgatggatcagaatcctttcaagaccctgaaaaaagtgattcaagagctcagacgccaattgtttgcacttccttgagtcctggtggtcctacagcacttgctatgaaacaggaaccctcttgtaataactcccctgaactccaggtaaaagtaacaaagactatcaagaatggctttctgcactttgagaattttacttgtgtggacgatgcagatgtagattctgaaatggacccagaacagccagtcacagaggatgagagtatagaggagatctttgaggaaactcagaccaatgccacctgcaattatgagactaaatcagagaatggtgtaaaagtggccatgggaagtgaacaagacagcacaccagagagtagacacggtgcagtcaaatcgccattcttgccattagctcctcagactgaaacacagaaaaataagcaaagaaatgaagtggacggcagcaatgaaaaagcagcccttctcccagcccccttttcactaggagacacaaacattacaatagaagagcaattaaactcaataaatttatcttttcaggatgatccagattccagtaccagtacattaggaaacatgctagaattacctggaacttcatcatcatctacttcacaggaattgccatttgttcctcagaaaattttgagtaaatgggaagccagtgttggacttgcagaacagtatgatgttcccaaggggtcaaagaaccgaaaatgtattcctggttcaatcaagttggacagtgaagaagatatgccatttgaagactgcacaaatgatcctgagtcagaacatgacctgttgcttaatggctgtttgaaatcactggcttttgattctgaacattctgcagatgagaaggaaaagccttgcgctaaatctcgagccagaaagagctctgataatccaaaaaggactagtgtgaaaaagggccacatacaatttgaagcacataaagatgaacggaggggaaagattccagagaaccttggcctaaactttatctctggggatatatctgatacgcaggcctctaatgaactttccaggatagcaaatagcctcacagggtccaacactgccccaggaagttttctgttttcttcctgtggaaaaaacactgcaaagaaagaatttgagacttcaaatggtgactctttattgggcttgcctgagggtgctttgatctcaaagtgttctcgagagaagaataaaccccaacgaagcctggtgtgtggttcaaaagtgaagctctgctatattggagcaggtgatgaggaaaagcgaagtgattccattagtatctgtaccacttctgatgatggaagcagtgacctggatcccatagaacacagctcagagtctgataacagtgtccttgaaattccagatgctttcgatagaacagagaacatgttatctatgcagaaaaatgaaaagataaagtattctaggtttgctgccacaaacactagggtaaaagcaaaacagaagcctctcattagtaactcacatacagaccacttaatgggttgtactaagagtgcagagcctggaaccgagacgtctcaggttaatctctctgatctgaaggcatctactcttgttcacaaaccccagtcagattttacaaatgatgctctctctccaaaattcaacctgtcatcaagcatatccagtgagaactcgttaataaagggtggggcagcaaatcaagctctattacattcgaaaagcaaacagcccaagttccgaagtataaagtgcaaacacaaagaaaatccagttatggcagaacccccagttataaatgaggagtgcagtttgaaatgctgctcttctgataccaaaggctctcctttggccagcatttctaaaagtgggaaagtggatggtctaaaactactgaacaatatgcatgagaaaaccagggattcaagtgacatagaaacagcagtggtgaaacatgttttatccgagttgaaggaactctcttacagatccttaggtgaggatgtcagtgactctggaacatcaaagccatcaaaaccattacttttctcttctgcttctagtcagaatcacatacctattgaaccagactacaaattcagtacattgctaatgatgttgaaagatatgcatgatagtaagacgaaggagcagcggttgatgactgctcaaaacctggtctcttaccggagtcctggtcgtggggactgttctactaatagtcctgtaggagtctctaaggttttggtttcaggaggctccacacacaattcagagaaaaagggagatggcactcagaactccgccaatcctagccctagtgggggtgactctgcattatctggcgagttgtctgcttccctacctggcttactgtccgacaagagagacctccctgcttctggtaaaagtcgttcagactgtgttactaggcgcaactgtggacgatcaaagccttcatccaaattgcgagatgctttttcagcccaaatggtaaagaacacagtgaaccgtaaagccttaaagaccgagcgcaaaagaaaactgaatcagcttccaagtgtgactcttgatgctgtactgcagggagaccgagaacgtggaggttcattgagaggtggggcagaagatcctagtaaagaggatccccttcagataatgggccacttaacaagtgaagatggtgaccatttttctgatgtgcatttcgatagcaaggttaagcaatctgatcctggtaaaatttctgaaaaaggactctcttttgaaaacggaaaaggcccagagctggactctgtaatgaacagtgagaatgatgaactcaatggtgtaaatcaagtggtgcctaaaaagcggtggcagcgtttaaaccaaaggcgcactaaacctcgtaagcgcatgaacagatttaaagagaaagaaaactctgagtgtgcctttagggtcttacttcctagtgaccctgtgcaggaggggcgggatgagtttccagagcatagaactccttcagcaagcatacttgaggaaccactgacagagcaaaatcatgctgactgcttagattcagctgggccacggttaaatgtttgtgataaatccagtgccagcattggtgacatggaaaaggagccaggaattcccagtttgacaccacaggctgagctccctgaaccagtggagcacatgatccagaagaaccaatgtctcttcaccaacacccagtgtaaggtttgctgcgccttgcttatttctgagtcccagaagctggcacattaccagagcagcagaagcaaagacaagaaccagtgctgccccatctgtaacatgaccttttcctcccctgtcgtggcccagtcgcactacctggggaagacccacgcaaagaacttaaagctgaagcagcagtccactaaggtggaagccttgcaccagaatagagagatgatagacccagacaagttctgcagcctctgccatgcaactttcaacgaccctgtcatggctcaacaacattatgtgggcaagaaacacagaaaacaggagaccaagctcaaactaatggcacgctatgggcggctggcggaccctgctgtcactgactttccagctggaaagggctacccctgcaaaacatgtaagatagtgctgaactccatagaacagtaccaagctcatgtcagcggcttcaaacacaagaaccagtcaccaaaaacagtggcatcatccctgggccagattccaatgcaaaggcaacccattcagaaagactcaaccaccttggaagactag

SEQ ID NO: 15 - DNA, 4506 bp, Homo sapiens
atggatcagacctgtgaactacccagaagaaattgtctgctgcccttttccaatccagtgaatttagatgcccctgaagacaaggacagccctttcggtaatggtcaatccaatttttctgagccacttaatgggtgtactatgcagttatcgactgtcagtggaacatcccaaaatgcttatggacaagattctccatcttgttacattccactgcggagactacaggatttggcctccatgatcaatgtagagtatttaaatgggtctgctgatggatcagaatcctttcaagaccctgaaaaaagtgattcaagagctcagacgccaattgtttgcacttccttgagtcctggtggtcctacagcacttgctatgaaacaggaaccctcttgtaataactcccctgaactccaggtaaaagtaacaaagactatcaagaatggctttctgcactttgagaattttacttgtgtggacgatgcagatgtagattctgaaatggacccagaacagccagtcacagaggatgagagtatagaggagatctttgaggaaactcagaccaatgccacctgcaattatgagactaaatcagagaatggtgtaaaagtggccatgggaagtgaacaagacagcacaccagagagtagacacggtgcagtcaaatcgccattcttgccattagctcctcagactgaaacacagaaaaataagcaaagaaatgaagtggacggcagcaatgaaaaagcagcccttctcccagcccccttttcactaggagacacaaacattacaatagaagagcaattaaactcaataaatttatcttttcaggatgatccagattccagtaccagtacattaggaaacatgctagaattacctggaacttcatcatcatctacttcacaggaattgccattttgtcaacctaagaaaaagtctacgccactgaagtatgaagttggagatctcatctgggcaaaattcaagagacgcccatggtggccctgcaggatttgttctgatccgttgattaacacacattcaaaaatgaaagtttccaaccggaggccctatcggcagtactacgtggaggcttttggagatccttctgagagagcctgggtggctggaaaagcaatcgtcatgtttgaaggcagacatcaattcgaagagctacctgtccttaggagaagagggaaacagaaagaaaaaggatataggcataaggttcctcagaaaattttgagtaaatgggaagccagtgttggacttgcagaacagtatgatgttcccaaggggtcaaagaaccgaaaatgtattcctggttcaatcaagttggacagtgaagaagatatgccatttgaagactgcacaaatgatcctgagtcagaacatgacctgttgcttaatggctgtttgaaatcactggcttttgattctgaacattctgcagatgagaaggaaaagccttgcgctaaatctcgagccagaaagagctctgataatccaaaaaggactagtgtgaaaaagggccacatacaatttgaagcacataaagatgaacggaggggaaagattccagagaaccttggcctaaactttatctctggggatatatctgatacgcaggcctctaatgaactttccaggatagcaaatagcctcacagggtccaacactgccccaggaagttttctgttttcttcctgtggaaaaaacactgcaaagaaagaatttgagacttcaaatggtgactctttattgggcttgcctgagggtgctttgatctcaaagtgttctcgagagaagaataaaccccaacgaagcctggtgtgtggttcaaaagtgaagctctgctatattggagcaggtgatgaggaaaagcgaagtgattccattagtatctgtaccacttctgatgatggaagcagtgacctggatcccatagaacacagctcagagtctgataacagtgtccttgaaattccagatgctttcgatagaacagagaacatgttatctatgcagaaaaatgaaaagataaagtattctaggtttgctgccacaaacactagggtaaaagcaaaacagaagcctctcattagtaactcacatacagaccacttaatgggttgtactaagagtgcagagcctggaaccgagacgtctcaggttaatctctctgatctgaaggcatctactcttgttcacaaaccccagtcagattttacaaatgatgctctctctccaaaattcaacctgtcatcaagcatatccagtgagaactcgttaataaagggtggggcagcaaatcaagctctattacattcgaaaagcaaacagcccaagttccgaagtataaagtgcaaacacaaagaaaatccagttatggcagaacccccagttataaatgaggagtgcagtttgaaatgctgctcttctgataccaaaggctctcctttggccagcatttctaaaagtgggaaagtggatggtctaaaactactgaacaatatgcatgagaaaaccagggattcaagtgacatagaaacagcagtggtgaaacatgttttatccgagttgaaggaactctcttacagatccttaggtgaggatgtcagtgactctggaacatcaaagccatcaaaaccattacttttctcttctgcttctagtcagaatcacatacctattgaaccagactacaaattcagtacattgctaatgatgttgaaagatatgcatgatagtaagacgaaggagcagcggttgatgactgctcaaaacctggtctcttaccggagtcctggtcgtggggactgttctactaatagtcctgtaggagtctctaaggttttggtttcaggaggctccacacacaattcagagaaaaagggagatggcactcagaactccgccaatcctagccctagtgggggtgactctgcattatctggcgagttgtctgcttccctacctggcttactgtccgacaagagagacctccctgcttctggtaaaagtcgttcagactgtgttactaggcgcaactgtggacgatcaaagccttcatccaaattgcgagatgctttttcagcccaaatggtaaagaacacagtgaaccgtaaagccttaaagaccgagcgcaaaagaaaactgaatcagcttccaagtgtgactcttgatgctgtactgcagggagaccgagaacgtggaggttcattgagaggtggggcagaagatcctagtaaagaggatccccttcagataatgggccacttaacaagtgaagatggtgaccatttttctgatgtgcatttcgatagcaaggttaagcaatctgatcctggtaaaatttctgaaaaaggactctcttttgaaaacggaaaaggcccagagctggactctgtaatgaacagtgagaatgatgaactcaatggtgtaaatcaagtggtgcctaaaaagcggtggcagcgtttaaaccaaaggcgcactaaacctcgtaagcgcatgaacagatttaaagagaaagaaaactctgagtgtgcctttagggtcttacttcctagtgaccctgtgcaggaggggcgggatgagtttccagagcatagaactccttcagcaagcatacttgaggaaccactgacagagcaaaatcatgctgactgcttagattcagctgggccacggttaaatgtttgtgataaatccagtgccagcattggtgacatggaaaaggagccaggaattcccagtttgacaccacaggctgagctccctgaaccagtggagcacatgatccagaagaaccaatgtctcttcaccaacacccagtgtaaggtttgctgcgccttgcttatttctgagtcccagaagctggcacattaccagagcaaaaaacatgccaacaaagtgaagagatacctagcaatccatggaatggagacattaaagggggaaacgaagaagctagactcagatcagaagagcagcagaagcaaagacaagaaccagtgctgccccatctgtaacatgaccttttcctcccctgtcgtggcccagtcgcactacctggggaagacccacgcaaagaacttaaagctgaagcagcagtccactaaggtggaagccttgcaccagaatagagagatgatagacccagacaagttctgcagcctctgccatgcaactttcaacgaccctgtcatggctcaacaacattatgtgggcaagaaacacagaaaacaggagaccaagctcaaactaatggcacgctatgggcggctggcggaccctgctgtcactgactttccagctggaaagggctacccctgcaaaacatgtaagatagtgctgaactccatagaacagtaccaagctcatgtcagcggcttcaaacacaagaaccagtcaccaaaaacagtggcatcatccctgggccagattccaatgcaaaggcaacccattcagaaagactcaaccaccttggaagactag

SEQ ID NO: 16 - DNA, 966 bp, Homo sapiens
atgcccctgaagacaaggacagccctttcggatgatccagattccagtaccagtacattaggaaacatgctagaattacctggaacttcatcatcatctacttcacaggaattgccattttgtcaacctaagaaaaagtctacgccactgaagtatgaagttggagatctcatctgggcaaaattcaagagacgcccatggtggccctgcaggatttgttctgatccgttgattaacacacattcaaaaatgaaagtggagcacatgatccagaagaaccaatgtctcttcaccaacacccagtgtaaggtttgctgcgccttgcttatttctgagtcccagaagctggcacattaccagagcaaaaaacatgccaacaaagtgaagagatacctagcaatccatggaatggagacattaaagggggaaacgaagaagctagactcagatcagaagagcagcagaagcaaagacaagaaccagtgctgccccatctgtaacatgaccttttcctcccctgtcgtggcccagtcgcactacctggggaagacccacgcaaagaacttaaagctgaagcagcagtccactaaggtggaagccttgcaccagaatagagagatgatagacccagacaagttctgcagcctctgccatgcaactttcaacgaccctgtcatggctcaacaacattatgtgggcaagaaacacagaaaacaggagaccaagctcaaactaatggcacgctatgggcggctggcggaccctgctgtcactgactttccagctggaaagggctacccctgcaaaacatgtaagatagtgctgaactccatagaacagtaccaagctcatgtcagcggcttcaaacacaagaaccagtcaccaaaaacagtggcatcatccctgggccagattccaatgcaaaggcaacccattcagaaagactcaaccaccttggaagactag

SEQ ID NO: 17 - DNA, 3603 bp, Homo sapiens
atgcccctgaagacaaggacagccctttcggatgatccagattccagtaccagtacattaggaaacatgctagaattacctggaacttcatcatcatctacttcacaggaattgccattttgtcaacctaagaaaaagtctacgccactgaagtatgaagttggagatctcatctgggcaaaattcaagagacgcccatggtggccctgcaggatttgttctgatccgttgattaacacacattcaaaaatgaaagtttccaaccggaggccctatcggcagtactacgtggaggcttttggagatccttctgagagagcctgggtggctggaaaagcaatcgtcatgtttgaaggcagacatcaattcgaagagctacctgtccttaggagaagagggaaacagaaagaaaaaggatataggcataaggttcctcagaaaattttgagtaaatgggaagccagtgttggacttgcagaacagtatgatgttcccaaggggtcaaagaaccgaaaatgtattcctggttcaatcaagttggacagtgaagaagatatgccatttgaagactgcacaaatgatcctgagtcagaacatgacctgttgcttaatggctgtttgaaatcactggcttttgattctgaacattctgcagatgagaaggaaaagccttgcgctaaatctcgagccagaaagagctctgataatccaaaaaggactagtgtgaaaaagggccacatacaatttgaagcacataaagatgaacggaggggaaagattccagagaaccttggcctaaactttatctctggggatatatctgatacgcaggcctctaatgaactttccaggatagcaaatagcctcacagggtccaacactgccccaggaagttttctgttttcttcctgtggaaaaaacactgcaaagaaagaatttgagacttcaaatggtgactctttattgggcttgcctgagggtgctttgatctcaaagtgttctcgagagaagaataaaccccaacgaagcctggtgtgtggttcaaaagtgaagctctgctatattggagcaggtgatgaggaaaagcgaagtgattccattagtatctgtaccacttctgatgatggaagcagtgacctggatcccatagaacacagctcagagtctgataacagtgtccttgaaattccagatgctttcgatagaacagagaacatgttatctatgcagaaaaatgaaaagataaagtattctaggtttgctgccacaaacactagggtaaaagcaaaacagaagcctctcattagtaactcacatacagaccacttaatgggttgtactaagagtgcagagcctggaaccgagacgtctcaggttaatctctctgatctgaaggcatctactcttgttcacaaaccccagtcagattttacaaatgatgctctctctccaaaattcaacctgtcatcaagcatatccagtgagaactcgttaataaagggtggggcagcaaatcaagctctattacattcgaaaagcaaacagcccaagttccgaagtataaagtgcaaacacaaagaaaatccagttatggcagaacccccagttataaatgaggagtgcagtttgaaatgctgctcttctgataccaaaggctctcctttggccagcatttctaaaagtgggaaagtggatggtctaaaactactgaacaatatgcatgagaaaaccagggattcaagtgacatagaaacagcagtggtgaaacatgttttatccgagttgaaggaactctcttacagatccttaggtgaggatgtcagtgactctggaacatcaaagccatcaaaaccattacttttctcttctgcttctagtcagaatcacatacctattgaaccagactacaaattcagtacattgctaatgatgttgaaagatatgcatgatagtaagacgaaggagcagcggttgatgactgctcaaaacctggtctcttaccggagtcctggtcgtggggactgttctactaatagtcctgtaggagtctctaaggttttggtttcaggaggctccacacacaattcagagaaaaagggagatggcactcagaactccgccaatcctagccctagtgggggtgactctgcattatctggcgagttgtctgcttccctacctggcttactgtccgacaagagagacctccctgcttctggtaaaagtcgttcagactgtgttactaggcgcaactgtggacgatcaaagccttcatccaaattgcgagatgctttttcagcccaaatggtaaagaacacagtgaaccgtaaagccttaaagaccgagcgcaaaagaaaactgaatcagcttccaagtgtgactcttgatgctgtactgcagggagaccgagaacgtggaggttcattgagaggtggggcagaagatcctagtaaagaggatccccttcagataatgggccacttaacaagtgaagatggtgaccatttttctgatgtgcatttcgatagcaaggttaagcaatctgatcctggtaaaatttctgaaaaaggactctcttttgaaaacggaaaaggcccagagctggactctgtaatgaacagtgagaatgatgaactcaatggtgtaaatcaagtggtgcctaaaaagcggtggcagcgtttaaaccaaaggcgcactaaacctcgtaagcgcatgaacagatttaaagagaaagaaaactctgagtgtgcctttagggtcttacttcctagtgaccctgtgcaggaggggcgggatgagtttccagagcatagaactccttcagcaagcatacttgaggaaccactgacagagcaaaatcatgctgactgcttagattcagctgggccacggttaaatgtttgtgataaatccagtgccagcattggtgacatggaaaaggagccaggaattcccagtttgacaccacaggctgagctccctgaaccagtggagcacatgatccagaagaaccaatgtctcttcaccaacacccagtgtaaggtttgctgcgccttgcttatttctgagtcccagaagctggcacattaccagagcagcagaagcaaagacaagaaccagtgctgccccatctgtaacatgaccttttcctcccctgtcgtggcccagtcgcactacctggggaagacccacgcaaagaacttaaagctgaagcagcagtccactaaggtggaagccttgcaccagaatagagagatgatagacccagacaagttctgcagcctctgccatgcaactttcaacgaccctgtcatggctcaacaacattatgtgggcaagaaacacagaaaacaggagaccaagctcaaactaatggcacgctatgggcggctggcggaccctgctgtcactgactttccagctggaaagggctacccctgcaaaacatgtaagatagtgctgaactccatagaacagtaccaagctcatgtcagcggcttcaaacacaagaaccagtcaccaaaaacagtggcatcatccctgggccagattccaatgcaaaggcaacccattcagaaagactcaaccaccttggaagactag

SEQ ID NO: 18 - DNA, 4419 bp, Homo sapiens
atgaaagtttccaaccggaggccctatcggcagtactacgtggaggcttttggagatccttctgagagagcctgggtggctggaaaagcaatcgtcatgtttgaaggcagacatcaattcgaagagctacctgtccttaggagaagagggaaacagaaagaaaaaggatataggcataaggttcctcagaaaattttgagtaaatgggaagccagtgttggacttgcagaacagtatgatgttcccaaggggtcaaagaaccgaaaatgtattcctggttcaatcaagttggacagtgaagaagatatgccatttgaagactgcacaaatgatcctgagtcagaacatgacctgttgcttaatggctgtttgaaatcactggcttttgattctgaacattctgcagatgagaaggaaaagccttgcgctaaatctcgagccagaaagagctctgataatccaaaaaggactagtgtgaaaaagggccacatacaatttgaagcacataaagatgaacggaggggaaagattccagagaaccttggcctaaactttatctctggggatatatctgatacgcaggcctctaatgaactttccaggatagcaaatagcctcacagggtccaacactgccccaggaagttttctgttttcttcctgtggaaaaaacactgcaaagaaagaatttgagacttcaaatggtgactctttattgggcttgcctgagggtgctttgatctcaaagtgttctcgagagaagaataaaccccaacgaagcctggtgtgtggttcaaaagtgaagctctgctatattggagcaggtgatgaggaaaagcgaagtgattccattagtatctgtaccacttctgatgatggaagcagtgacctggatcccatagaacacagctcagagtctgataacagtgtccttgaaattccagatgctttcgatagaacagagaacatgttatctatgcagaaaaatgaaaagataaagtattctaggtttgctgccacaaacactagggtaaaagcaaaacagaagcctctcattagtaactcacatacagaccacttaatgggttgtactaagagtgcagagcctggaaccgagacgtctcaggttaatctctctgatctgaaggcatctactcttgttcacaaaccccagtcagattttacaaatgatgctctctctccaaaattcaacctgtcatcaagcatatccagtgagaactcgttaataaagggtggggcagcaaatcaagctctattacattcgaaaagcaaacagcccaagttccgaagtataaagtgcaaacacaaagaaaatccagttatggcagaacccccagttataaatgaggagtgcagtttgaaatgctgctcttctgataccaaaggctctcctttggccagcatttctaaaagtgggaaagtggatggtctaaaactactgaacaatatgcatgagaaaaccagggattcaagtgacatagaaacagcagtggtgaaacatgttttatccgagttgaaggaactctcttacagatccttaggtgaggatgtcagtgactctggaacatcaaagccatcaaaaccattacttttctcttctgcttctagtcagaatcacatacctattgaaccagactacaaattcagtacattgctaatgatgttgaaagatatgcatgatagtaagacgaaggagcagcggttgatgactgctcaaaacctggtctcttaccggagtcctggtcgtggggactgttctactaatagtcctgtaggagtctctaaggttttggtttcaggaggctccacacacaattcagagaaaaagggagatggcactcagaactccgccaatcctagccctagtgggggtgactctgcattatctggcgagttgtctgcttccctacctggcttactgtccgacaagagagacctccctgcttctggtaaaagtcgttcagactgtgttactaggcgcaactgtggacgatcaaagccttcatccaaattgcgagatgctttttcagcccaaatggtaaagaacacagtgaaccgtaaagccttaaagaccgagcgcaaaagaaaactgaatcagcttccaagtgtgactcttgatgctgtactgcagggagaccgagaacgtggaggttcattgagaggtggggcagaagatcctagtaaagaggatccccttcagataatgggccacttaacaagtgaagatggtgaccatttttctgatgtgcatttcgatagcaaggttaagcaatctgatcctggtaaaatttctgaaaaaggactctcttttgaaaacggaaaaggcccagagctggactctgtaatgaacagtgagaatgatgaactcaatggtgtaaatcaagtggtgcctaaaaagcggtggcagcgtttaaaccaaaggcgcactaaacctcgtaagcgcatgaacagatttaaagagaaagaaaactctgagtgtgcctttagggtcttacttcctagtgaccctgtgcaggaggggcgggatgagtttccagagcatagaactccttcagcaagcatacttgaggaaccactgacagagcaaaatcatgctgactgcttagattcagctgggccacggttaaatgtttgtgataaatccagtgccagcattggtgacatggaaaaggagccaggaattcccagtttgacaccacaggctgagctccctgaaccagctgtgcggtcagagaagaaacgccttaggaagccaagcaagtggcttttggaatatacagaagaatatgatcagatatttgctcctaagaaaaaacaaaagaaggtacaggagcaggtgcacaaggtaagttcccgctgtgaagaggaaagccttctagcccgaggtcgatctagtgctcagaacaagcaggtggacgagaattctttgatttcaaccaaagaagagcctccagttcttgaaagggaggctccgtttttggagggccccttggctcagtcagaacttggaggtggacatgctgagttgccgcagctgaccttgtctgtgcctgtggctccggaagtctctccacggcctgcccttgagtctgaggaattgctagttaaaacgccaggaaattatgaaagtaaacgtcaaagaaaaccaactaagaaacttcttgaatccaatgatttagaccctggatttatgcccaagaagggggaccttggcctttctaaaaagtgctatgaagctggtcacctggagaatggcataactgaatcttgtgccacatcttattcaaaagattttggtggaggcactaccaagatatttgacaagccaaggaagcgaaaacgacagaggcatgctgcagccaagatgcagtgtaaaaaagtgaaaaatgatgactcgtcaaaagagattccaggctcagagggagaactaatgcctcacaggacggccacaagccccaaggagactgttgaggaaggtgtagaacacgatcccgggatgcctgcctctaaaaaaatgcagggtgaacgcggtggaggagctgcactcaaggagaatgtctgtcagaattgtgaaaaattgggtgagctgctgttatgtgaggctcagtgctgtggggctttccacctggagtgccttggattgactgagatgccaagaggaaaatttatctgcaatgaatgtcgcacagtggagcacatgatccagaagaaccaatgtctcttcaccaacacccagtgtaaggtttgctgcgccttgcttatttctgagtcccagaagctggcacattaccagagcaaaaaacatgccaacaaagtgaagagatacctagcaatccatggaatggagacattaaagggggaaacgaagaagctagactcagatcagaagagcagcagaagcaaagacaagaaccagtgctgccccatctgtaacatgaccttttcctcccctgtcgtggcccagtcgcactacctggggaagacccacgcaaagaacttaaagctgaagcagcagtccactaaggtggaagccttgcaccagaatagagagatgatagacccagacaagttctgcagcctctgccatgcaactttcaacgaccctgtcatggctcaacaacattatgtgggcaagaaacacagaaaacaggagaccaagctcaaactaatggcacgctatgggcggctggcggaccctgctgtcactgactttccagctggaaagggctacccctgcaaaacatgtaagatagtgctgaactccatagaacagtaccaagctcatgtcagcggcttcaaacacaagaaccagtcaccaaaaacagtggcatcatccctgggccagattccaatgcaaaggcaacccattcagaaagactcaaccaccttggaagactag

SEQ ID NO: 19 - DNA, 3699 bp, Homo sapiens
atgcccctgaagacaaggacagccctttcggatgatccagattccagtaccagtacattaggaaacatgctagaattacctggaacttcatcatcatctacttcacaggaattgccattttgtcaacctaagaaaaagtctacgccactgaagtatgaagttggagatctcatctgggcaaaattcaagagacgcccatggtggccctgcaggatttgttctgatccgttgattaacacacattcaaaaatgaaagtttccaaccggaggccctatcggcagtactacgtggaggcttttggagatccttctgagagagcctgggtggctggaaaagcaatcgtcatgtttgaaggcagacatcaattcgaagagctacctgtccttaggagaagagggaaacagaaagaaaaaggatataggcataaggttcctcagaaaattttgagtaaatgggaagccagtgttggacttgcagaacagtatgatgttcccaaggggtcaaagaaccgaaaatgtattcctggttcaatcaagttggacagtgaagaagatatgccatttgaagactgcacaaatgatcctgagtcagaacatgacctgttgcttaatggctgtttgaaatcactggcttttgattctgaacattctgcagatgagaaggaaaagccttgcgctaaatctcgagccagaaagagctctgataatccaaaaaggactagtgtgaaaaagggccacatacaatttgaagcacataaagatgaacggaggggaaagattccagagaaccttggcctaaactttatctctggggatatatctgatacgcaggcctctaatgaactttccaggatagcaaatagcctcacagggtccaacactgccccaggaagttttctgttttcttcctgtggaaaaaacactgcaaagaaagaatttgagacttcaaatggtgactctttattgggcttgcctgagggtgctttgatctcaaagtgttctcgagagaagaataaaccccaacgaagcctggtgtgtggttcaaaagtgaagctctgctatattggagcaggtgatgaggaaaagcgaagtgattccattagtatctgtaccacttctgatgatggaagcagtgacctggatcccatagaacacagctcagagtctgataacagtgtccttgaaattccagatgctttcgatagaacagagaacatgttatctatgcagaaaaatgaaaagataaagtattctaggtttgctgccacaaacactagggtaaaagcaaaacagaagcctctcattagtaactcacatacagaccacttaatgggttgtactaagagtgcagagcctggaaccgagacgtctcaggttaatctctctgatctgaaggcatctactcttgttcacaaaccccagtcagattttacaaatgatgctctctctccaaaattcaacctgtcatcaagcatatccagtgagaactcgttaataaagggtggggcagcaaatcaagctctattacattcgaaaagcaaacagcccaagttccgaagtataaagtgcaaacacaaagaaaatccagttatggcagaacccccagttataaatgaggagtgcagtttgaaatgctgctcttctgataccaaaggctctcctttggccagcatttctaaaagtgggaaagtggatggtctaaaactactgaacaatatgcatgagaaaaccagggattcaagtgacatagaaacagcagtggtgaaacatgttttatccgagttgaaggaactctcttacagatccttaggtgaggatgtcagtgactctggaacatcaaagccatcaaaaccattacttttctcttctgcttctagtcagaatcacatacctattgaaccagactacaaattcagtacattgctaatgatgttgaaagatatgcatgatagtaagacgaaggagcagcggttgatgactgctcaaaacctggtctcttaccggagtcctggtcgtggggactgttctactaatagtcctgtaggagtctctaaggttttggtttcaggaggctccacacacaattcagagaaaaagggagatggcactcagaactccgccaatcctagccctagtgggggtgactctgcattatctggcgagttgtctgcttccctacctggcttactgtccgacaagagagacctccctgcttctggtaaaagtcgttcagactgtgttactaggcgcaactgtggacgatcaaagccttcatccaaattgcgagatgctttttcagcccaaatggtaaagaacacagtgaaccgtaaagccttaaagaccgagcgcaaaagaaaactgaatcagcttccaagtgtgactcttgatgctgtactgcagggagaccgagaacgtggaggttcattgagaggtggggcagaagatcctagtaaagaggatccccttcagataatgggccacttaacaagtgaagatggtgaccatttttctgatgtgcatttcgatagcaaggttaagcaatctgatcctggtaaaatttctgaaaaaggactctcttttgaaaacggaaaaggcccagagctggactctgtaatgaacagtgagaatgatgaactcaatggtgtaaatcaagtggtgcctaaaaagcggtggcagcgtttaaaccaaaggcgcactaaacctcgtaagcgcatgaacagatttaaagagaaagaaaactctgagtgtgcctttagggtcttacttcctagtgaccctgtgcaggaggggcgggatgagtttccagagcatagaactccttcagcaagcatacttgaggaaccactgacagagcaaaatcatgctgactgcttagattcagctgggccacggttaaatgtttgtgataaatccagtgccagcattggtgacatggaaaaggagccaggaattcccagtttgacaccacaggctgagctccctgaaccagtggagcacatgatccagaagaaccaatgtctcttcaccaacacccagtgtaaggtttgctgcgccttgcttatttctgagtcccagaagctggcacattaccagagcaaaaaacatgccaacaaagtgaagagatacctagcaatccatggaatggagacattaaagggggaaacgaagaagctagactcagatcagaagagcagcagaagcaaagacaagaaccagtgctgccccatctgtaacatgaccttttcctcccctgtcgtggcccagtcgcactacctggggaagacccacgcaaagaacttaaagctgaagcagcagtccactaaggtggaagccttgcaccagaatagagagatgatagacccagacaagttctgcagcctctgccatgcaactttcaacgaccctgtcatggctcaacaacattatgtgggcaagaaacacagaaaacaggagaccaagctcaaactaatggcacgctatgggcggctggcggaccctgctgtcactgactttccagctggaaagggctacccctgcaaaacatgtaagatagtgctgaactccatagaacagtaccaagctcatgtcagcggcttcaaacacaagaaccagtcaccaaaaacagtggcatcatccctgggccagattccaatgcaaaggcaacccattcagaaagactcaaccaccttggaagactag

SEQ ID NO: 20 - DNA, 870 bp, Homo sapiens
atgcccctgaagacaaggacagccctttcggatgatccagattccagtaccagtacattaggaaacatgctagaattacctggaacttcatcatcatctacttcacaggaattgccattttgtcaacctaagaaaaagtctacgccactgaagtatgaagttggagatctcatctgggcaaaattcaagagacgcccatggtggccctgcaggatttgttctgatccgttgattaacacacattcaaaaatgaaagtggagcacatgatccagaagaaccaatgtctcttcaccaacacccagtgtaaggtttgctgcgccttgcttatttctgagtcccagaagctggcacattaccagagcagcagaagcaaagacaagaaccagtgctgccccatctgtaacatgaccttttcctcccctgtcgtggcccagtcgcactacctggggaagacccacgcaaagaacttaaagctgaagcagcagtccactaaggtggaagccttgcaccagaatagagagatgatagacccagacaagttctgcagcctctgccatgcaactttcaacgaccctgtcatggctcaacaacattatgtgggcaagaaacacagaaaacaggagaccaagctcaaactaatggcacgctatgggcggctggcggaccctgctgtcactgactttccagctggaaagggctacccctgcaaaacatgtaagatagtgctgaactccatagaacagtaccaagctcatgtcagcggcttcaaacacaagaaccagtcaccaaaaacagtggcatcatccctgggccagattccaatgcaaaggcaacccattcagaaagactcaaccaccttggaagactag

SEQ ID NO: 21 - DNA, 4323 bp, Homo sapiens
atgaaagtttccaaccggaggccctatcggcagtactacgtggaggcttttggagatccttctgagagagcctgggtggctggaaaagcaatcgtcatgtttgaaggcagacatcaattcgaagagctacctgtccttaggagaagagggaaacagaaagaaaaaggatataggcataaggttcctcagaaaattttgagtaaatgggaagccagtgttggacttgcagaacagtatgatgttcccaaggggtcaaagaaccgaaaatgtattcctggttcaatcaagttggacagtgaagaagatatgccatttgaagactgcacaaatgatcctgagtcagaacatgacctgttgcttaatggctgtttgaaatcactggcttttgattctgaacattctgcagatgagaaggaaaagccttgcgctaaatctcgagccagaaagagctctgataatccaaaaaggactagtgtgaaaaagggccacatacaatttgaagcacataaagatgaacggaggggaaagattccagagaaccttggcctaaactttatctctggggatatatctgatacgcaggcctctaatgaactttccaggatagcaaatagcctcacagggtccaacactgccccaggaagttttctgttttcttcctgtggaaaaaacactgcaaagaaagaatttgagacttcaaatggtgactctttattgggcttgcctgagggtgctttgatctcaaagtgttctcgagagaagaataaaccccaacgaagcctggtgtgtggttcaaaagtgaagctctgctatattggagcaggtgatgaggaaaagcgaagtgattccattagtatctgtaccacttctgatgatggaagcagtgacctggatcccatagaacacagctcagagtctgataacagtgtccttgaaattccagatgctttcgatagaacagagaacatgttatctatgcagaaaaatgaaaagataaagtattctaggtttgctgccacaaacactagggtaaaagcaaaacagaagcctctcattagtaactcacatacagaccacttaatgggttgtactaagagtgcagagcctggaaccgagacgtctcaggttaatctctctgatctgaaggcatctactcttgttcacaaaccccagtcagattttacaaatgatgctctctctccaaaattcaacctgtcatcaagcatatccagtgagaactcgttaataaagggtggggcagcaaatcaagctctattacattcgaaaagcaaacagcccaagttccgaagtataaagtgcaaacacaaagaaaatccagttatggcagaacccccagttataaatgaggagtgcagtttgaaatgctgctcttctgataccaaaggctctcctttggccagcatttctaaaagtgggaaagtggatggtctaaaactactgaacaatatgcatgagaaaaccagggattcaagtgacatagaaacagcagtggtgaaacatgttttatccgagttgaaggaactctcttacagatccttaggtgaggatgtcagtgactctggaacatcaaagccatcaaaaccattacttttctcttctgcttctagtcagaatcacatacctattgaaccagactacaaattcagtacattgctaatgatgttgaaagatatgcatgatagtaagacgaaggagcagcggttgatgactgctcaaaacctggtctcttaccggagtcctggtcgtggggactgttctactaatagtcctgtaggagtctctaaggttttggtttcaggaggctccacacacaattcagagaaaaagggagatggcactcagaactccgccaatcctagccctagtgggggtgactctgcattatctggcgagttgtctgcttccctacctggcttactgtccgacaagagagacctccctgcttctggtaaaagtcgttcagactgtgttactaggcgcaactgtggacgatcaaagccttcatccaaattgcgagatgctttttcagcccaaatggtaaagaacacagtgaaccgtaaagccttaaagaccgagcgcaaaagaaaactgaatcagcttccaagtgtgactcttgatgctgtactgcagggagaccgagaacgtggaggttcattgagaggtggggcagaagatcctagtaaagaggatccccttcagataatgggccacttaacaagtgaagatggtgaccatttttctgatgtgcatttcgatagcaaggttaagcaatctgatcctggtaaaatttctgaaaaaggactctcttttgaaaacggaaaaggcccagagctggactctgtaatgaacagtgagaatgatgaactcaatggtgtaaatcaagtggtgcctaaaaagcggtggcagcgtttaaaccaaaggcgcactaaacctcgtaagcgcatgaacagatttaaagagaaagaaaactctgagtgtgcctttagggtcttacttcctagtgaccctgtgcaggaggggcgggatgagtttccagagcatagaactccttcagcaagcatacttgaggaaccactgacagagcaaaatcatgctgactgcttagattcagctgggccacggttaaatgtttgtgataaatccagtgccagcattggtgacatggaaaaggagccaggaattcccagtttgacaccacaggctgagctccctgaaccagctgtgcggtcagagaagaaacgccttaggaagccaagcaagtggcttttggaatatacagaagaatatgatcagatatttgctcctaagaaaaaacaaaagaaggtacaggagcaggtgcacaaggtaagttcccgctgtgaagaggaaagccttctagcccgaggtcgatctagtgctcagaacaagcaggtggacgagaattctttgatttcaaccaaagaagagcctccagttcttgaaagggaggctccgtttttggagggccccttggctcagtcagaacttggaggtggacatgctgagttgccgcagctgaccttgtctgtgcctgtggctccggaagtctctccacggcctgcccttgagtctgaggaattgctagttaaaacgccaggaaattatgaaagtaaacgtcaaagaaaaccaactaagaaacttcttgaatccaatgatttagaccctggatttatgcccaagaagggggaccttggcctttctaaaaagtgctatgaagctggtcacctggagaatggcataactgaatcttgtgccacatcttattcaaaagattttggtggaggcactaccaagatatttgacaagccaaggaagcgaaaacgacagaggcatgctgcagccaagatgcagtgtaaaaaagtgaaaaatgatgactcgtcaaaagagattccaggctcagagggagaactaatgcctcacaggacggccacaagccccaaggagactgttgaggaaggtgtagaacacgatcccgggatgcctgcctctaaaaaaatgcagggtgaacgcggtggaggagctgcactcaaggagaatgtctgtcagaattgtgaaaaattgggtgagctgctgttatgtgaggctcagtgctgtggggctttccacctggagtgccttggattgactgagatgccaagaggaaaatttatctgcaatgaatgtcgcacagtggagcacatgatccagaagaaccaatgtctcttcaccaacacccagtgtaaggtttgctgcgccttgcttatttctgagtcccagaagctggcacattaccagagcagcagaagcaaagacaagaaccagtgctgccccatctgtaacatgaccttttcctcccctgtcgtggcccagtcgcactacctggggaagacccacgcaaagaacttaaagctgaagcagcagtccactaaggtggaagccttgcaccagaatagagagatgatagacccagacaagttctgcagcctctgccatgcaactttcaacgaccctgtcatggctcaacaacattatgtgggcaagaaacacagaaaacaggagaccaagctcaaactaatggcacgctatgggcggctggcggaccctgctgtcactgactttccagctggaaagggctacccctgcaaaacatgtaagatagtgctgaactccatagaacagtaccaagctcatgtcagcggcttcaaacacaagaaccagtcaccaaaaacagtggcatcatccctgggccagattccaatgcaaaggcaacccattcagaaagactcaaccaccttggaagactag

SEQ ID NO: 22 - DNA, 4572 bp, Homo sapiens
atgcccctgaagacaaggacagccctttcggatgatccagattccagtaccagtacattaggaaacatgctagaattacctggaacttcatcatcatctacttcacaggaattgccattttgtcaacctaagaaaaagtctacgccactgaagtatgaagttggagatctcatctgggcaaaattcaagagacgcccatggtggccctgcaggatttgttctgatccgttgattaacacacattcaaaaatgaaagtttccaaccggaggccctatcggcagtactacgtggaggcttttggagatccttctgagagagcctgggtggctggaaaagcaatcgtcatgtttgaaggcagacatcaattcgaagagctacctgtccttaggagaagagggaaacagaaagaaaaaggatataggcataaggttcctcagaaaattttgagtaaatgggaagccagtgttggacttgcagaacagtatgatgttcccaaggggtcaaagaaccgaaaatgtattcctggttcaatcaagttggacagtgaagaagatatgccatttgaagactgcacaaatgatcctgagtcagaacatgacctgttgcttaatggctgtttgaaatcactggcttttgattctgaacattctgcagatgagaaggaaaagccttgcgctaaatctcgagccagaaagagctctgataatccaaaaaggactagtgtgaaaaagggccacatacaatttgaagcacataaagatgaacggaggggaaagattccagagaaccttggcctaaactttatctctggggatatatctgatacgcaggcctctaatgaactttccaggatagcaaatagcctcacagggtccaacactgccccaggaagttttctgttttcttcctgtggaaaaaacactgcaaagaaagaatttgagacttcaaatggtgactctttattgggcttgcctgagggtgctttgatctcaaagtgttctcgagagaagaataaaccccaacgaagcctggtgtgtggttcaaaagtgaagctctgctatattggagcaggtgatgaggaaaagcgaagtgattccattagtatctgtaccacttctgatgatggaagcagtgacctggatcccatagaacacagctcagagtctgataacagtgtccttgaaattccagatgctttcgatagaacagagaacatgttatctatgcagaaaaatgaaaagataaagtattctaggtttgctgccacaaacactagggtaaaagcaaaacagaagcctctcattagtaactcacatacagaccacttaatgggttgtactaagagtgcagagcctggaaccgagacgtctcaggttaatctctctgatctgaaggcatctactcttgttcacaaaccccagtcagattttacaaatgatgctctctctccaaaattcaacctgtcatcaagcatatccagtgagaactcgttaataaagggtggggcagcaaatcaagctctattacattcgaaaagcaaacagcccaagttccgaagtataaagtgcaaacacaaagaaaatccagttatggcagaacccccagttataaatgaggagtgcagtttgaaatgctgctcttctgataccaaaggctctcctttggccagcatttctaaaagtgggaaagtggatggtctaaaactactgaacaatatgcatgagaaaaccagggattcaagtgacatagaaacagcagtggtgaaacatgttttatccgagttgaaggaactctcttacagatccttaggtgaggatgtcagtgactctggaacatcaaagccatcaaaaccattacttttctcttctgcttctagtcagaatcacatacctattgaaccagactacaaattcagtacattgctaatgatgttgaaagatatgcatgatagtaagacgaaggagcagcggttgatgactgctcaaaacctggtctcttaccggagtcctggtcgtggggactgttctactaatagtcctgtaggagtctctaaggttttggtttcaggaggctccacacacaattcagagaaaaagggagatggcactcagaactccgccaatcctagccctagtgggggtgactctgcattatctggcgagttgtctgcttccctacctggcttactgtccgacaagagagacctccctgcttctggtaaaagtcgttcagactgtgttactaggcgcaactgtggacgatcaaagccttcatccaaattgcgagatgctttttcagcccaaatggtaaagaacacagtgaaccgtaaagccttaaagaccgagcgcaaaagaaaactgaatcagcttccaagtgtgactcttgatgctgtactgcagggagaccgagaacgtggaggttcattgagaggtggggcagaagatcctagtaaagaggatccccttcagataatgggccacttaacaagtgaagatggtgaccatttttctgatgtgcatttcgatagcaaggttaagcaatctgatcctggtaaaatttctgaaaaaggactctcttttgaaaacggaaaaggcccagagctggactctgtaatgaacagtgagaatgatgaactcaatggtgtaaatcaagtggtgcctaaaaagcggtggcagcgtttaaaccaaaggcgcactaaacctcgtaagcgcatgaacagatttaaagagaaagaaaactctgagtgtgcctttagggtcttacttcctagtgaccctgtgcaggaggggcgggatgagtttccagagcatagaactccttcagcaagcatacttgaggaaccactgacagagcaaaatcatgctgactgcttagattcagctgggccacggttaaatgtttgtgataaatccagtgccagcattggtgacatggaaaaggagccaggaattcccagtttgacaccacaggctgagctccctgaaccagctgtgcggtcagagaagaaacgccttaggaagccaagcaagtggcttttggaatatacagaagaatatgatcagatatttgctcctaagaaaaaacaaaagaaggtacaggagcaggtgcacaaggtaagttcccgctgtgaagaggaaagccttctagcccgaggtcgatctagtgctcagaacaagcaggtggacgagaattctttgatttcaaccaaagaagagcctccagttcttgaaagggaggctccgtttttggagggccccttggctcagtcagaacttggaggtggacatgctgagttgccgcagctgaccttgtctgtgcctgtggctccggaagtctctccacggcctgcccttgagtctgaggaattgctagttaaaacgccaggaaattatgaaagtaaacgtcaaagaaaaccaactaagaaacttcttgaatccaatgatttagaccctggatttatgcccaagaagggggaccttggcctttctaaaaagtgctatgaagctggtcacctggagaatggcataactgaatcttgtgccacatcttattcaaaagattttggtggaggcactaccaagatatttgacaagccaaggaagcgaaaacgacagaggcatgctgcagccaagatgcagtgtaaaaaagtgaaaaatgatgactcgtcaaaagagattccaggctcagagggagaactaatgcctcacaggacggccacaagccccaaggagactgttgaggaaggtgtagaacacgatcccgggatgcctgcctctaaaaaaatgcagggtgaacgcggtggaggagctgcactcaaggagaatgtctgtcagaattgtgaaaaattgggtgagctgctgttatgtgaggctcagtgctgtggggctttccacctggagtgccttggattgactgagatgccaagaggaaaatttatctgcaatgaatgtcgcacagtggagcacatgatccagaagaaccaatgtctcttcaccaacacccagtgtaaggtttgctgcgccttgcttatttctgagtcccagaagctggcacattaccagagcagcagaagcaaagacaagaaccagtgctgccccatctgtaacatgaccttttcctcccctgtcgtggcccagtcgcactacctggggaagacccacgcaaagaacttaaagctgaagcagcagtccactaaggtggaagccttgcaccagaatagagagatgatagacccagacaagttctgcagcctctgccatgcaactttcaacgaccctgtcatggctcaacaacattatgtgggcaagaaacacagaaaacaggagaccaagctcaaactaatggcacgctatgggcggctggcggaccctgctgtcactgactttccagctggaaagggctacccctgcaaaacatgtaagatagtgctgaactccatagaacagtaccaagctcatgtcagcggcttcaaacacaagaaccagtcaccaaaaacagtggcatcatccctgggccagattccaatgcaaaggcaacccattcagaaagactcaaccaccttggaagactag

SEQ ID NO: 23 - DNA, 4410 bp, Homo sapiens
atggatcagacctgtgaactacccagaagaaattgtctgctgcccttttccaatccagtgaatttagatgcccctgaagacaaggacagccctttcggtaatggtcaatccaatttttctgagccacttaatgggtgtactatgcagttatcgactgtcagtggaacatcccaaaatgcttatggacaagattctccatcttgttacattccactgcggagactacaggatttggcctccatgatcaatgtagagtatttaaatgggtctgctgatggatcagaatcctttcaagaccctgaaaaaagtgattcaagagctcagacgccaattgtttgcacttccttgagtcctggtggtcctacagcacttgctatgaaacaggaaccctcttgtaataactcccctgaactccaggtaaaagtaacaaagactatcaagaatggctttctgcactttgagaattttacttgtgtggacgatgcagatgtagattctgaaatggacccagaacagccagtcacagaggatgagagtatagaggagatctttgaggaaactcagaccaatgccacctgcaattatgagactaaatcagagaatggtgtaaaagtggccatgggaagtgaacaagacagcacaccagagagtagacacggtgcagtcaaatcgccattcttgccattagctcctcagactgaaacacagaaaaataagcaaagaaatgaagtggacggcagcaatgaaaaagcagcccttctcccagcccccttttcactaggagacacaaacattacaatagaagagcaattaaactcaataaatttatcttttcaggatgatccagattccagtaccagtacattaggaaacatgctagaattacctggaacttcatcatcatctacttcacaggaattgccattttgtcaacctaagaaaaagtctacgccactgaagtatgaagttggagatctcatctgggcaaaattcaagagacgcccatggtggccctgcaggatttgttctgatccgttgattaacacacattcaaaaatgaaagtttccaaccggaggccctatcggcagtactacgtggaggcttttggagatccttctgagagagcctgggtggctggaaaagcaatcgtcatgtttgaaggcagacatcaattcgaagagctacctgtccttaggagaagagggaaacagaaagaaaaaggatataggcataaggttcctcagaaaattttgagtaaatgggaagccagtgttggacttgcagaacagtatgatgttcccaaggggtcaaagaaccgaaaatgtattcctggttcaatcaagttggacagtgaagaagatatgccatttgaagactgcacaaatgatcctgagtcagaacatgacctgttgcttaatggctgtttgaaatcactggcttttgattctgaacattctgcagatgagaaggaaaagccttgcgctaaatctcgagccagaaagagctctgataatccaaaaaggactagtgtgaaaaagggccacatacaatttgaagcacataaagatgaacggaggggaaagattccagagaaccttggcctaaactttatctctggggatatatctgatacgcaggcctctaatgaactttccaggatagcaaatagcctcacagggtccaacactgccccaggaagttttctgttttcttcctgtggaaaaaacactgcaaagaaagaatttgagacttcaaatggtgactctttattgggcttgcctgagggtgctttgatctcaaagtgttctcgagagaagaataaaccccaacgaagcctggtgtgtggttcaaaagtgaagctctgctatattggagcaggtgatgaggaaaagcgaagtgattccattagtatctgtaccacttctgatgatggaagcagtgacctggatcccatagaacacagctcagagtctgataacagtgtccttgaaattccagatgctttcgatagaacagagaacatgttatctatgcagaaaaatgaaaagataaagtattctaggtttgctgccacaaacactagggtaaaagcaaaacagaagcctctcattagtaactcacatacagaccacttaatgggttgtactaagagtgcagagcctggaaccgagacgtctcaggttaatctctctgatctgaaggcatctactcttgttcacaaaccccagtcagattttacaaatgatgctctctctccaaaattcaacctgtcatcaagcatatccagtgagaactcgttaataaagggtggggcagcaaatcaagctctattacattcgaaaagcaaacagcccaagttccgaagtataaagtgcaaacacaaagaaaatccagttatggcagaacccccagttataaatgaggagtgcagtttgaaatgctgctcttctgataccaaaggctctcctttggccagcatttctaaaagtgggaaagtggatggtctaaaactactgaacaatatgcatgagaaaaccagggattcaagtgacatagaaacagcagtggtgaaacatgttttatccgagttgaaggaactctcttacagatccttaggtgaggatgtcagtgactctggaacatcaaagccatcaaaaccattacttttctcttctgcttctagtcagaatcacatacctattgaaccagactacaaattcagtacattgctaatgatgttgaaagatatgcatgatagtaagacgaaggagcagcggttgatgactgctcaaaacctggtctcttaccggagtcctggtcgtggggactgttctactaatagtcctgtaggagtctctaaggttttggtttcaggaggctccacacacaattcagagaaaaagggagatggcactcagaactccgccaatcctagccctagtgggggtgactctgcattatctggcgagttgtctgcttccctacctggcttactgtccgacaagagagacctccctgcttctggtaaaagtcgttcagactgtgttactaggcgcaactgtggacgatcaaagccttcatccaaattgcgagatgctttttcagcccaaatggtaaagaacacagtgaaccgtaaagccttaaagaccgagcgcaaaagaaaactgaatcagcttccaagtgtgactcttgatgctgtactgcagggagaccgagaacgtggaggttcattgagaggtggggcagaagatcctagtaaagaggatccccttcagataatgggccacttaacaagtgaagatggtgaccatttttctgatgtgcatttcgatagcaaggttaagcaatctgatcctggtaaaatttctgaaaaaggactctcttttgaaaacggaaaaggcccagagctggactctgtaatgaacagtgagaatgatgaactcaatggtgtaaatcaagtggtgcctaaaaagcggtggcagcgtttaaaccaaaggcgcactaaacctcgtaagcgcatgaacagatttaaagagaaagaaaactctgagtgtgcctttagggtcttacttcctagtgaccctgtgcaggaggggcgggatgagtttccagagcatagaactccttcagcaagcatacttgaggaaccactgacagagcaaaatcatgctgactgcttagattcagctgggccacggttaaatgtttgtgataaatccagtgccagcattggtgacatggaaaaggagccaggaattcccagtttgacaccacaggctgagctccctgaaccagtggagcacatgatccagaagaaccaatgtctcttcaccaacacccagtgtaaggtttgctgcgccttgcttatttctgagtcccagaagctggcacattaccagagcagcagaagcaaagacaagaaccagtgctgccccatctgtaacatgaccttttcctcccctgtcgtggcccagtcgcactacctggggaagacccacgcaaagaacttaaagctgaagcagcagtccactaaggtggaagccttgcaccagaatagagagatgatagacccagacaagttctgcagcctctgccatgcaactttcaacgaccctgtcatggctcaacaacattatgtgggcaagaaacacagaaaacaggagaccaagctcaaactaatggcacgctatgggcggctggcggaccctgctgtcactgactttccagctggaaagggctacccctgcaaaacatgtaagatagtgctgaactccatagaacagtaccaagctcatgtcagcggcttcaaacacaagaaccagtcaccaaaaacagtggcatcatccctgggccagattccaatgcaaaggcaacccattcagaaagactcaaccaccttggaagactag

SEQ ID NO: 24 - DNA, 5067 bp, Homo sapiens
atgaaagtttccaaccggaggccctatcggcagtactacgtggaggcttttggagatccttctgagagagcctgggtggctggaaaagcaatcgtcatgtttgaaggcagacatcaattcgaagagctacctgtccttaggagaagagggaaacagaaagaaaaaggatataggcataaggttcctcagaaaattttgagtaaatgggaagccagtgttggacttgcagaacagtatgatgttcccaaggggtcaaagaaccgaaaatgtattcctggttcaatcaagttggacagtgaagaagatatgccatttgaagactgcacaaatgatcctgagtcagaacatgacctgttgcttaatggctgtttgaaatcactggcttttgattctgaacattctgcagatgagaaggaaaagccttgcgctaaatctcgagccagaaagagctctgataatccaaaaaggactagtgtgaaaaagggccacatacaatttgaagcacataaagatgaacggaggggaaagattccagagaaccttggcctaaactttatctctggggatatatctgatacgcaggcctctaatgaactttccaggatagcaaatagcctcacagggtccaacactgccccaggaagttttctgttttcttcctgtggaaaaaacactgcaaagaaagaatttgagacttcaaatggtgactctttattgggcttgcctgagggtgctttgatctcaaagtgttctcgagagaagaataaaccccaacgaagcctggtgtgtggttcaaaagtgaagctctgctatattggagcaggtgatgaggaaaagcgaagtgattccattagtatctgtaccacttctgatgatggaagcagtgacctggatcccatagaacacagctcagagtctgataacagtgtccttgaaattccagatgctttcgatagaacagagaacatgttatctatgcagaaaaatgaaaagataaagtattctaggtttgctgccacaaacactagggtaaaagcaaaacagaagcctctcattagtaactcacatacagaccacttaatgggttgtactaagagtgcagagcctggaaccgagacgtctcaggttaatctctctgatctgaaggcatctactcttgttcacaaaccccagtcagattttacaaatgatgctctctctccaaaattcaacctgtcatcaagcatatccagtgagaactcgttaataaagggtggggcagcaaatcaagctctattacattcgaaaagcaaacagcccaagttccgaagtataaagtgcaaacacaaagaaaatccagttatggcagaacccccagttataaatgaggagtgcagtttgaaatgctgctcttctgataccaaaggctctcctttggccagcatttctaaaagtgggaaagtggatggtctaaaactactgaacaatatgcatgagaaaaccagggattcaagtgacatagaaacagcagtggtgaaacatgttttatccgagttgaaggaactctcttacagatccttaggtgaggatgtcagtgactctggaacatcaaagccatcaaaaccattacttttctcttctgcttctagtcagaatcacatacctattgaaccagactacaaattcagtacattgctaatgatgttgaaagatatgcatgatagtaagacgaaggagcagcggttgatgactgctcaaaacctggtctcttaccggagtcctggtcgtggggactgttctactaatagtcctgtaggagtctctaaggttttggtttcaggaggctccacacacaattcagagaaaaagggagatggcactcagaactccgccaatcctagccctagtgggggtgactctgcattatctggcgagttgtctgcttccctacctggcttactgtccgacaagagagacctccctgcttctggtaaaagtcgttcagactgtgttactaggcgcaactgtggacgatcaaagccttcatccaaattgcgagatgctttttcagcccaaatggtaaagaacacagtgaaccgtaaagccttaaagaccgagcgcaaaagaaaactgaatcagcttccaagtgtgactcttgatgctgtactgcagggagaccgagaacgtggaggttcattgagaggtggggcagaagatcctagtaaagaggatccccttcagataatgggccacttaacaagtgaagatggtgaccatttttctgatgtgcatttcgatagcaaggttaagcaatctgatcctggtaaaatttctgaaaaaggactctcttttgaaaacggaaaaggcccagagctggactctgtaatgaacagtgagaatgatgaactcaatggtgtaaatcaagtggtgcctaaaaagcggtggcagcgtttaaaccaaaggcgcactaaacctcgtaagcgcatgaacagatttaaagagaaagaaaactctgagtgtgcctttagggtcttacttcctagtgaccctgtgcaggaggggcgggatgagtttccagagcatagaactccttcagcaagcatacttgaggaaccactgacagagcaaaatcatgctgactgcttagattcagctgggccacggttaaatgtttgtgataaatccagtgccagcattggtgacatggaaaaggagccaggaattcccagtttgacaccacaggctgagctccctgaaccagctgtgcggtcagagaagaaacgccttaggaagccaagcaagtggcttttggaatatacagaagaatatgatcagatatttgctcctaagaaaaaacaaaagaaggtacaggagcaggtgcacaaggtaagttcccgctgtgaagaggaaagccttctagcccgaggtcgatctagtgctcagaacaagcaggtggacgagaattctttgatttcaaccaaagaagagcctccagttcttgaaagggaggctccgtttttggagggccccttggctcagtcagaacttggaggtggacatgctgagttgccgcagctgaccttgtctgtgcctgtggctccggaagtctctccacggcctgcccttgagtctgaggaattgctagttaaaacgccaggaaattatgaaagtaaacgtcaaagaaaaccaactaagaaacttcttgaatccaatgatttagaccctggatttatgcccaagaagggggaccttggcctttctaaaaagtgctatgaagctggtcacctggagaatggcataactgaatcttgtgccacatcttattcaaaagattttggtggaggcactaccaagatatttgacaagccaaggaagcgaaaacgacagaggcatgctgcagccaagatgcagtgtaaaaaagtgaaaaatgatgactcgtcaaaagagattccaggctcagagggagaactaatgcctcacaggacggccacaagccccaaggagactgttgaggaaggtgtagaacacgatcccgggatgcctgcctctaaaaaaatgcagggtgaacgcggtggaggagctgcactcaaggagaatgtctgtcagaattgtgaaaaattgggtgagctgctgttatgtgaggctcagtgctgtggggctttccacctggagtgccttggattgactgagatgccaagaggaaaatttatctgcaatgaatgtcgcacaggaatccatacctgttttgtatgtaagcagagtggggaagatgttaaaaggtgccttctacccttgtgtggaaagttttaccatgaagagtgtgtccagaagtacccacccactgttatgcagaacaagggcttccggtgctccctccacatctgtataacctgtcatgctgctaatccagccaatgtttctgcatctaaaggtcggttgatgcgctgtgtccgctgtcctgtggcataccacgccaatgacttttgcctggctgctgggtcaaagatccttgcatctaatagtatcatctgccctaatcactttacccctaggcggggctgccgaaatcatgagcatgttaatgttagctggtgctttgtgtgctcagaaggaggcagccttctgtgctgtgattcttgccctgctgcttttcatcgtgaatgcctgaacattgatatccctgaaggaaactggtattgcaatgactgtaaagcaggcaaaaagccacactacagggagattgtctgggtaaaagttggacgatacaggtggtggccagctgagatctgccatcctcgagctgttccttccaacattgataagatgagacatgatgtgggagagttcccagtcctcttttttggatctaatgactatttgtggactcaccaggcccgagtcttcccttacatggagggtgacgtgagcagcaaggataagatgggcaaaggagtggatgggacatataaaaaagtggagcacatgatccagaagaaccaatgtctcttcaccaacacccagtgtaaggtttgctgcgccttgcttatttctgagtcccagaagctggcacattaccagagcagcagaagcaaagacaagaaccagtgctgccccatctgtaacatgaccttttcctcccctgtcgtggcccagtcgcactacctggggaagacccacgcaaagaacttaaagctgaagcagcagtccactaaggtggaagccttgcaccagaatagagagatgatagacccagacaagttctgcagcctctgccatgcaactttcaacgaccctgtcatggctcaacaacattatgtgggcaagaaacacagaaaacaggagaccaagctcaaactaatggcacgctatgggcggctggcggaccctgctgtcactgactttccagctggaaagggctacccctgcaaaacatgtaagatagtgctgaactccatagaacagtaccaagctcatgtcagcggcttcaaacacaagaaccagtcaccaaaaacagtggcatcatccctgggccagattccaatgcaaaggcaacccattcagaaagactcaaccaccttggaagactag

SEQ ID NO: 25 - DNA, 717 bp, Homo sapiens
atgaaagtggagcacatgatccagaagaaccaatgtctcttcaccaacacccagtgtaaggtttgctgcgccttgcttatttctgagtcccagaagctggcacattaccagagcaaaaaacatgccaacaaagtgaagagatacctagcaatccatggaatggagacattaaagggggaaacgaagaagctagactcagatcagaagagcagcagaagcaaagacaagaaccagtgctgccccatctgtaacatgaccttttcctcccctgtcgtggcccagtcgcactacctggggaagacccacgcaaagaacttaaagctgaagcagcagtccactaaggtggaagccttgcaccagaatagagagatgatagacccagacaagttctgcagcctctgccatgcaactttcaacgaccctgtcatggctcaacaacattatgtgggcaagaaacacagaaaacaggagaccaagctcaaactaatggcacgctatgggcggctggcggaccctgctgtcactgactttccagctggaaagggctacccctgcaaaacatgtaagatagtgctgaactccatagaacagtaccaagctcatgtcagcggcttcaaacacaagaaccagtcaccaaaaacagtggcatcatccctgggccagattccaatgcaaaggcaacccattcagaaagactcaaccaccttggaagactag

SEQ ID NO: 26 - DNA, 6219 bp, Homo sapiens
atggatcagacctgtgaactacccagaagaaattgtctgctgcccttttccaatccagtgaatttagatgcccctgaagacaaggacagccctttcggtaatggtcaatccaatttttctgagccacttaatgggtgtactatgcagttatcgactgtcagtggaacatcccaaaatgcttatggacaagattctccatcttgttacattccactgcggagactacaggatttggcctccatgatcaatgtagagtatttaaatgggtctgctgatggatcagaatcctttcaagaccctgaaaaaagtgattcaagagctcagacgccaattgtttgcacttccttgagtcctggtggtcctacagcacttgctatgaaacaggaaccctcttgtaataactcccctgaactccaggtaaaagtaacaaagactatcaagaatggctttctgcactttgagaattttacttgtgtggacgatgcagatgtagattctgaaatggacccagaacagccagtcacagaggatgagagtatagaggagatctttgaggaaactcagaccaatgccacctgcaattatgagactaaatcagagaatggtgtaaaagtggccatgggaagtgaacaagacagcacaccagagagtagacacggtgcagtcaaatcgccattcttgccattagctcctcagactgaaacacagaaaaataagcaaagaaatgaagtggacggcagcaatgaaaaagcagcccttctcccagcccccttttcactaggagacacaaacattacaatagaagagcaattaaactcaataaatttatcttttcaggatgatccagattccagtaccagtacattaggaaacatgctagaattacctggaacttcatcatcatctacttcacaggaattgccattttgtcaacctaagaaaaagtctacgccactgaagtatgaagttggagatctcatctgggcaaaattcaagagacgcccatggtggccctgcaggatttgttctgatccgttgattaacacacattcaaaaatgaaagtttccaaccggaggccctatcggcagtactacgtggaggcttttggagatccttctgagagagcctgggtggctggaaaagcaatcgtcatgtttgaaggcagacatcaattcgaagagctacctgtccttaggagaagagggaaacagaaagaaaaaggatataggcataaggttcctcagaaaattttgagtaaatgggaagccagtgttggacttgcagaacagtatgatgttcccaaggggtcaaagaaccgaaaatgtattcctggttcaatcaagttggacagtgaagaagatatgccatttgaagactgcacaaatgatcctgagtcagaacatgacctgttgcttaatggctgtttgaaatcactggcttttgattctgaacattctgcagatgagaaggaaaagccttgcgctaaatctcgagccagaaagagctctgataatccaaaaaggactagtgtgaaaaagggccacatacaatttgaagcacataaagatgaacggaggggaaagattccagagaaccttggcctaaactttatctctggggatatatctgatacgcaggcctctaatgaactttccaggatagcaaatagcctcacagggtccaacactgccccaggaagttttctgttttcttcctgtggaaaaaacactgcaaagaaagaatttgagacttcaaatggtgactctttattgggcttgcctgagggtgctttgatctcaaagtgttctcgagagaagaataaaccccaacgaagcctggtgtgtggttcaaaagtgaagctctgctatattggagcaggtgatgaggaaaagcgaagtgattccattagtatctgtaccacttctgatgatggaagcagtgacctggatcccatagaacacagctcagagtctgataacagtgtccttgaaattccagatgctttcgatagaacagagaacatgttatctatgcagaaaaatgaaaagataaagtattctaggtttgctgccacaaacactagggtaaaagcaaaacagaagcctctcattagtaactcacatacagaccacttaatgggttgtactaagagtgcagagcctggaaccgagacgtctcaggttaatctctctgatctgaaggcatctactcttgttcacaaaccccagtcagattttacaaatgatgctctctctccaaaattcaacctgtcatcaagcatatccagtgagaactcgttaataaagggtggggcagcaaatcaagctctattacattcgaaaagcaaacagcccaagttccgaagtataaagtgcaaacacaaagaaaatccagttatggcagaacccccagttataaatgaggagtgcagtttgaaatgctgctcttctgataccaaaggctctcctttggccagcatttctaaaagtgggaaagtggatggtctaaaactactgaacaatatgcatgagaaaaccagggattcaagtgacatagaaacagcagtggtgaaacatgttttatccgagttgaaggaactctcttacagatccttaggtgaggatgtcagtgactctggaacatcaaagccatcaaaaccattacttttctcttctgcttctagtcagaatcacatacctattgaaccagactacaaattcagtacattgctaatgatgttgaaagatatgcatgatagtaagacgaaggagcagcggttgatgactgctcaaaacctggtctcttaccggagtcctggtcgtggggactgttctactaatagtcctgtaggagtctctaaggttttggtttcaggaggctccacacacaattcagagaaaaagggagatggcactcagaactccgccaatcctagccctagtgggggtgactctgcattatctggcgagttgtctgcttccctacctggcttactgtccgacaagagagacctccctgcttctggtaaaagtcgttcagactgtgttactaggcgcaactgtggacgatcaaagccttcatccaaattgcgagatgctttttcagcccaaatggtaaagaacacagtgaaccgtaaagccttaaagaccgagcgcaaaagaaaactgaatcagcttccaagtgtgactcttgatgctgtactgcagggagaccgagaacgtggaggttcattgagaggtggggcagaagatcctagtaaagaggatccccttcagataatgggccacttaacaagtgaagatggtgaccatttttctgatgtgcatttcgatagcaaggttaagcaatctgatcctggtaaaatttctgaaaaaggactctcttttgaaaacggaaaaggcccagagctggactctgtaatgaacagtgagaatgatgaactcaatggtgtaaatcaagtggtgcctaaaaagcggtggcagcgtttaaaccaaaggcgcactaaacctcgtaagcgcatgaacagatttaaagagaaagaaaactctgagtgtgcctttagggtcttacttcctagtgaccctgtgcaggaggggcgggatgagtttccagagcatagaactccttcagcaagcatacttgaggaaccactgacagagcaaaatcatgctgactgcttagattcagctgggccacggttaaatgtttgtgataaatccagtgccagcattggtgacatggaaaaggagccaggaattcccagtttgacaccacaggctgagctccctgaaccagctgtgcggtcagagaagaaacgccttaggaagccaagcaagtggcttttggaatatacagaagaatatgatcagatatttgctcctaagaaaaaacaaaagaaggtacaggagcaggtgcacaaggtaagttcccgctgtgaagaggaaagccttctagcccgaggtcgatctagtgctcagaacaagcaggtggacgagaattctttgatttcaaccaaagaagagcctccagttcttgaaagggaggctccgtttttggagggccccttggctcagtcagaacttggaggtggacatgctgagttgccgcagctgaccttgtctgtgcctgtggctccggaagtctctccacggcctgcccttgagtctgaggaattgctagttaaaacgccaggaaattatgaaagtaaacgtcaaagaaaaccaactaagaaacttcttgaatccaatgatttagaccctggatttatgcccaagaagggggaccttggcctttctaaaaagtgctatgaagctggtcacctggagaatggcataactgaatcttgtgccacatcttattcaaaagattttggtggaggcactaccaagatatttgacaagccaaggaagcgaaaacgacagaggcatgctgcagccaagatgcagtgtaaaaaagtgaaaaatgatgactcgtcaaaagagattccaggctcagagggagaactaatgcctcacaggacggccacaagccccaaggagactgttgaggaaggtgtagaacacgatcccgggatgcctgcctctaaaaaaatgcagggtgaacgcggtggaggagctgcactcaaggagaatgtctgtcagaattgtgaaaaattgggtgagctgctgttatgtgaggctcagtgctgtggggctttccacctggagtgccttggattgactgagatgccaagaggaaaatttatctgcaatgaatgtcgcacaggaatccatacctgttttgtatgtaagcagagtggggaagatgttaaaaggtgccttctacccttgtgtggaaagttttaccatgaagagtgtgtccagaagtacccacccactgttatgcagaacaagggcttccggtgctccctccacatctgtataacctgtcatgctgctaatccagccaatgtttctgcatctaaaggtcggttgatgcgctgtgtccgctgtcctgtggcataccacgccaatgacttttgcctggctgctgggtcaaagatccttgcatctaatagtatcatctgccctaatcactttacccctaggcggggctgccgaaatcatgagcatgttaatgttagctggtgctttgtgtgctcagaaggaggcagccttctgtgctgtgattcttgccctgctgcttttcatcgtgaatgcctgaacattgatatccctgaaggaaactggtattgcaatgactgtaaagcaggcaaaaagccacactacagggagattgtctgggtaaaagttggacgatacaggtggtggccagctgagatctgccatcctcgagctgttccttccaacattgataagatgagacatgatgtgggagagttcccagtcctcttttttggatctaatgactatttgtggactcaccaggcccgagtcttcccttacatggagggtgacgtgagcagcaaggataagatgggcaaaggagtggatgggacatataaaaaagtggagcacatgatccagaagaaccaatgtctcttcaccaacacccagtgtaaggtttgctgcgccttgcttatttctgagtcccagaagctggcacattaccagagcaaaaaacatgccaacaaagtgaagagatacctagcaatccatggaatggagacattaaagggggaaacgaagaagctagactcagatcagaagagcagcagaagcaaagacaagaaccagtgctgccccatctgtaacatgaccttttcctcccctgtcgtggcccagtcgcactacctggggaagacccacgcaaagaacttaaagctgaagcagcagtccactaaggtggaagccttgcaccagaatagagagatgatagacccagacaagttctgcagcctctgccatgcaactttcaacgaccctgtcatggctcaacaacattatgtgggcaagaaacacagaaaacaggagaccaagctcaaactaatggcacgctatgggcggctggcggaccctgctgtcactgactttccagctggaaagggctacccctgcaaaacatgtaagatagtgctgaactccatagaacagtaccaagctcatgtcagcggcttcaaacacaagaaccagtcaccaaaaacagtggcatcatccctgggccagattccaatgcaaaggcaacccattcagaaagactcaaccaccttggaagactag

SEQ ID NO: 27 - DNA, 6123 bp, Homo sapiens
atggatcagacctgtgaactacccagaagaaattgtctgctgcccttttccaatccagtgaatttagatgcccctgaagacaaggacagccctttcggtaatggtcaatccaatttttctgagccacttaatgggtgtactatgcagttatcgactgtcagtggaacatcccaaaatgcttatggacaagattctccatcttgttacattccactgcggagactacaggatttggcctccatgatcaatgtagagtatttaaatgggtctgctgatggatcagaatcctttcaagaccctgaaaaaagtgattcaagagctcagacgccaattgtttgcacttccttgagtcctggtggtcctacagcacttgctatgaaacaggaaccctcttgtaataactcccctgaactccaggtaaaagtaacaaagactatcaagaatggctttctgcactttgagaattttacttgtgtggacgatgcagatgtagattctgaaatggacccagaacagccagtcacagaggatgagagtatagaggagatctttgaggaaactcagaccaatgccacctgcaattatgagactaaatcagagaatggtgtaaaagtggccatgggaagtgaacaagacagcacaccagagagtagacacggtgcagtcaaatcgccattcttgccattagctcctcagactgaaacacagaaaaataagcaaagaaatgaagtggacggcagcaatgaaaaagcagcccttctcccagcccccttttcactaggagacacaaacattacaatagaagagcaattaaactcaataaatttatcttttcaggatgatccagattccagtaccagtacattaggaaacatgctagaattacctggaacttcatcatcatctacttcacaggaattgccattttgtcaacctaagaaaaagtctacgccactgaagtatgaagttggagatctcatctgggcaaaattcaagagacgcccatggtggccctgcaggatttgttctgatccgttgattaacacacattcaaaaatgaaagtttccaaccggaggccctatcggcagtactacgtggaggcttttggagatccttctgagagagcctgggtggctggaaaagcaatcgtcatgtttgaaggcagacatcaattcgaagagctacctgtccttaggagaagagggaaacagaaagaaaaaggatataggcataaggttcctcagaaaattttgagtaaatgggaagccagtgttggacttgcagaacagtatgatgttcccaaggggtcaaagaaccgaaaatgtattcctggttcaatcaagttggacagtgaagaagatatgccatttgaagactgcacaaatgatcctgagtcagaacatgacctgttgcttaatggctgtttgaaatcactggcttttgattctgaacattctgcagatgagaaggaaaagccttgcgctaaatctcgagccagaaagagctctgataatccaaaaaggactagtgtgaaaaagggccacatacaatttgaagcacataaagatgaacggaggggaaagattccagagaaccttggcctaaactttatctctggggatatatctgatacgcaggcctctaatgaactttccaggatagcaaatagcctcacagggtccaacactgccccaggaagttttctgttttcttcctgtggaaaaaacactgcaaagaaagaatttgagacttcaaatggtgactctttattgggcttgcctgagggtgctttgatctcaaagtgttctcgagagaagaataaaccccaacgaagcctggtgtgtggttcaaaagtgaagctctgctatattggagcaggtgatgaggaaaagcgaagtgattccattagtatctgtaccacttctgatgatggaagcagtgacctggatcccatagaacacagctcagagtctgataacagtgtccttgaaattccagatgctttcgatagaacagagaacatgttatctatgcagaaaaatgaaaagataaagtattctaggtttgctgccacaaacactagggtaaaagcaaaacagaagcctctcattagtaactcacatacagaccacttaatgggttgtactaagagtgcagagcctggaaccgagacgtctcaggttaatctctctgatctgaaggcatctactcttgttcacaaaccccagtcagattttacaaatgatgctctctctccaaaattcaacctgtcatcaagcatatccagtgagaactcgttaataaagggtggggcagcaaatcaagctctattacattcgaaaagcaaacagcccaagttccgaagtataaagtgcaaacacaaagaaaatccagttatggcagaacccccagttataaatgaggagtgcagtttgaaatgctgctcttctgataccaaaggctctcctttggccagcatttctaaaagtgggaaagtggatggtctaaaactactgaacaatatgcatgagaaaaccagggattcaagtgacatagaaacagcagtggtgaaacatgttttatccgagttgaaggaactctcttacagatccttaggtgaggatgtcagtgactctggaacatcaaagccatcaaaaccattacttttctcttctgcttctagtcagaatcacatacctattgaaccagactacaaattcagtacattgctaatgatgttgaaagatatgcatgatagtaagacgaaggagcagcggttgatgactgctcaaaacctggtctcttaccggagtcctggtcgtggggactgttctactaatagtcctgtaggagtctctaaggttttggtttcaggaggctccacacacaattcagagaaaaagggagatggcactcagaactccgccaatcctagccctagtgggggtgactctgcattatctggcgagttgtctgcttccctacctggcttactgtccgacaagagagacctccctgcttctggtaaaagtcgttcagactgtgttactaggcgcaactgtggacgatcaaagccttcatccaaattgcgagatgctttttcagcccaaatggtaaagaacacagtgaaccgtaaagccttaaagaccgagcgcaaaagaaaactgaatcagcttccaagtgtgactcttgatgctgtactgcagggagaccgagaacgtggaggttcattgagaggtggggcagaagatcctagtaaagaggatccccttcagataatgggccacttaacaagtgaagatggtgaccatttttctgatgtgcatttcgatagcaaggttaagcaatctgatcctggtaaaatttctgaaaaaggactctcttttgaaaacggaaaaggcccagagctggactctgtaatgaacagtgagaatgatgaactcaatggtgtaaatcaagtggtgcctaaaaagcggtggcagcgtttaaaccaaaggcgcactaaacctcgtaagcgcatgaacagatttaaagagaaagaaaactctgagtgtgcctttagggtcttacttcctagtgaccctgtgcaggaggggcgggatgagtttccagagcatagaactccttcagcaagcatacttgaggaaccactgacagagcaaaatcatgctgactgcttagattcagctgggccacggttaaatgtttgtgataaatccagtgccagcattggtgacatggaaaaggagccaggaattcccagtttgacaccacaggctgagctccctgaaccagctgtgcggtcagagaagaaacgccttaggaagccaagcaagtggcttttggaatatacagaagaatatgatcagatatttgctcctaagaaaaaacaaaagaaggtacaggagcaggtgcacaaggtaagttcccgctgtgaagaggaaagccttctagcccgaggtcgatctagtgctcagaacaagcaggtggacgagaattctttgatttcaaccaaagaagagcctccagttcttgaaagggaggctccgtttttggagggccccttggctcagtcagaacttggaggtggacatgctgagttgccgcagctgaccttgtctgtgcctgtggctccggaagtctctccacggcctgcccttgagtctgaggaattgctagttaaaacgccaggaaattatgaaagtaaacgtcaaagaaaaccaactaagaaacttcttgaatccaatgatttagaccctggatttatgcccaagaagggggaccttggcctttctaaaaagtgctatgaagctggtcacctggagaatggcataactgaatcttgtgccacatcttattcaaaagattttggtggaggcactaccaagatatttgacaagccaaggaagcgaaaacgacagaggcatgctgcagccaagatgcagtgtaaaaaagtgaaaaatgatgactcgtcaaaagagattccaggctcagagggagaactaatgcctcacaggacggccacaagccccaaggagactgttgaggaaggtgtagaacacgatcccgggatgcctgcctctaaaaaaatgcagggtgaacgcggtggaggagctgcactcaaggagaatgtctgtcagaattgtgaaaaattgggtgagctgctgttatgtgaggctcagtgctgtggggctttccacctggagtgccttggattgactgagatgccaagaggaaaatttatctgcaatgaatgtcgcacaggaatccatacctgttttgtatgtaagcagagtggggaagatgttaaaaggtgccttctacccttgtgtggaaagttttaccatgaagagtgtgtccagaagtacccacccactgttatgcagaacaagggcttccggtgctccctccacatctgtataacctgtcatgctgctaatccagccaatgtttctgcatctaaaggtcggttgatgcgctgtgtccgctgtcctgtggcataccacgccaatgacttttgcctggctgctgggtcaaagatccttgcatctaatagtatcatctgccctaatcactttacccctaggcggggctgccgaaatcatgagcatgttaatgttagctggtgctttgtgtgctcagaaggaggcagccttctgtgctgtgattcttgccctgctgcttttcatcgtgaatgcctgaacattgatatccctgaaggaaactggtattgcaatgactgtaaagcaggcaaaaagccacactacagggagattgtctgggtaaaagttggacgatacaggtggtggccagctgagatctgccatcctcgagctgttccttccaacattgataagatgagacatgatgtgggagagttcccagtcctcttttttggatctaatgactatttgtggactcaccaggcccgagtcttcccttacatggagggtgacgtgagcagcaaggataagatgggcaaaggagtggatgggacatataaaaaagtggagcacatgatccagaagaaccaatgtctcttcaccaacacccagtgtaaggtttgctgcgccttgcttatttctgagtcccagaagctggcacattaccagagcagcagaagcaaagacaagaaccagtgctgccccatctgtaacatgaccttttcctcccctgtcgtggcccagtcgcactacctggggaagacccacgcaaagaacttaaagctgaagcagcagtccactaaggtggaagccttgcaccagaatagagagatgatagacccagacaagttctgcagcctctgccatgcaactttcaacgaccctgtcatggctcaacaacattatgtgggcaagaaacacagaaaacaggagaccaagctcaaactaatggcacgctatgggcggctggcggaccctgctgtcactgactttccagctggaaagggctacccctgcaaaacatgtaagatagtgctgaactccatagaacagtaccaagctcatgtcagcggcttcaaacacaagaaccagtcaccaaaaacagtggcatcatccctgggccagattccaatgcaaaggcaacccattcagaaagactcaaccaccttggaagactag

SEQ ID NO: 28 - DNA, 4668 bp, Homo sapiens
atgcccctgaagacaaggacagccctttcggatgatccagattccagtaccagtacattaggaaacatgctagaattacctggaacttcatcatcatctacttcacaggaattgccattttgtcaacctaagaaaaagtctacgccactgaagtatgaagttggagatctcatctgggcaaaattcaagagacgcccatggtggccctgcaggatttgttctgatccgttgattaacacacattcaaaaatgaaagtttccaaccggaggccctatcggcagtactacgtggaggcttttggagatccttctgagagagcctgggtggctggaaaagcaatcgtcatgtttgaaggcagacatcaattcgaagagctacctgtccttaggagaagagggaaacagaaagaaaaaggatataggcataaggttcctcagaaaattttgagtaaatgggaagccagtgttggacttgcagaacagtatgatgttcccaaggggtcaaagaaccgaaaatgtattcctggttcaatcaagttggacagtgaagaagatatgccatttgaagactgcacaaatgatcctgagtcagaacatgacctgttgcttaatggctgtttgaaatcactggcttttgattctgaacattctgcagatgagaaggaaaagccttgcgctaaatctcgagccagaaagagctctgataatccaaaaaggactagtgtgaaaaagggccacatacaatttgaagcacataaagatgaacggaggggaaagattccagagaaccttggcctaaactttatctctggggatatatctgatacgcaggcctctaatgaactttccaggatagcaaatagcctcacagggtccaacactgccccaggaagttttctgttttcttcctgtggaaaaaacactgcaaagaaagaatttgagacttcaaatggtgactctttattgggcttgcctgagggtgctttgatctcaaagtgttctcgagagaagaataaaccccaacgaagcctggtgtgtggttcaaaagtgaagctctgctatattggagcaggtgatgaggaaaagcgaagtgattccattagtatctgtaccacttctgatgatggaagcagtgacctggatcccatagaacacagctcagagtctgataacagtgtccttgaaattccagatgctttcgatagaacagagaacatgttatctatgcagaaaaatgaaaagataaagtattctaggtttgctgccacaaacactagggtaaaagcaaaacagaagcctctcattagtaactcacatacagaccacttaatgggttgtactaagagtgcagagcctggaaccgagacgtctcaggttaatctctctgatctgaaggcatctactcttgttcacaaaccccagtcagattttacaaatgatgctctctctccaaaattcaacctgtcatcaagcatatccagtgagaactcgttaataaagggtggggcagcaaatcaagctctattacattcgaaaagcaaacagcccaagttccgaagtataaagtgcaaacacaaagaaaatccagttatggcagaacccccagttataaatgaggagtgcagtttgaaatgctgctcttctgataccaaaggctctcctttggccagcatttctaaaagtgggaaagtggatggtctaaaactactgaacaatatgcatgagaaaaccagggattcaagtgacatagaaacagcagtggtgaaacatgttttatccgagttgaaggaactctcttacagatccttaggtgaggatgtcagtgactctggaacatcaaagccatcaaaaccattacttttctcttctgcttctagtcagaatcacatacctattgaaccagactacaaattcagtacattgctaatgatgttgaaagatatgcatgatagtaagacgaaggagcagcggttgatgactgctcaaaacctggtctcttaccggagtcctggtcgtggggactgttctactaatagtcctgtaggagtctctaaggttttggtttcaggaggctccacacacaattcagagaaaaagggagatggcactcagaactccgccaatcctagccctagtgggggtgactctgcattatctggcgagttgtctgcttccctacctggcttactgtccgacaagagagacctccctgcttctggtaaaagtcgttcagactgtgttactaggcgcaactgtggacgatcaaagccttcatccaaattgcgagatgctttttcagcccaaatggtaaagaacacagtgaaccgtaaagccttaaagaccgagcgcaaaagaaaactgaatcagcttccaagtgtgactcttgatgctgtactgcagggagaccgagaacgtggaggttcattgagaggtggggcagaagatcctagtaaagaggatccccttcagataatgggccacttaacaagtgaagatggtgaccatttttctgatgtgcatttcgatagcaaggttaagcaatctgatcctggtaaaatttctgaaaaaggactctcttttgaaaacggaaaaggcccagagctggactctgtaatgaacagtgagaatgatgaactcaatggtgtaaatcaagtggtgcctaaaaagcggtggcagcgtttaaaccaaaggcgcactaaacctcgtaagcgcatgaacagatttaaagagaaagaaaactctgagtgtgcctttagggtcttacttcctagtgaccctgtgcaggaggggcgggatgagtttccagagcatagaactccttcagcaagcatacttgaggaaccactgacagagcaaaatcatgctgactgcttagattcagctgggccacggttaaatgtttgtgataaatccagtgccagcattggtgacatggaaaaggagccaggaattcccagtttgacaccacaggctgagctccctgaaccagctgtgcggtcagagaagaaacgccttaggaagccaagcaagtggcttttggaatatacagaagaatatgatcagatatttgctcctaagaaaaaacaaaagaaggtacaggagcaggtgcacaaggtaagttcccgctgtgaagaggaaagccttctagcccgaggtcgatctagtgctcagaacaagcaggtggacgagaattctttgatttcaaccaaagaagagcctccagttcttgaaagggaggctccgtttttggagggccccttggctcagtcagaacttggaggtggacatgctgagttgccgcagctgaccttgtctgtgcctgtggctccggaagtctctccacggcctgcccttgagtctgaggaattgctagttaaaacgccaggaaattatgaaagtaaacgtcaaagaaaaccaactaagaaacttcttgaatccaatgatttagaccctggatttatgcccaagaagggggaccttggcctttctaaaaagtgctatgaagctggtcacctggagaatggcataactgaatcttgtgccacatcttattcaaaagattttggtggaggcactaccaagatatttgacaagccaaggaagcgaaaacgacagaggcatgctgcagccaagatgcagtgtaaaaaagtgaaaaatgatgactcgtcaaaagagattccaggctcagagggagaactaatgcctcacaggacggccacaagccccaaggagactgttgaggaaggtgtagaacacgatcccgggatgcctgcctctaaaaaaatgcagggtgaacgcggtggaggagctgcactcaaggagaatgtctgtcagaattgtgaaaaattgggtgagctgctgttatgtgaggctcagtgctgtggggctttccacctggagtgccttggattgactgagatgccaagaggaaaatttatctgcaatgaatgtcgcacagtggagcacatgatccagaagaaccaatgtctcttcaccaacacccagtgtaaggtttgctgcgccttgcttatttctgagtcccagaagctggcacattaccagagcaaaaaacatgccaacaaagtgaagagatacctagcaatccatggaatggagacattaaagggggaaacgaagaagctagactcagatcagaagagcagcagaagcaaagacaagaaccagtgctgccccatctgtaacatgaccttttcctcccctgtcgtggcccagtcgcactacctggggaagacccacgcaaagaacttaaagctgaagcagcagtccactaaggtggaagccttgcaccagaatagagagatgatagacccagacaagttctgcagcctctgccatgcaactttcaacgaccctgtcatggctcaacaacattatgtgggcaagaaacacagaaaacaggagaccaagctcaaactaatggcacgctatgggcggctggcggaccctgctgtcactgactttccagctggaaagggctacccctgcaaaacatgtaagatagtgctgaactccatagaacagtaccaagctcatgtcagcggcttcaaacacaagaaccagtcaccaaaaacagtggcatcatccctgggccagattccaatgcaaaggcaacccattcagaaagactcaaccaccttggaagactag

SEQ ID NO: 29 - DNA, 5316 bp, Homo sapiens
atgcccctgaagacaaggacagccctttcggatgatccagattccagtaccagtacattaggaaacatgctagaattacctggaacttcatcatcatctacttcacaggaattgccattttgtcaacctaagaaaaagtctacgccactgaagtatgaagttggagatctcatctgggcaaaattcaagagacgcccatggtggccctgcaggatttgttctgatccgttgattaacacacattcaaaaatgaaagtttccaaccggaggccctatcggcagtactacgtggaggcttttggagatccttctgagagagcctgggtggctggaaaagcaatcgtcatgtttgaaggcagacatcaattcgaagagctacctgtccttaggagaagagggaaacagaaagaaaaaggatataggcataaggttcctcagaaaattttgagtaaatgggaagccagtgttggacttgcagaacagtatgatgttcccaaggggtcaaagaaccgaaaatgtattcctggttcaatcaagttggacagtgaagaagatatgccatttgaagactgcacaaatgatcctgagtcagaacatgacctgttgcttaatggctgtttgaaatcactggcttttgattctgaacattctgcagatgagaaggaaaagccttgcgctaaatctcgagccagaaagagctctgataatccaaaaaggactagtgtgaaaaagggccacatacaatttgaagcacataaagatgaacggaggggaaagattccagagaaccttggcctaaactttatctctggggatatatctgatacgcaggcctctaatgaactttccaggatagcaaatagcctcacagggtccaacactgccccaggaagttttctgttttcttcctgtggaaaaaacactgcaaagaaagaatttgagacttcaaatggtgactctttattgggcttgcctgagggtgctttgatctcaaagtgttctcgagagaagaataaaccccaacgaagcctggtgtgtggttcaaaagtgaagctctgctatattggagcaggtgatgaggaaaagcgaagtgattccattagtatctgtaccacttctgatgatggaagcagtgacctggatcccatagaacacagctcagagtctgataacagtgtccttgaaattccagatgctttcgatagaacagagaacatgttatctatgcagaaaaatgaaaagataaagtattctaggtttgctgccacaaacactagggtaaaagcaaaacagaagcctctcattagtaactcacatacagaccacttaatgggttgtactaagagtgcagagcctggaaccgagacgtctcaggttaatctctctgatctgaaggcatctactcttgttcacaaaccccagtcagattttacaaatgatgctctctctccaaaattcaacctgtcatcaagcatatccagtgagaactcgttaataaagggtggggcagcaaatcaagctctattacattcgaaaagcaaacagcccaagttccgaagtataaagtgcaaacacaaagaaaatccagttatggcagaacccccagttataaatgaggagtgcagtttgaaatgctgctcttctgataccaaaggctctcctttggccagcatttctaaaagtgggaaagtggatggtctaaaactactgaacaatatgcatgagaaaaccagggattcaagtgacatagaaacagcagtggtgaaacatgttttatccgagttgaaggaactctcttacagatccttaggtgaggatgtcagtgactctggaacatcaaagccatcaaaaccattacttttctcttctgcttctagtcagaatcacatacctattgaaccagactacaaattcagtacattgctaatgatgttgaaagatatgcatgatagtaagacgaaggagcagcggttgatgactgctcaaaacctggtctcttaccggagtcctggtcgtggggactgttctactaatagtcctgtaggagtctctaaggttttggtttcaggaggctccacacacaattcagagaaaaagggagatggcactcagaactccgccaatcctagccctagtgggggtgactctgcattatctggcgagttgtctgcttccctacctggcttactgtccgacaagagagacctccctgcttctggtaaaagtcgttcagactgtgttactaggcgcaactgtggacgatcaaagccttcatccaaattgcgagatgctttttcagcccaaatggtaaagaacacagtgaaccgtaaagccttaaagaccgagcgcaaaagaaaactgaatcagcttccaagtgtgactcttgatgctgtactgcagggagaccgagaacgtggaggttcattgagaggtggggcagaagatcctagtaaagaggatccccttcagataatgggccacttaacaagtgaagatggtgaccatttttctgatgtgcatttcgatagcaaggttaagcaatctgatcctggtaaaatttctgaaaaaggactctcttttgaaaacggaaaaggcccagagctggactctgtaatgaacagtgagaatgatgaactcaatggtgtaaatcaagtggtgcctaaaaagcggtggcagcgtttaaaccaaaggcgcactaaacctcgtaagcgcatgaacagatttaaagagaaagaaaactctgagtgtgcctttagggtcttacttcctagtgaccctgtgcaggaggggcgggatgagtttccagagcatagaactccttcagcaagcatacttgaggaaccactgacagagcaaaatcatgctgactgcttagattcagctgggccacggttaaatgtttgtgataaatccagtgccagcattggtgacatggaaaaggagccaggaattcccagtttgacaccacaggctgagctccctgaaccagctgtgcggtcagagaagaaacgccttaggaagccaagcaagtggcttttggaatatacagaagaatatgatcagatatttgctcctaagaaaaaacaaaagaaggtacaggagcaggtgcacaaggtaagttcccgctgtgaagaggaaagccttctagcccgaggtcgatctagtgctcagaacaagcaggtggacgagaattctttgatttcaaccaaagaagagcctccagttcttgaaagggaggctccgtttttggagggccccttggctcagtcagaacttggaggtggacatgctgagttgccgcagctgaccttgtctgtgcctgtggctccggaagtctctccacggcctgcccttgagtctgaggaattgctagttaaaacgccaggaaattatgaaagtaaacgtcaaagaaaaccaactaagaaacttcttgaatccaatgatttagaccctggatttatgcccaagaagggggaccttggcctttctaaaaagtgctatgaagctggtcacctggagaatggcataactgaatcttgtgccacatcttattcaaaagattttggtggaggcactaccaagatatttgacaagccaaggaagcgaaaacgacagaggcatgctgcagccaagatgcagtgtaaaaaagtgaaaaatgatgactcgtcaaaagagattccaggctcagagggagaactaatgcctcacaggacggccacaagccccaaggagactgttgaggaaggtgtagaacacgatcccgggatgcctgcctctaaaaaaatgcagggtgaacgcggtggaggagctgcactcaaggagaatgtctgtcagaattgtgaaaaattgggtgagctgctgttatgtgaggctcagtgctgtggggctttccacctggagtgccttggattgactgagatgccaagaggaaaatttatctgcaatgaatgtcgcacaggaatccatacctgttttgtatgtaagcagagtggggaagatgttaaaaggtgccttctacccttgtgtggaaagttttaccatgaagagtgtgtccagaagtacccacccactgttatgcagaacaagggcttccggtgctccctccacatctgtataacctgtcatgctgctaatccagccaatgtttctgcatctaaaggtcggttgatgcgctgtgtccgctgtcctgtggcataccacgccaatgacttttgcctggctgctgggtcaaagatccttgcatctaatagtatcatctgccctaatcactttacccctaggcggggctgccgaaatcatgagcatgttaatgttagctggtgctttgtgtgctcagaaggaggcagccttctgtgctgtgattcttgccctgctgcttttcatcgtgaatgcctgaacattgatatccctgaaggaaactggtattgcaatgactgtaaagcaggcaaaaagccacactacagggagattgtctgggtaaaagttggacgatacaggtggtggccagctgagatctgccatcctcgagctgttccttccaacattgataagatgagacatgatgtgggagagttcccagtcctcttttttggatctaatgactatttgtggactcaccaggcccgagtcttcccttacatggagggtgacgtgagcagcaaggataagatgggcaaaggagtggatgggacatataaaaaagtggagcacatgatccagaagaaccaatgtctcttcaccaacacccagtgtaaggtttgctgcgccttgcttatttctgagtcccagaagctggcacattaccagagcagcagaagcaaagacaagaaccagtgctgccccatctgtaacatgaccttttcctcccctgtcgtggcccagtcgcactacctggggaagacccacgcaaagaacttaaagctgaagcagcagtccactaaggtggaagccttgcaccagaatagagagatgatagacccagacaagttctgcagcctctgccatgcaactttcaacgaccctgtcatggctcaacaacattatgtgggcaagaaacacagaaaacaggagaccaagctcaaactaatggcacgctatgggcggctggcggaccctgctgtcactgactttccagctggaaagggctacccctgcaaaacatgtaagatagtgctgaactccatagaacagtaccaagctcatgtcagcggcttcaaacacaagaaccagtcaccaaaaacagtggcatcatccctgggccagattccaatgcaaaggcaacccattcagaaagactcaaccaccttggaagactag

SEQ ID NO: 30 - DNA, 4197 bp, Homo sapiens
atggatcagacctgtgaactacccagaagaaattgtctgctgcccttttccaatccagtgaatttagatgcccctgaagacaaggacagccctttcggtaatggtcaatccaatttttctgagccacttaatgggtgtactatgcagttatcgactgtcagtggaacatcccaaaatgcttatggacaagattctccatcttgttacattccactgcggagactacaggatttggcctccatgatcaatgtagagtatttaaatgggtctgctgatggatcagaatcctttcaagaccctgaaaaaagtgattcaagagctcagacgccaattgtttgcacttccttgagtcctggtggtcctacagcacttgctatgaaacaggaaccctcttgtaataactcccctgaactccaggtaaaagtaacaaagactatcaagaatggctttctgcactttgagaattttacttgtgtggacgatgcagatgtagattctgaaatggacccagaacagccagtcacagaggatgagagtatagaggagatctttgaggaaactcagaccaatgccacctgcaattatgagactaaatcagagaatggtgtaaaagtggccatgggaagtgaacaagacagcacaccagagagtagacacggtgcagtcaaatcgccattcttgccattagctcctcagactgaaacacagaaaaataagcaaagaaatgaagtggacggcagcaatgaaaaagcagcccttctcccagcccccttttcactaggagacacaaacattacaatagaagagcaattaaactcaataaatttatcttttcaggatgatccagattccagtaccagtacattaggaaacatgctagaattacctggaacttcatcatcatctacttcacaggaattgccatttgttcctcagaaaattttgagtaaatgggaagccagtgttggacttgcagaacagtatgatgttcccaaggggtcaaagaaccgaaaatgtattcctggttcaatcaagttggacagtgaagaagatatgccatttgaagactgcacaaatgatcctgagtcagaacatgacctgttgcttaatggctgtttgaaatcactggcttttgattctgaacattctgcagatgagaaggaaaagccttgcgctaaatctcgagccagaaagagctctgataatccaaaaaggactagtgtgaaaaagggccacatacaatttgaagcacataaagatgaacggaggggaaagattccagagaaccttggcctaaactttatctctggggatatatctgatacgcaggcctctaatgaactttccaggatagcaaatagcctcacagggtccaacactgccccaggaagttttctgttttcttcctgtggaaaaaacactgcaaagaaagaatttgagacttcaaatggtgactctttattgggcttgcctgagggtgctttgatctcaaagtgttctcgagagaagaataaaccccaacgaagcctggtgtgtggttcaaaagtgaagctctgctatattggagcaggtgatgaggaaaagcgaagtgattccattagtatctgtaccacttctgatgatggaagcagtgacctggatcccatagaacacagctcagagtctgataacagtgtccttgaaattccagatgctttcgatagaacagagaacatgttatctatgcagaaaaatgaaaagataaagtattctaggtttgctgccacaaacactagggtaaaagcaaaacagaagcctctcattagtaactcacatacagaccacttaatgggttgtactaagagtgcagagcctggaaccgagacgtctcaggttaatctctctgatctgaaggcatctactcttgttcacaaaccccagtcagattttacaaatgatgctctctctccaaaattcaacctgtcatcaagcatatccagtgagaactcgttaataaagggtggggcagcaaatcaagctctattacattcgaaaagcaaacagcccaagttccgaagtataaagtgcaaacacaaagaaaatccagttatggcagaacccccagttataaatgaggagtgcagtttgaaatgctgctcttctgataccaaaggctctcctttggccagcatttctaaaagtgggaaagtggatggtctaaaactactgaacaatatgcatgagaaaaccagggattcaagtgacatagaaacagcagtggtgaaacatgttttatccgagttgaaggaactctcttacagatccttaggtgaggatgtcagtgactctggaacatcaaagccatcaaaaccattacttttctcttctgcttctagtcagaatcacatacctattgaaccagactacaaattcagtacattgctaatgatgttgaaagatatgcatgatagtaagacgaaggagcagcggttgatgactgctcaaaacctggtctcttaccggagtcctggtcgtggggactgttctactaatagtcctgtaggagtctctaaggttttggtttcaggaggctccacacacaattcagagaaaaagggagatggcactcagaactccgccaatcctagccctagtgggggtgactctgcattatctggcgagttgtctgcttccctacctggcttactgtccgacaagagagacctccctgcttctggtaaaagtcgttcagactgtgttactaggcgcaactgtggacgatcaaagccttcatccaaattgcgagatgctttttcagcccaaatggtaaagaacacagtgaaccgtaaagccttaaagaccgagcgcaaaagaaaactgaatcagcttccaagtgtgactcttgatgctgtactgcagggagaccgagaacgtggaggttcattgagaggtggggcagaagatcctagtaaagaggatccccttcagataatgggccacttaacaagtgaagatggtgaccatttttctgatgtgcatttcgatagcaaggttaagcaatctgatcctggtaaaatttctgaaaaaggactctcttttgaaaacggaaaaggcccagagctggactctgtaatgaacagtgagaatgatgaactcaatggtgtaaatcaagtggtgcctaaaaagcggtggcagcgtttaaaccaaaggcgcactaaacctcgtaagcgcatgaacagatttaaagagaaagaaaactctgagtgtgcctttagggtcttacttcctagtgaccctgtgcaggaggggcgggatgagtttccagagcatagaactccttcagcaagcatacttgaggaaccactgacagagcaaaatcatgctgactgcttagattcagctgggccacggttaaatgtttgtgataaatccagtgccagcattggtgacatggaaaaggagccaggaattcccagtttgacaccacaggctgagctccctgaaccagtggagcacatgatccagaagaaccaatgtctcttcaccaacacccagtgtaaggtttgctgcgccttgcttatttctgagtcccagaagctggcacattaccagagcaaaaaacatgccaacaaagtgaagagatacctagcaatccatggaatggagacattaaagggggaaacgaagaagctagactcagatcagaagagcagcagaagcaaagacaagaaccagtgctgccccatctgtaacatgaccttttcctcccctgtcgtggcccagtcgcactacctggggaagacccacgcaaagaacttaaagctgaagcagcagtccactaaggtggaagccttgcaccagaatagagagatgatagacccagacaagttctgcagcctctgccatgcaactttcaacgaccctgtcatggctcaacaacattatgtgggcaagaaacacagaaaacaggagaccaagctcaaactaatggcacgctatgggcggctggcggaccctgctgtcactgactttccagctggaaagggctacccctgcaaaacatgtaagatagtgctgaactccatagaacagtaccaagctcatgtcagcggcttcaaacacaagaaccagtcaccaaaaacagtggcatcatccctgggccagattccaatgcaaaggcaacccattcagaaagactcaaccaccttggaagactag

SEQ ID NO: 31 - DNA, 189 bp, Homo sapiens
atgaaagctggaaagggctacccctgcaaaacatgtaagatagtgctgaactccatagaacagtaccaagctcatgtcagcggcttcaaacacaagaaccagtcaccaaaaacagtggcatcatccctgggccagattccaatgcaaaggcaacccattcagaaagactcaaccaccttggaagactag

SEQ ID NO: 32 - DNA, 1773 bp, Homo sapiens
atggatcagacctgtgaactacccagaagaaattgtctgctgcccttttccaatccagtgaatttagatgcccctgaagacaaggacagccctttcggtaatggtcaatccaatttttctgagccacttaatgggtgtactatgcagttatcgactgtcagtggaacatcccaaaatgcttatggacaagattctccatcttgttacattccactgcggagactacaggatttggcctccatgatcaatgtagagtatttaaatgggtctgctgatggatcagaatcctttcaagaccctgaaaaaagtgattcaagagctcagacgccaattgtttgcacttccttgagtcctggtggtcctacagcacttgctatgaaacaggaaccctcttgtaataactcccctgaactccaggtaaaagtaacaaagactatcaagaatggctttctgcactttgagaattttacttgtgtggacgatgcagatgtagattctgaaatggacccagaacagccagtcacagaggatgagagtatagaggagatctttgaggaaactcagaccaatgccacctgcaattatgagactaaatcagagaatggtgtaaaagtggccatgggaagtgaacaagacagcacaccagagagtagacacggtgcagtcaaatcgccattcttgccattagctcctcagactgaaacacagaaaaataagcaaagaaatgaagtggacggcagcaatgaaaaagcagcccttctcccagcccccttttcactaggagacacaaacattacaatagaagagcaattaaactcaataaatttatcttttcaggatgatccagattccagtaccagtacattaggaaacatgctagaattacctggaacttcatcatcatctacttcacaggaattgccattttgtcaacctaagaaaaagtctacgccactgaagtatgaagttggagatctcatctgggcaaaattcaagagacgcccatggtggccctgcaggatttgttctgatccgttgattaacacacattcaaaaatgaaagtggagcacatgatccagaagaaccaatgtctcttcaccaacacccagtgtaaggtttgctgcgccttgcttatttctgagtcccagaagctggcacattaccagagcaaaaaacatgccaacaaagtgaagagatacctagcaatccatggaatggagacattaaagggggaaacgaagaagctagactcagatcagaagagcagcagaagcaaagacaagaaccagtgctgccccatctgtaacatgaccttttcctcccctgtcgtggcccagtcgcactacctggggaagacccacgcaaagaacttaaagctgaagcagcagtccactaaggtggaagccttgcaccagaatagagagatgatagacccagacaagttctgcagcctctgccatgcaactttcaacgaccctgtcatggctcaacaacattatgtgggcaagaaacacagaaaacaggagaccaagctcaaactaatggcacgctatgggcggctggcggaccctgctgtcactgactttccagctggaaagggctacccctgcaaaacatgtaagatagtgctgaactccatagaacagtaccaagctcatgtcagcggcttcaaacacaagaaccagtcaccaaaaacagtggcatcatccctgggccagattccaatgcaaaggcaacccattcagaaagactcaaccaccttggaagactag

SEQ ID NO: 33 - DNA, 3354 bp, Homo sapiens
atgaaagtttccaaccggaggccctatcggcagtactacgtggaggcttttggagatccttctgagagagcctgggtggctggaaaagcaatcgtcatgtttgaaggcagacatcaattcgaagagctacctgtccttaggagaagagggaaacagaaagaaaaaggatataggcataaggttcctcagaaaattttgagtaaatgggaagccagtgttggacttgcagaacagtatgatgttcccaaggggtcaaagaaccgaaaatgtattcctggttcaatcaagttggacagtgaagaagatatgccatttgaagactgcacaaatgatcctgagtcagaacatgacctgttgcttaatggctgtttgaaatcactggcttttgattctgaacattctgcagatgagaaggaaaagccttgcgctaaatctcgagccagaaagagctctgataatccaaaaaggactagtgtgaaaaagggccacatacaatttgaagcacataaagatgaacggaggggaaagattccagagaaccttggcctaaactttatctctggggatatatctgatacgcaggcctctaatgaactttccaggatagcaaatagcctcacagggtccaacactgccccaggaagttttctgttttcttcctgtggaaaaaacactgcaaagaaagaatttgagacttcaaatggtgactctttattgggcttgcctgagggtgctttgatctcaaagtgttctcgagagaagaataaaccccaacgaagcctggtgtgtggttcaaaagtgaagctctgctatattggagcaggtgatgaggaaaagcgaagtgattccattagtatctgtaccacttctgatgatggaagcagtgacctggatcccatagaacacagctcagagtctgataacagtgtccttgaaattccagatgctttcgatagaacagagaacatgttatctatgcagaaaaatgaaaagataaagtattctaggtttgctgccacaaacactagggtaaaagcaaaacagaagcctctcattagtaactcacatacagaccacttaatgggttgtactaagagtgcagagcctggaaccgagacgtctcaggttaatctctctgatctgaaggcatctactcttgttcacaaaccccagtcagattttacaaatgatgctctctctccaaaattcaacctgtcatcaagcatatccagtgagaactcgttaataaagggtggggcagcaaatcaagctctattacattcgaaaagcaaacagcccaagttccgaagtataaagtgcaaacacaaagaaaatccagttatggcagaacccccagttataaatgaggagtgcagtttgaaatgctgctcttctgataccaaaggctctcctttggccagcatttctaaaagtgggaaagtggatggtctaaaactactgaacaatatgcatgagaaaaccagggattcaagtgacatagaaacagcagtggtgaaacatgttttatccgagttgaaggaactctcttacagatccttaggtgaggatgtcagtgactctggaacatcaaagccatcaaaaccattacttttctcttctgcttctagtcagaatcacatacctattgaaccagactacaaattcagtacattgctaatgatgttgaaagatatgcatgatagtaagacgaaggagcagcggttgatgactgctcaaaacctggtctcttaccggagtcctggtcgtggggactgttctactaatagtcctgtaggagtctctaaggttttggtttcaggaggctccacacacaattcagagaaaaagggagatggcactcagaactccgccaatcctagccctagtgggggtgactctgcattatctggcgagttgtctgcttccctacctggcttactgtccgacaagagagacctccctgcttctggtaaaagtcgttcagactgtgttactaggcgcaactgtggacgatcaaagccttcatccaaattgcgagatgctttttcagcccaaatggtaaagaacacagtgaaccgtaaagccttaaagaccgagcgcaaaagaaaactgaatcagcttccaagtgtgactcttgatgctgtactgcagggagaccgagaacgtggaggttcattgagaggtggggcagaagatcctagtaaagaggatccccttcagataatgggccacttaacaagtgaagatggtgaccatttttctgatgtgcatttcgatagcaaggttaagcaatctgatcctggtaaaatttctgaaaaaggactctcttttgaaaacggaaaaggcccagagctggactctgtaatgaacagtgagaatgatgaactcaatggtgtaaatcaagtggtgcctaaaaagcggtggcagcgtttaaaccaaaggcgcactaaacctcgtaagcgcatgaacagatttaaagagaaagaaaactctgagtgtgcctttagggtcttacttcctagtgaccctgtgcaggaggggcgggatgagtttccagagcatagaactccttcagcaagcatacttgaggaaccactgacagagcaaaatcatgctgactgcttagattcagctgggccacggttaaatgtttgtgataaatccagtgccagcattggtgacatggaaaaggagccaggaattcccagtttgacaccacaggctgagctccctgaaccagtggagcacatgatccagaagaaccaatgtctcttcaccaacacccagtgtaaggtttgctgcgccttgcttatttctgagtcccagaagctggcacattaccagagcagcagaagcaaagacaagaaccagtgctgccccatctgtaacatgaccttttcctcccctgtcgtggcccagtcgcactacctggggaagacccacgcaaagaacttaaagctgaagcagcagtccactaaggtggaagccttgcaccagaatagagagatgatagacccagacaagttctgcagcctctgccatgcaactttcaacgaccctgtcatggctcaacaacattatgtgggcaagaaacacagaaaacaggagaccaagctcaaactaatggcacgctatgggcggctggcggaccctgctgtcactgactttccagctggaaagggctacccctgcaaaacatgtaagatagtgctgaactccatagaacagtaccaagctcatgtcagcggcttcaaacacaagaaccagtcaccaaaaacagtggcatcatccctgggccagattccaatgcaaaggcaacccattcagaaagactcaaccaccttggaagactag

SEQ ID NO: 34 - DNA, 5163 bp, Homo sapiens
atgaaagtttccaaccggaggccctatcggcagtactacgtggaggcttttggagatccttctgagagagcctgggtggctggaaaagcaatcgtcatgtttgaaggcagacatcaattcgaagagctacctgtccttaggagaagagggaaacagaaagaaaaaggatataggcataaggttcctcagaaaattttgagtaaatgggaagccagtgttggacttgcagaacagtatgatgttcccaaggggtcaaagaaccgaaaatgtattcctggttcaatcaagttggacagtgaagaagatatgccatttgaagactgcacaaatgatcctgagtcagaacatgacctgttgcttaatggctgtttgaaatcactggcttttgattctgaacattctgcagatgagaaggaaaagccttgcgctaaatctcgagccagaaagagctctgataatccaaaaaggactagtgtgaaaaagggccacatacaatttgaagcacataaagatgaacggaggggaaagattccagagaaccttggcctaaactttatctctggggatatatctgatacgcaggcctctaatgaactttccaggatagcaaatagcctcacagggtccaacactgccccaggaagttttctgttttcttcctgtggaaaaaacactgcaaagaaagaatttgagacttcaaatggtgactctttattgggcttgcctgagggtgctttgatctcaaagtgttctcgagagaagaataaaccccaacgaagcctggtgtgtggttcaaaagtgaagctctgctatattggagcaggtgatgaggaaaagcgaagtgattccattagtatctgtaccacttctgatgatggaagcagtgacctggatcccatagaacacagctcagagtctgataacagtgtccttgaaattccagatgctttcgatagaacagagaacatgttatctatgcagaaaaatgaaaagataaagtattctaggtttgctgccacaaacactagggtaaaagcaaaacagaagcctctcattagtaactcacatacagaccacttaatgggttgtactaagagtgcagagcctggaaccgagacgtctcaggttaatctctctgatctgaaggcatctactcttgttcacaaaccccagtcagattttacaaatgatgctctctctccaaaattcaacctgtcatcaagcatatccagtgagaactcgttaataaagggtggggcagcaaatcaagctctattacattcgaaaagcaaacagcccaagttccgaagtataaagtgcaaacacaaagaaaatccagttatggcagaacccccagttataaatgaggagtgcagtttgaaatgctgctcttctgataccaaaggctctcctttggccagcatttctaaaagtgggaaagtggatggtctaaaactactgaacaatatgcatgagaaaaccagggattcaagtgacatagaaacagcagtggtgaaacatgttttatccgagttgaaggaactctcttacagatccttaggtgaggatgtcagtgactctggaacatcaaagccatcaaaaccattacttttctcttctgcttctagtcagaatcacatacctattgaaccagactacaaattcagtacattgctaatgatgttgaaagatatgcatgatagtaagacgaaggagcagcggttgatgactgctcaaaacctggtctcttaccggagtcctggtcgtggggactgttctactaatagtcctgtaggagtctctaaggttttggtttcaggaggctccacacacaattcagagaaaaagggagatggcactcagaactccgccaatcctagccctagtgggggtgactctgcattatctggcgagttgtctgcttccctacctggcttactgtccgacaagagagacctccctgcttctggtaaaagtcgttcagactgtgttactaggcgcaactgtggacgatcaaagccttcatccaaattgcgagatgctttttcagcccaaatggtaaagaacacagtgaaccgtaaagccttaaagaccgagcgcaaaagaaaactgaatcagcttccaagtgtgactcttgatgctgtactgcagggagaccgagaacgtggaggttcattgagaggtggggcagaagatcctagtaaagaggatccccttcagataatgggccacttaacaagtgaagatggtgaccatttttctgatgtgcatttcgatagcaaggttaagcaatctgatcctggtaaaatttctgaaaaaggactctcttttgaaaacggaaaaggcccagagctggactctgtaatgaacagtgagaatgatgaactcaatggtgtaaatcaagtggtgcctaaaaagcggtggcagcgtttaaaccaaaggcgcactaaacctcgtaagcgcatgaacagatttaaagagaaagaaaactctgagtgtgcctttagggtcttacttcctagtgaccctgtgcaggaggggcgggatgagtttccagagcatagaactccttcagcaagcatacttgaggaaccactgacagagcaaaatcatgctgactgcttagattcagctgggccacggttaaatgtttgtgataaatccagtgccagcattggtgacatggaaaaggagccaggaattcccagtttgacaccacaggctgagctccctgaaccagctgtgcggtcagagaagaaacgccttaggaagccaagcaagtggcttttggaatatacagaagaatatgatcagatatttgctcctaagaaaaaacaaaagaaggtacaggagcaggtgcacaaggtaagttcccgctgtgaagaggaaagccttctagcccgaggtcgatctagtgctcagaacaagcaggtggacgagaattctttgatttcaaccaaagaagagcctccagttcttgaaagggaggctccgtttttggagggccccttggctcagtcagaacttggaggtggacatgctgagttgccgcagctgaccttgtctgtgcctgtggctccggaagtctctccacggcctgcccttgagtctgaggaattgctagttaaaacgccaggaaattatgaaagtaaacgtcaaagaaaaccaactaagaaacttcttgaatccaatgatttagaccctggatttatgcccaagaagggggaccttggcctttctaaaaagtgctatgaagctggtcacctggagaatggcataactgaatcttgtgccacatcttattcaaaagattttggtggaggcactaccaagatatttgacaagccaaggaagcgaaaacgacagaggcatgctgcagccaagatgcagtgtaaaaaagtgaaaaatgatgactcgtcaaaagagattccaggctcagagggagaactaatgcctcacaggacggccacaagccccaaggagactgttgaggaaggtgtagaacacgatcccgggatgcctgcctctaaaaaaatgcagggtgaacgcggtggaggagctgcactcaaggagaatgtctgtcagaattgtgaaaaattgggtgagctgctgttatgtgaggctcagtgctgtggggctttccacctggagtgccttggattgactgagatgccaagaggaaaatttatctgcaatgaatgtcgcacaggaatccatacctgttttgtatgtaagcagagtggggaagatgttaaaaggtgccttctacccttgtgtggaaagttttaccatgaagagtgtgtccagaagtacccacccactgttatgcagaacaagggcttccggtgctccctccacatctgtataacctgtcatgctgctaatccagccaatgtttctgcatctaaaggtcggttgatgcgctgtgtccgctgtcctgtggcataccacgccaatgacttttgcctggctgctgggtcaaagatccttgcatctaatagtatcatctgccctaatcactttacccctaggcggggctgccgaaatcatgagcatgttaatgttagctggtgctttgtgtgctcagaaggaggcagccttctgtgctgtgattcttgccctgctgcttttcatcgtgaatgcctgaacattgatatccctgaaggaaactggtattgcaatgactgtaaagcaggcaaaaagccacactacagggagattgtctgggtaaaagttggacgatacaggtggtggccagctgagatctgccatcctcgagctgttccttccaacattgataagatgagacatgatgtgggagagttcccagtcctcttttttggatctaatgactatttgtggactcaccaggcccgagtcttcccttacatggagggtgacgtgagcagcaaggataagatgggcaaaggagtggatgggacatataaaaaagtggagcacatgatccagaagaaccaatgtctcttcaccaacacccagtgtaaggtttgctgcgccttgcttatttctgagtcccagaagctggcacattaccagagcaaaaaacatgccaacaaagtgaagagatacctagcaatccatggaatggagacattaaagggggaaacgaagaagctagactcagatcagaagagcagcagaagcaaagacaagaaccagtgctgccccatctgtaacatgaccttttcctcccctgtcgtggcccagtcgcactacctggggaagacccacgcaaagaacttaaagctgaagcagcagtccactaaggtggaagccttgcaccagaatagagagatgatagacccagacaagttctgcagcctctgccatgcaactttcaacgaccctgtcatggctcaacaacattatgtgggcaagaaacacagaaaacaggagaccaagctcaaactaatggcacgctatgggcggctggcggaccctgctgtcactgactttccagctggaaagggctacccctgcaaaacatgtaagatagtgctgaactccatagaacagtaccaagctcatgtcagcggcttcaaacacaagaaccagtcaccaaaaacagtggcatcatccctgggccagattccaatgcaaaggcaacccattcagaaagactcaaccaccttggaagactag

SEQ ID NO: 35 - DNA, 438 bp, Homo sapiens
atgcccctgaagacaaggacagccctttcggatgatccagattccagtaccagtacattaggaaacatgctagaattacctggaacttcatcatcatctacttcacaggaattgccattttgtcaacctaagaaaaagtctacgccactgaagtatgaagttggagatctcatctgggcaaaattcaagagacgcccatggtggccctgcaggatttgttctgatccgttgattaacacacattcaaaaatgaaagctggaaagggctacccctgcaaaacatgtaagatagtgctgaactccatagaacagtaccaagctcatgtcagcggcttcaaacacaagaaccagtcaccaaaaacagtggcatcatccctgggccagattccaatgcaaaggcaacccattcagaaagactcaaccaccttggaagactag

SEQ ID NO: 36 - DNA, 1324 bp, Homo sapiens
atggatcagacctgtgaactacccagaagaaattgtctgctgcccttttccaatccagtgaatttagatgcccctgaagacaaggacagccctttcggtaatggtcaatccaatttttctgagccacttaatgggtgtactatgcagttatcgactgtcagtggaacatcccaaaatgcttatggacaagattctccatcttgttacattccactgcggagactacaggatttggcctccatgatcaatgtagagtatttaaatgggtctgctgatggatcagaatcctttcaagaccctgaaaaaagtgattcaagagctcagacgccaattgtttgcacttccttgagtcctggtggtcctacagcacttgctatgaaacaggaaccctcttgtaataactcccctgaactccaggtaaaagtaacaaagactatcaagaatggctttctgcactttgagaattttacttgtgtggacgatgcagatgtagattctgaaatggacccagaacagccagtcacagaggatgagagtatagaggagatctttgaggaaactcagaccaatgccacctgcaattatgagactaaatcagagaatggtgtaaaagtggccatgggaagtgaacaagacagcacaccagagagtagacacggtgcagtcaaatcgccattcttgccattagctcctcagactgaaacacagaaaaataagcaaagaaatgaagtggacggcagcaatgaaaaagcagcccttctcccagcccccttttcactaggagacacaaacattacaatagaagagcaattaaactcaataaatttatcttttcaggatgatccagattccagtaccagtacattaggaaacatgctagaattacctggaacttcatcatcatctacttcacaggaattgccattttgtcaacctaagaaaaagtctacgccactgaagtatgaagttggagatctcatctgggcaaaattcaagagacgcccatggtggccctgcaggatttgttctgatccgttgattaacacacattcaaaaatgaaagtttccaaccggaggccctatcggcagtactacgtggaggcttttggagatccttctgagagagcctgggtggctggaaaagcaatcgtcatgtttgaaggcagacatcaattcgaagagctacctgtccttaggagaagagggaaacagaaagaaaaaggatataggcataaggtcaccaaaaacagtggcatcatccctgggccagattccaatgcaaaggcaacccattcagaaagactcaaccaccttggaagactag

SEQ ID NO: 37 - DNA, 5910 bp, Homo sapiens
atggatcagacctgtgaactacccagaagaaattgtctgctgcccttttccaatccagtgaatttagatgcccctgaagacaaggacagccctttcggtaatggtcaatccaatttttctgagccacttaatgggtgtactatgcagttatcgactgtcagtggaacatcccaaaatgcttatggacaagattctccatcttgttacattccactgcggagactacaggatttggcctccatgatcaatgtagagtatttaaatgggtctgctgatggatcagaatcctttcaagaccctgaaaaaagtgattcaagagctcagacgccaattgtttgcacttccttgagtcctggtggtcctacagcacttgctatgaaacaggaaccctcttgtaataactcccctgaactccaggtaaaagtaacaaagactatcaagaatggctttctgcactttgagaattttacttgtgtggacgatgcagatgtagattctgaaatggacccagaacagccagtcacagaggatgagagtatagaggagatctttgaggaaactcagaccaatgccacctgcaattatgagactaaatcagagaatggtgtaaaagtggccatgggaagtgaacaagacagcacaccagagagtagacacggtgcagtcaaatcgccattcttgccattagctcctcagactgaaacacagaaaaataagcaaagaaatgaagtggacggcagcaatgaaaaagcagcccttctcccagcccccttttcactaggagacacaaacattacaatagaagagcaattaaactcaataaatttatcttttcaggatgatccagattccagtaccagtacattaggaaacatgctagaattacctggaacttcatcatcatctacttcacaggaattgccatttgttcctcagaaaattttgagtaaatgggaagccagtgttggacttgcagaacagtatgatgttcccaaggggtcaaagaaccgaaaatgtattcctggttcaatcaagttggacagtgaagaagatatgccatttgaagactgcacaaatgatcctgagtcagaacatgacctgttgcttaatggctgtttgaaatcactggcttttgattctgaacattctgcagatgagaaggaaaagccttgcgctaaatctcgagccagaaagagctctgataatccaaaaaggactagtgtgaaaaagggccacatacaatttgaagcacataaagatgaacggaggggaaagattccagagaaccttggcctaaactttatctctggggatatatctgatacgcaggcctctaatgaactttccaggatagcaaatagcctcacagggtccaacactgccccaggaagttttctgttttcttcctgtggaaaaaacactgcaaagaaagaatttgagacttcaaatggtgactctttattgggcttgcctgagggtgctttgatctcaaagtgttctcgagagaagaataaaccccaacgaagcctggtgtgtggttcaaaagtgaagctctgctatattggagcaggtgatgaggaaaagcgaagtgattccattagtatctgtaccacttctgatgatggaagcagtgacctggatcccatagaacacagctcagagtctgataacagtgtccttgaaattccagatgctttcgatagaacagagaacatgttatctatgcagaaaaatgaaaagataaagtattctaggtttgctgccacaaacactagggtaaaagcaaaacagaagcctctcattagtaactcacatacagaccacttaatgggttgtactaagagtgcagagcctggaaccgagacgtctcaggttaatctctctgatctgaaggcatctactcttgttcacaaaccccagtcagattttacaaatgatgctctctctccaaaattcaacctgtcatcaagcatatccagtgagaactcgttaataaagggtggggcagcaaatcaagctctattacattcgaaaagcaaacagcccaagttccgaagtataaagtgcaaacacaaagaaaatccagttatggcagaacccccagttataaatgaggagtgcagtttgaaatgctgctcttctgataccaaaggctctcctttggccagcatttctaaaagtgggaaagtggatggtctaaaactactgaacaatatgcatgagaaaaccagggattcaagtgacatagaaacagcagtggtgaaacatgttttatccgagttgaaggaactctcttacagatccttaggtgaggatgtcagtgactctggaacatcaaagccatcaaaaccattacttttctcttctgcttctagtcagaatcacatacctattgaaccagactacaaattcagtacattgctaatgatgttgaaagatatgcatgatagtaagacgaaggagcagcggttgatgactgctcaaaacctggtctcttaccggagtcctggtcgtggggactgttctactaatagtcctgtaggagtctctaaggttttggtttcaggaggctccacacacaattcagagaaaaagggagatggcactcagaactccgccaatcctagccctagtgggggtgactctgcattatctggcgagttgtctgcttccctacctggcttactgtccgacaagagagacctccctgcttctggtaaaagtcgttcagactgtgttactaggcgcaactgtggacgatcaaagccttcatccaaattgcgagatgctttttcagcccaaatggtaaagaacacagtgaaccgtaaagccttaaagaccgagcgcaaaagaaaactgaatcagcttccaagtgtgactcttgatgctgtactgcagggagaccgagaacgtggaggttcattgagaggtggggcagaagatcctagtaaagaggatccccttcagataatgggccacttaacaagtgaagatggtgaccatttttctgatgtgcatttcgatagcaaggttaagcaatctgatcctggtaaaatttctgaaaaaggactctcttttgaaaacggaaaaggcccagagctggactctgtaatgaacagtgagaatgatgaactcaatggtgtaaatcaagtggtgcctaaaaagcggtggcagcgtttaaaccaaaggcgcactaaacctcgtaagcgcatgaacagatttaaagagaaagaaaactctgagtgtgcctttagggtcttacttcctagtgaccctgtgcaggaggggcgggatgagtttccagagcatagaactccttcagcaagcatacttgaggaaccactgacagagcaaaatcatgctgactgcttagattcagctgggccacggttaaatgtttgtgataaatccagtgccagcattggtgacatggaaaaggagccaggaattcccagtttgacaccacaggctgagctccctgaaccagctgtgcggtcagagaagaaacgccttaggaagccaagcaagtggcttttggaatatacagaagaatatgatcagatatttgctcctaagaaaaaacaaaagaaggtacaggagcaggtgcacaaggtaagttcccgctgtgaagaggaaagccttctagcccgaggtcgatctagtgctcagaacaagcaggtggacgagaattctttgatttcaaccaaagaagagcctccagttcttgaaagggaggctccgtttttggagggccccttggctcagtcagaacttggaggtggacatgctgagttgccgcagctgaccttgtctgtgcctgtggctccggaagtctctccacggcctgcccttgagtctgaggaattgctagttaaaacgccaggaaattatgaaagtaaacgtcaaagaaaaccaactaagaaacttcttgaatccaatgatttagaccctggatttatgcccaagaagggggaccttggcctttctaaaaagtgctatgaagctggtcacctggagaatggcataactgaatcttgtgccacatcttattcaaaagattttggtggaggcactaccaagatatttgacaagccaaggaagcgaaaacgacagaggcatgctgcagccaagatgcagtgtaaaaaagtgaaaaatgatgactcgtcaaaagagattccaggctcagagggagaactaatgcctcacaggacggccacaagccccaaggagactgttgaggaaggtgtagaacacgatcccgggatgcctgcctctaaaaaaatgcagggtgaacgcggtggaggagctgcactcaaggagaatgtctgtcagaattgtgaaaaattgggtgagctgctgttatgtgaggctcagtgctgtggggctttccacctggagtgccttggattgactgagatgccaagaggaaaatttatctgcaatgaatgtcgcacaggaatccatacctgttttgtatgtaagcagagtggggaagatgttaaaaggtgccttctacccttgtgtggaaagttttaccatgaagagtgtgtccagaagtacccacccactgttatgcagaacaagggcttccggtgctccctccacatctgtataacctgtcatgctgctaatccagccaatgtttctgcatctaaaggtcggttgatgcgctgtgtccgctgtcctgtggcataccacgccaatgacttttgcctggctgctgggtcaaagatccttgcatctaatagtatcatctgccctaatcactttacccctaggcggggctgccgaaatcatgagcatgttaatgttagctggtgctttgtgtgctcagaaggaggcagccttctgtgctgtgattcttgccctgctgcttttcatcgtgaatgcctgaacattgatatccctgaaggaaactggtattgcaatgactgtaaagcaggcaaaaagccacactacagggagattgtctgggtaaaagttggacgatacaggtggtggccagctgagatctgccatcctcgagctgttccttccaacattgataagatgagacatgatgtgggagagttcccagtcctcttttttggatctaatgactatttgtggactcaccaggcccgagtcttcccttacatggagggtgacgtgagcagcaaggataagatgggcaaaggagtggatgggacatataaaaaagtggagcacatgatccagaagaaccaatgtctcttcaccaacacccagtgtaaggtttgctgcgccttgcttatttctgagtcccagaagctggcacattaccagagcaaaaaacatgccaacaaagtgaagagatacctagcaatccatggaatggagacattaaagggggaaacgaagaagctagactcagatcagaagagcagcagaagcaaagacaagaaccagtgctgccccatctgtaacatgaccttttcctcccctgtcgtggcccagtcgcactacctggggaagacccacgcaaagaacttaaagctgaagcagcagtccactaaggtggaagccttgcaccagaatagagagatgatagacccagacaagttctgcagcctctgccatgcaactttcaacgaccctgtcatggctcaacaacattatgtgggcaagaaacacagaaaacaggagaccaagctcaaactaatggcacgctatgggcggctggcggaccctgctgtcactgactttccagctggaaagggctacccctgcaaaacatgtaagatagtgctgaactccatagaacagtaccaagctcatgtcagcggcttcaaacacaagaaccagtcaccaaaaacagtggcatcatccctgggccagattccaatgcaaaggcaacccattcagaaagactcaaccaccttggaagactag

SEQ ID NO: 38 - DNA, 5475 bp, Homo sapiens
atggatcagacctgtgaactacccagaagaaattgtctgctgcccttttccaatccagtgaatttagatgcccctgaagacaaggacagccctttcggtaatggtcaatccaatttttctgagccacttaatgggtgtactatgcagttatcgactgtcagtggaacatcccaaaatgcttatggacaagattctccatcttgttacattccactgcggagactacaggatttggcctccatgatcaatgtagagtatttaaatgggtctgctgatggatcagaatcctttcaagaccctgaaaaaagtgattcaagagctcagacgccaattgtttgcacttccttgagtcctggtggtcctacagcacttgctatgaaacaggaaccctcttgtaataactcccctgaactccaggtaaaagtaacaaagactatcaagaatggctttctgcactttgagaattttacttgtgtggacgatgcagatgtagattctgaaatggacccagaacagccagtcacagaggatgagagtatagaggagatctttgaggaaactcagaccaatgccacctgcaattatgagactaaatcagagaatggtgtaaaagtggccatgggaagtgaacaagacagcacaccagagagtagacacggtgcagtcaaatcgccattcttgccattagctcctcagactgaaacacagaaaaataagcaaagaaatgaagtggacggcagcaatgaaaaagcagcccttctcccagcccccttttcactaggagacacaaacattacaatagaagagcaattaaactcaataaatttatcttttcaggatgatccagattccagtaccagtacattaggaaacatgctagaattacctggaacttcatcatcatctacttcacaggaattgccattttgtcaacctaagaaaaagtctacgccactgaagtatgaagttggagatctcatctgggcaaaattcaagagacgcccatggtggccctgcaggatttgttctgatccgttgattaacacacattcaaaaatgaaagtttccaaccggaggccctatcggcagtactacgtggaggcttttggagatccttctgagagagcctgggtggctggaaaagcaatcgtcatgtttgaaggcagacatcaattcgaagagctacctgtccttaggagaagagggaaacagaaagaaaaaggatataggcataaggttcctcagaaaattttgagtaaatgggaagccagtgttggacttgcagaacagtatgatgttcccaaggggtcaaagaaccgaaaatgtattcctggttcaatcaagttggacagtgaagaagatatgccatttgaagactgcacaaatgatcctgagtcagaacatgacctgttgcttaatggctgtttgaaatcactggcttttgattctgaacattctgcagatgagaaggaaaagccttgcgctaaatctcgagccagaaagagctctgataatccaaaaaggactagtgtgaaaaagggccacatacaatttgaagcacataaagatgaacggaggggaaagattccagagaaccttggcctaaactttatctctggggatatatctgatacgcaggcctctaatgaactttccaggatagcaaatagcctcacagggtccaacactgccccaggaagttttctgttttcttcctgtggaaaaaacactgcaaagaaagaatttgagacttcaaatggtgactctttattgggcttgcctgagggtgctttgatctcaaagtgttctcgagagaagaataaaccccaacgaagcctggtgtgtggttcaaaagtgaagctctgctatattggagcaggtgatgaggaaaagcgaagtgattccattagtatctgtaccacttctgatgatggaagcagtgacctggatcccatagaacacagctcagagtctgataacagtgtccttgaaattccagatgctttcgatagaacagagaacatgttatctatgcagaaaaatgaaaagataaagtattctaggtttgctgccacaaacactagggtaaaagcaaaacagaagcctctcattagtaactcacatacagaccacttaatgggttgtactaagagtgcagagcctggaaccgagacgtctcaggttaatctctctgatctgaaggcatctactcttgttcacaaaccccagtcagattttacaaatgatgctctctctccaaaattcaacctgtcatcaagcatatccagtgagaactcgttaataaagggtggggcagcaaatcaagctctattacattcgaaaagcaaacagcccaagttccgaagtataaagtgcaaacacaaagaaaatccagttatggcagaacccccagttataaatgaggagtgcagtttgaaatgctgctcttctgataccaaaggctctcctttggccagcatttctaaaagtgggaaagtggatggtctaaaactactgaacaatatgcatgagaaaaccagggattcaagtgacatagaaacagcagtggtgaaacatgttttatccgagttgaaggaactctcttacagatccttaggtgaggatgtcagtgactctggaacatcaaagccatcaaaaccattacttttctcttctgcttctagtcagaatcacatacctattgaaccagactacaaattcagtacattgctaatgatgttgaaagatatgcatgatagtaagacgaaggagcagcggttgatgactgctcaaaacctggtctcttaccggagtcctggtcgtggggactgttctactaatagtcctgtaggagtctctaaggttttggtttcaggaggctccacacacaattcagagaaaaagggagatggcactcagaactccgccaatcctagccctagtgggggtgactctgcattatctggcgagttgtctgcttccctacctggcttactgtccgacaagagagacctccctgcttctggtaaaagtcgttcagactgtgttactaggcgcaactgtggacgatcaaagccttcatccaaattgcgagatgctttttcagcccaaatggtaaagaacacagtgaaccgtaaagccttaaagaccgagcgcaaaagaaaactgaatcagcttccaagtgtgactcttgatgctgtactgcagggagaccgagaacgtggaggttcattgagaggtggggcagaagatcctagtaaagaggatccccttcagataatgggccacttaacaagtgaagatggtgaccatttttctgatgtgcatttcgatagcaaggttaagcaatctgatcctggtaaaatttctgaaaaaggactctcttttgaaaacggaaaaggcccagagctggactctgtaatgaacagtgagaatgatgaactcaatggtgtaaatcaagtggtgcctaaaaagcggtggcagcgtttaaaccaaaggcgcactaaacctcgtaagcgcatgaacagatttaaagagaaagaaaactctgagtgtgcctttagggtcttacttcctagtgaccctgtgcaggaggggcgggatgagtttccagagcatagaactccttcagcaagcatacttgaggaaccactgacagagcaaaatcatgctgactgcttagattcagctgggccacggttaaatgtttgtgataaatccagtgccagcattggtgacatggaaaaggagccaggaattcccagtttgacaccacaggctgagctccctgaaccagctgtgcggtcagagaagaaacgccttaggaagccaagcaagtggcttttggaatatacagaagaatatgatcagatatttgctcctaagaaaaaacaaaagaaggtacaggagcaggtgcacaaggtaagttcccgctgtgaagaggaaagccttctagcccgaggtcgatctagtgctcagaacaagcaggtggacgagaattctttgatttcaaccaaagaagagcctccagttcttgaaagggaggctccgtttttggagggccccttggctcagtcagaacttggaggtggacatgctgagttgccgcagctgaccttgtctgtgcctgtggctccggaagtctctccacggcctgcccttgagtctgaggaattgctagttaaaacgccaggaaattatgaaagtaaacgtcaaagaaaaccaactaagaaacttcttgaatccaatgatttagaccctggatttatgcccaagaagggggaccttggcctttctaaaaagtgctatgaagctggtcacctggagaatggcataactgaatcttgtgccacatcttattcaaaagattttggtggaggcactaccaagatatttgacaagccaaggaagcgaaaacgacagaggcatgctgcagccaagatgcagtgtaaaaaagtgaaaaatgatgactcgtcaaaagagattccaggctcagagggagaactaatgcctcacaggacggccacaagccccaaggagactgttgaggaaggtgtagaacacgatcccgggatgcctgcctctaaaaaaatgcagggtgaacgcggtggaggagctgcactcaaggagaatgtctgtcagaattgtgaaaaattgggtgagctgctgttatgtgaggctcagtgctgtggggctttccacctggagtgccttggattgactgagatgccaagaggaaaatttatctgcaatgaatgtcgcacagtggagcacatgatccagaagaaccaatgtctcttcaccaacacccagtgtaaggtttgctgcgccttgcttatttctgagtcccagaagctggcacattaccagagcaaaaaacatgccaacaaagtgaagagatacctagcaatccatggaatggagacattaaagggggaaacgaagaagctagactcagatcagaagagcagcagaagcaaagacaagaaccagtgctgccccatctgtaacatgaccttttcctcccctgtcgtggcccagtcgcactacctggggaagacccacgcaaagaacttaaagctgaagcagcagtccactaaggtggaagccttgcaccagaatagagagatgatagacccagacaagttctgcagcctctgccatgcaactttcaacgaccctgtcatggctcaacaacattatgtgggcaagaaacacagaaaacaggagaccaagctcaaactaatggcacgctatgggcggctggcggaccctgctgtcactgactttccagctggaaagggctacccctgcaaaacatgtaagatagtgctgaactccatagaacagtaccaagctcatgtcagcggcttcaaacacaagaaccagtcaccaaaaacagtggcatcatccctgggccagattccaatgcaaaggcaacccattcagaaagactcaaccaccttggaagactag

SEQ ID NO: 39 - DNA, 5814 bp, Homo sapiens
atggatcagacctgtgaactacccagaagaaattgtctgctgcccttttccaatccagtgaatttagatgcccctgaagacaaggacagccctttcggtaatggtcaatccaatttttctgagccacttaatgggtgtactatgcagttatcgactgtcagtggaacatcccaaaatgcttatggacaagattctccatcttgttacattccactgcggagactacaggatttggcctccatgatcaatgtagagtatttaaatgggtctgctgatggatcagaatcctttcaagaccctgaaaaaagtgattcaagagctcagacgccaattgtttgcacttccttgagtcctggtggtcctacagcacttgctatgaaacaggaaccctcttgtaataactcccctgaactccaggtaaaagtaacaaagactatcaagaatggctttctgcactttgagaattttacttgtgtggacgatgcagatgtagattctgaaatggacccagaacagccagtcacagaggatgagagtatagaggagatctttgaggaaactcagaccaatgccacctgcaattatgagactaaatcagagaatggtgtaaaagtggccatgggaagtgaacaagacagcacaccagagagtagacacggtgcagtcaaatcgccattcttgccattagctcctcagactgaaacacagaaaaataagcaaagaaatgaagtggacggcagcaatgaaaaagcagcccttctcccagcccccttttcactaggagacacaaacattacaatagaagagcaattaaactcaataaatttatcttttcaggatgatccagattccagtaccagtacattaggaaacatgctagaattacctggaacttcatcatcatctacttcacaggaattgccatttgttcctcagaaaattttgagtaaatgggaagccagtgttggacttgcagaacagtatgatgttcccaaggggtcaaagaaccgaaaatgtattcctggttcaatcaagttggacagtgaagaagatatgccatttgaagactgcacaaatgatcctgagtcagaacatgacctgttgcttaatggctgtttgaaatcactggcttttgattctgaacattctgcagatgagaaggaaaagccttgcgctaaatctcgagccagaaagagctctgataatccaaaaaggactagtgtgaaaaagggccacatacaatttgaagcacataaagatgaacggaggggaaagattccagagaaccttggcctaaactttatctctggggatatatctgatacgcaggcctctaatgaactttccaggatagcaaatagcctcacagggtccaacactgccccaggaagttttctgttttcttcctgtggaaaaaacactgcaaagaaagaatttgagacttcaaatggtgactctttattgggcttgcctgagggtgctttgatctcaaagtgttctcgagagaagaataaaccccaacgaagcctggtgtgtggttcaaaagtgaagctctgctatattggagcaggtgatgaggaaaagcgaagtgattccattagtatctgtaccacttctgatgatggaagcagtgacctggatcccatagaacacagctcagagtctgataacagtgtccttgaaattccagatgctttcgatagaacagagaacatgttatctatgcagaaaaatgaaaagataaagtattctaggtttgctgccacaaacactagggtaaaagcaaaacagaagcctctcattagtaactcacatacagaccacttaatgggttgtactaagagtgcagagcctggaaccgagacgtctcaggttaatctctctgatctgaaggcatctactcttgttcacaaaccccagtcagattttacaaatgatgctctctctccaaaattcaacctgtcatcaagcatatccagtgagaactcgttaataaagggtggggcagcaaatcaagctctattacattcgaaaagcaaacagcccaagttccgaagtataaagtgcaaacacaaagaaaatccagttatggcagaacccccagttataaatgaggagtgcagtttgaaatgctgctcttctgataccaaaggctctcctttggccagcatttctaaaagtgggaaagtggatggtctaaaactactgaacaatatgcatgagaaaaccagggattcaagtgacatagaaacagcagtggtgaaacatgttttatccgagttgaaggaactctcttacagatccttaggtgaggatgtcagtgactctggaacatcaaagccatcaaaaccattacttttctcttctgcttctagtcagaatcacatacctattgaaccagactacaaattcagtacattgctaatgatgttgaaagatatgcatgatagtaagacgaaggagcagcggttgatgactgctcaaaacctggtctcttaccggagtcctggtcgtggggactgttctactaatagtcctgtaggagtctctaaggttttggtttcaggaggctccacacacaattcagagaaaaagggagatggcactcagaactccgccaatcctagccctagtgggggtgactctgcattatctggcgagttgtctgcttccctacctggcttactgtccgacaagagagacctccctgcttctggtaaaagtcgttcagactgtgttactaggcgcaactgtggacgatcaaagccttcatccaaattgcgagatgctttttcagcccaaatggtaaagaacacagtgaaccgtaaagccttaaagaccgagcgcaaaagaaaactgaatcagcttccaagtgtgactcttgatgctgtactgcagggagaccgagaacgtggaggttcattgagaggtggggcagaagatcctagtaaagaggatccccttcagataatgggccacttaacaagtgaagatggtgaccatttttctgatgtgcatttcgatagcaaggttaagcaatctgatcctggtaaaatttctgaaaaaggactctcttttgaaaacggaaaaggcccagagctggactctgtaatgaacagtgagaatgatgaactcaatggtgtaaatcaagtggtgcctaaaaagcggtggcagcgtttaaaccaaaggcgcactaaacctcgtaagcgcatgaacagatttaaagagaaagaaaactctgagtgtgcctttagggtcttacttcctagtgaccctgtgcaggaggggcgggatgagtttccagagcatagaactccttcagcaagcatacttgaggaaccactgacagagcaaaatcatgctgactgcttagattcagctgggccacggttaaatgtttgtgataaatccagtgccagcattggtgacatggaaaaggagccaggaattcccagtttgacaccacaggctgagctccctgaaccagctgtgcggtcagagaagaaacgccttaggaagccaagcaagtggcttttggaatatacagaagaatatgatcagatatttgctcctaagaaaaaacaaaagaaggtacaggagcaggtgcacaaggtaagttcccgctgtgaagaggaaagccttctagcccgaggtcgatctagtgctcagaacaagcaggtggacgagaattctttgatttcaaccaaagaagagcctccagttcttgaaagggaggctccgtttttggagggccccttggctcagtcagaacttggaggtggacatgctgagttgccgcagctgaccttgtctgtgcctgtggctccggaagtctctccacggcctgcccttgagtctgaggaattgctagttaaaacgccaggaaattatgaaagtaaacgtcaaagaaaaccaactaagaaacttcttgaatccaatgatttagaccctggatttatgcccaagaagggggaccttggcctttctaaaaagtgctatgaagctggtcacctggagaatggcataactgaatcttgtgccacatcttattcaaaagattttggtggaggcactaccaagatatttgacaagccaaggaagcgaaaacgacagaggcatgctgcagccaagatgcagtgtaaaaaagtgaaaaatgatgactcgtcaaaagagattccaggctcagagggagaactaatgcctcacaggacggccacaagccccaaggagactgttgaggaaggtgtagaacacgatcccgggatgcctgcctctaaaaaaatgcagggtgaacgcggtggaggagctgcactcaaggagaatgtctgtcagaattgtgaaaaattgggtgagctgctgttatgtgaggctcagtgctgtggggctttccacctggagtgccttggattgactgagatgccaagaggaaaatttatctgcaatgaatgtcgcacaggaatccatacctgttttgtatgtaagcagagtggggaagatgttaaaaggtgccttctacccttgtgtggaaagttttaccatgaagagtgtgtccagaagtacccacccactgttatgcagaacaagggcttccggtgctccctccacatctgtataacctgtcatgctgctaatccagccaatgtttctgcatctaaaggtcggttgatgcgctgtgtccgctgtcctgtggcataccacgccaatgacttttgcctggctgctgggtcaaagatccttgcatctaatagtatcatctgccctaatcactttacccctaggcggggctgccgaaatcatgagcatgttaatgttagctggtgctttgtgtgctcagaaggaggcagccttctgtgctgtgattcttgccctgctgcttttcatcgtgaatgcctgaacattgatatccctgaaggaaactggtattgcaatgactgtaaagcaggcaaaaagccacactacagggagattgtctgggtaaaagttggacgatacaggtggtggccagctgagatctgccatcctcgagctgttccttccaacattgataagatgagacatgatgtgggagagttcccagtcctcttttttggatctaatgactatttgtggactcaccaggcccgagtcttcccttacatggagggtgacgtgagcagcaaggataagatgggcaaaggagtggatgggacatataaaaaagtggagcacatgatccagaagaaccaatgtctcttcaccaacacccagtgtaaggtttgctgcgccttgcttatttctgagtcccagaagctggcacattaccagagcagcagaagcaaagacaagaaccagtgctgccccatctgtaacatgaccttttcctcccctgtcgtggcccagtcgcactacctggggaagacccacgcaaagaacttaaagctgaagcagcagtccactaaggtggaagccttgcaccagaatagagagatgatagacccagacaagttctgcagcctctgccatgcaactttcaacgaccctgtcatggctcaacaacattatgtgggcaagaaacacagaaaacaggagaccaagctcaaactaatggcacgctatgggcggctggcggaccctgctgtcactgactttccagctggaaagggctacccctgcaaaacatgtaagatagtgctgaactccatagaacagtaccaagctcatgtcagcggcttcaaacacaagaaccagtcaccaaaaacagtggcatcatccctgggccagattccaatgcaaaggcaacccattcagaaagactcaaccaccttggaagactag

SEQ ID NO: 40 - DNA, 1946 bp, Homo sapiens
atggatcagacctgtgaactacccagaagaaattgtctgctgcccttttccaatccagtgaatttagatgcccctgaagacaaggacagccctttcggtaatggtcaatccaatttttctgagccacttaatgggtgtactatgcagttatcgactgtcagtggaacatcccaaaatgcttatggacaagattctccatcttgttacattccactgcggagactacaggatttggcctccatgatcaatgtagagtatttaaatgggtctgctgatggatcagaatcctttcaagaccctgaaaaaagtgattcaagagctcagacgccaattgtttgcacttccttgagtcctggtggtcctacagcacttgctatgaaacaggaaccctcttgtaataactcccctgaactccaggtaaaagtaacaaagactatcaagaatggctttctgcactttgagaattttacttgtgtggacgatgcagatgtagattctgaaatggacccagaacagccagtcacagaggatgagagtatagaggagatctttgaggaaactcagaccaatgccacctgcaattatgagactaaatcagagaatggtgtaaaagtggccatgggaagtgaacaagacagcacaccagagagtagacacggtgcagtcaaatcgccattcttgccattagctcctcagactgaaacacagaaaaataagcaaagaaatgaagtggacggcagcaatgaaaaagcagcccttctcccagcccccttttcactaggagacacaaacattacaatagaagagcaattaaactcaataaatttatcttttcaggatgatccagattccagtaccagtacattaggaaacatgctagaattacctggaacttcatcatcatctacttcacaggaattgccattttgtcaacctaagaaaaagtctacgccactgaagtatgaagttggagatctcatctgggcaaaattcaagagacgcccatggtggccctgcaggatttgttctgatccgttgattaacacacattcaaaaatgaaagtttccaaccggaggccctatcggcagtactacgtggaggcttttggagatccttctgagagagcctgggtggctggaaaagcaatcgtcatgtttgaaggcagacatcaattcgaagagctacctgtccttaggagaagagggaaacagaaagaaaaaggatataggcataagtggagcacatgatccagaagaaccaatgtctcttcaccaacacccagtgtaaggtttgctgcgccttgcttatttctgagtcccagaagctggcacattaccagagcaaaaaacatgccaacaaagtgaagagatacctagcaatccatggaatggagacattaaagggggaaacgaagaagctagactcagatcagaagagcagcagaagcaaagacaagaaccagtgctgccccatctgtaacatgaccttttcctcccctgtcgtggcccagtcgcactacctggggaagacccacgcaaagaacttaaagctgaagcagcagtccactaaggtggaagccttgcaccagaatagagagatgatagacccagacaagttctgcagcctctgccatgcaactttcaacgaccctgtcatggctcaacaacattatgtgggcaagaaacacagaaaacaggagaccaagctcaaactaatggcacgctatgggcggctggcggaccctgctgtcactgactttccagctggaaagggctacccctgcaaaacatgtaagatagtgctgaactccatagaacagtaccaagctcatgtcagcggcttcaaacacaagaaccagtcaccaaaaacagtggcatcatccctgggccagattccaatgcaaaggcaacccattcagaaagactcaaccaccttggaagactag

SEQ ID NO: 41 - DNA, 1245 bp, Homo sapiens
atggatcagacctgtgaactacccagaagaaattgtctgctgcccttttccaatccagtgaatttagatgcccctgaagacaaggacagccctttcggtaatggtcaatccaatttttctgagccacttaatgggtgtactatgcagttatcgactgtcagtggaacatcccaaaatgcttatggacaagattctccatcttgttacattccactgcggagactacaggatttggcctccatgatcaatgtagagtatttaaatgggtctgctgatggatcagaatcctttcaagaccctgaaaaaagtgattcaagagctcagacgccaattgtttgcacttccttgagtcctggtggtcctacagcacttgctatgaaacaggaaccctcttgtaataactcccctgaactccaggtaaaagtaacaaagactatcaagaatggctttctgcactttgagaattttacttgtgtggacgatgcagatgtagattctgaaatggacccagaacagccagtcacagaggatgagagtatagaggagatctttgaggaaactcagaccaatgccacctgcaattatgagactaaatcagagaatggtgtaaaagtggccatgggaagtgaacaagacagcacaccagagagtagacacggtgcagtcaaatcgccattcttgccattagctcctcagactgaaacacagaaaaataagcaaagaaatgaagtggacggcagcaatgaaaaagcagcccttctcccagcccccttttcactaggagacacaaacattacaatagaagagcaattaaactcaataaatttatcttttcaggatgatccagattccagtaccagtacattaggaaacatgctagaattacctggaacttcatcatcatctacttcacaggaattgccattttgtcaacctaagaaaaagtctacgccactgaagtatgaagttggagatctcatctgggcaaaattcaagagacgcccatggtggccctgcaggatttgttctgatccgttgattaacacacattcaaaaatgaaagctggaaagggctacccctgcaaaacatgtaagatagtgctgaactccatagaacagtaccaagctcatgtcagcggcttcaaacacaagaaccagtcaccaaaaacagtggcatcatccctgggccagattccaatgcaaaggcaacccattcagaaagactcaaccaccttggaagactag

SEQ ID NO: 42 - DNA, 4497 bp, Homo sapiens
atggaccctagaaatactgctatgttaggattgggttctgattccgaaggtttttcaagaaagagtccttctgccatcagtactggcacattggtcagtaagagagaagtagagctagaaaaaaacacaaaggaggaagaggaccttcgcaaacggaatcgagaaagaaacatcgaagctgggaaagatgatggtttgactgatgcacagcaacagttttcagtgaaagaaacaaacttttcagagggaaatttaaaattgaaaattggcctccaggctaagagaactaaaaaacctccaaagaacttggagaactatgtatgtcgacctgccataaaaacaactattaagcacccaaggaaagcacttaaaagtggaaagatgacggatgaaaagaatgaacactgtccttcaaaacgattttataagaagaccaaacagctgccagtcctaggaaaatgctgtgaagagatccagccacatcagtggaagccacctatagagagagaagaacaccggctcccattctggttaaaggccagtctgccatccatccaggaagaactgcggcacatggctgatggtgctagagaggtaggaaatatgactggaaccactgagatcaactcagatcgaagcctagaaaaagacaatttggagttggggagtgaatctcggtacccactgctattgcctaagggtgtagtcctgaaactgaagccagttgccacccgtttccccaggaaggcttggagacagaagcgttcatcagtcctgaagcccctccttatccaacccagcccctctctccagcccagcttcaaccctgggaaaacaccagcccgatcaactcattcagaagcccctccgagcaaaatggtgctccggattcctcacccaatacagccagccactgttttacagacagttccaggtgtccctccactgggggtcagtggaggtgagagttttgagtctcctgcagcactgcctgctgtgccccctgaggccaggacaagcttccctctgtctgagtcccagactttgctctcttctgcccctgtgcccaaggtaatgctgccctcccttgccccttctaagtttcgaaagccatatgtgagacggagaccctcaaagagaagaggagtcaaggcctctccctgtatgaaacctgcccctgttatccaccaccctgcatctgttatcttcactgttcctgctaccactgtgaagattgtgagccttggcggtggctgtaacatgatccagcctgtcaatgcggctgtggcccagagtccccagactattcccatcactaccctcttggttaaccctacttccttcccctgtccattgaaccagtcccttgtggcctcctctgtctcacccttaattgtttctggcaattctgtgaatcttcctataccatccacccctgaagataaggcccacgtgaatgtggacattgcttgtgctgtggctgatggggaaaatgcctttcagggcctagaacccaaattagagccccaggaactatctcctctctctgctactgttttcccgaaagtggaacatagcccagggcctccactagcagatgcagagtgccaagaaggattgtcagagaatagtgcctgtcgctggaccgttgtgaaaacagaggaggggaggcaagctctggagccgctccctcagggcatccaggagtctctaaacaaccctacccctggggatttagaggaaattgtcaagatggaacctgaagaagctagagaggaaatcagtggatcccctgagcgtgatatttgtgatgacatcaaagtggaacatgctgtggaattggacactggtgccccaagcgaggagttgagcagtgctggagaagtaacgaaacagacagtcttacagaaggaagaggagaggagtcagccaactaaaaccccttcatcttctcaagagccccctgatgaaggaacctcagggacagatgtgaacaaaggatcatcaaagaatgctttgtcctcaatggatcctgaagtgaggcttagtagccccccagggaagccagaagattcatccagtgttgatggtcagtcagtggggactccagttgggccagaaactggaggagagaagaatgggccagaagaagaggaagaagaggactttgatgacctcacccaagatgaggaagatgaaatgtcatcagcttctgaggaatctgtgctttctgtcccagaactccaggaaacaatggagaaactgacttggctggcatctgaaaggcgcatgagtcaggagggtgagtctgaagaagagaattctcaggaggagaactctgagccagaagaagaggaggaagaagaagcagaaggaatggaaagcctgcagaaagaggatgaaatgacggatgaagcagttggagactctgctgagaagcctcctacttttgcttcacctgagactgctccagaagtggagaccagcagaactccaccaggagagagcatcaaagctgctggaaaaggccggaacaatcatcgagctcgcaacaagcggggaagtcgggctcgggccagcaaggacacctccaagctgctgttgctgtatgatgaggacattctcgagcgagatccactcagggagcagaaggacttggcctttgcccaagcttatctgaccagggtgcgagaagccctacaacatatccctggcaagtatgaagacttccttcaagtcatctatgaatttgagtcaagtacccagagacggacggctgtagatctctacaaaagcctgcaaattctgctccaagactggcctcagctgttgaaagactttgctgctttcctgttacctgagcaagctctggcctgtggattatttgaggagcagcaggcttttgagaagagccgcaagttccttcggcagctggagatttgctttgcagagaacccctcacaccaccagaagattatcaaggtcctccaaggctgtgcagactgccttccccaggagatcaccgagctcaagacacagatgtggcagctcctcaagggccacgaccacctgcaggatgagttttctatcttctttgaccacttgcgcccagcagctagccggatgggtgactttgaagagatcaattggactgaggaaaaggagtatgagtttgatggctttgaagaagtggccctgcctgatgtggaagaagaggaggagcctcccaagatacccacagcctcaaagaacaagaggaaaaaagagatcggggtccaaaatcatgataaggagactgaatggccagatggggccaaggactgtgcctgctcctgccatgaaggaggtccagattccaagctgaagaagagcaaaaggcggagctgtagccactgtagcagcaaggtctgtgacagcaaatcctacaagagcaaggagccccatgagttggtgggcagcagcccccaccgagaggctagtcctatgcctggtgctaaggaagctgggcagggcaaggatatgatggaagaggaagccccagaggagcgggagagcactgaggccacccagagcaggactgtcaggaccaccagaaagggagagatgcctgtttcaggattggcagtggggagcactttgccatcccctcgagaagtgactgttacagaacggctcctcctggatggcccaccacctcattcaccagagactcctcaatttccccccacaactggagctgtactgtacactgttaagagaaaccaggttgggcctgaggttcgctcctgccccaaggcatcccccagacttcagaaagagagggagggccaaaaggcagtgagtgagtcagaggctttgatgctggtctgggatgcatcagaaactgagaaattgcctggtaccgtggaaccccctgcttccttcctgagtcctgtttcctcaaagaccagagatgcagggagaagacatgtgtccgggaaaccagacactcaagagagatggctgccctcaagcagagctcgggtgaagacaagagacaggacgtgccctgtccatgaatctccatcaggaattgacacctcagagacttctcccaaagcccctagagggggtttggctaaagacagtggaacacaggccaagggtccagagggggagcagcagccaaaggccgcagaagctacggtgtgtgccaacaacagcaaggtcagctccactggggaaaaggttgtcctgtggacaagggaagctgaccgtgtgatcctcaccatgtgccaggagcaaggggcacagccacagaccttcaacatcatctcccagcagctgggaaataagacccctgctgaggtttcccaccgttttcgagaactcatgcagctcttccacactgcctgtgaagccagctctgaggatgaggatgatgcaaccagtaccagcaatgcagaccagctgtctgaccatggggaccttctgtctgaagaggagctggatgaatga

SEQ ID NO: 43 - DNA, 3348 bp, Homo sapiens
atgactgaaacagatgaggagagtggcatattatcagaggctgagaaagtcaccacaccagccatcaggcacatcagtgctgaggtagtgcccatggggcccccgccccctccaaagccgaaacagaccagagatagtactttcatggagaagttacatgcggtagatgaggagctggcttccagtccagtctgcatggattctttccagcccatggatgacagtctcattgcatttcgaacgcgttctaagatgcccctgaaagatgttcccctgggccaattagaggcagagctccaagctccagacatcactccagatatgtatgaccccaatacggcagatgatgaggactggaagatgtggctggggggacttatgaatgatgatgtggggaatgaagatgaagcagatgatgatgatgatccagaatataatttcctggaagacctcgatgaaccagacacagaggatttccggactgaccgggcagtgagaatcaccaaaaaggaagtaaatgagctgatggaagagctgtttgaaactttccaagatgagatgggattctccaacatggaagatgatggcccagaagaggaggagtgtgtagctgagcctcgtcctaactttaacacccctcaagctctacggtttgaggaaccactggccaacctgttaaatgaacaacatcggacagtgaaggagctatttgaacagctgaagatgaagaaatcttcagccaaacagctgcaggaagtagagaaggttaaaccccagagtgagaaagttcatcagactctgattctggacccagcacagaggaagagactccagcagcagatgcagcagcacgttcagctcttgacccaaatccaccttcttgccacctgcaaccccaacctcaatccggaggccactaccaccaggatatttcttaaagagctgggaacctttgctcaaagctccatcgcccttcaccatcagtacaaccccaagtttcagaccctgttccaaccctgtaacttgatgggagctatgcagctgattgaagacttcagcacacatgtcagcattgactgcagccctcataaaactgtcaagaagactgcgaatgaatttccctgtttgccaaagcaagtggcttggattctggccacaagcaaggttttcatgtatccagagttacttccagtgtgttccctgaaggcaaagaatccccaggataagatcgtcttcaccaaggctgaggacaatttgttagctttaggactgaagcattttgaaggaactgagtttcctaatcctctaatcagcaagtaccttctaacctgcaaaactgcccaccaactgacagtgagaatcaagaacctcaacatgaacagagctcctgacaacatcattaaattttataagaagaccaaacagctgccagtcctaggaaaatgctgtgaagagatccagccacatcagtggaagccacctatagagagagaagaacaccggctcccattctggttaaaggccagtctgccatccatccaggaagaactgcggcacatggctgatggtgctagagaggtaggaaatatgactggaaccactgagatcaactcagatcgaagcctagaaaaagacaatttggagttggggagtgaatctcggtacccactgctattgcctaagggtgtagtcctgaaactgaagccagttgccacccgtttccccaggaaggcttggagacagaagcgttcatcagtcctgaagcccctccttatccaacccagcccctctctccagcccagcttcaaccctgggaaaacaccagcccgatcaactcattcagaagcccctccgagcaaaatggtgctccggattcctcacccaatacagccagccactgttttacagacagttccaggtgtccctccactgggggtcagtggaggtgagagttttgagtctcctgcagcactgcctgctgtgccccctgaggccaggacaagcttccctctgtctgagtcccagactttgctctcttctgcccctgtgcccaaggtaatgctgccctcccttgccccttctaagtttcgaaagccatatgtgagacggagaccctcaaagagaagaggagtcaaggcctctccctgtatgaaacctgcccctgttatccaccaccctgcatctgttatcttcactgttcctgctaccactgtgaagattgtgagccttggcggtggctgtaacatgatccagcctgtcaatgcggctgtggcccagagtccccagactattcccatcactaccctcttggttaaccctacttccttcccctgtccattgaaccagtcccttgtggcctcctctgtctcacccttaattgtttctggcaattctgtgaatcttcctataccatccacccctgaagataaggcccacgtgaatgtggacattgcttgtgctgtggctgatggggaaaatgcctttcagggcctagaacccaaattagagccccaggaactatctcctctctctgctactgttttcccgaaagtggaacatagcccagggcctccactagcagatgcagagtgccaagaaggattgtcagagaatagtgcctgtcgctggaccgttgtgaaaacagaggaggggaggcaagctctggagccgctccctcagggcatccaggagtctctaaacaaccctacccctggggatttagaggaaattgtcaagatggaacctgaagaagctagagaggaaatcagtggatcccctgagcgtgatatttgtgatgacatcaaagtggaacatgctgtggaattggacactggtgccccaagcgaggagttgagcagtgctggagaagtaacgaaacagacagtcttacagaaggaagaggagaggagtcagccaactaaaaccccttcatcttctcaagagccccctgatgaaggaacctcagggacagatgtgaacaaaggatcatcaaagaatgctttgtcctcaatggatcctgaagtgaggcttagtagccccccagggaagccagaagattcatccagtgttgatggtcagtcagtggggactccagttgggccagaaactggaggagagaagaatgggccagaagaagaggaagaagaggactttgatgacctcacccaagatgaggaagatgaaatgtcatcagcttctgaggaatctgtgctttctgtcccagaactccaggtgagagctggagaatattctcaagtatttcgtggactcagtaatatgtatcacttattgatatgccacctgcttgcttgctgcactatggatagtcctaaaatcatttgtatttga

SEQ ID NO: 44 - DNA, 2592 bp, Homo sapiens
atggaccctagaaatactgctatgttaggattgggttctgattccgaaggtttttcaagaaagagtccttctgccatcagtactggcacattggtcagtaagagagaagtagagctagaaaaaaacacaaaggaggaagaggaccttcgcaaacggaatcgagaaagaaacatcgaagctgggaaagatgatggtttgactgatgcacagcaacagttttcagtgaaagaaacaaacttttcagagggaaatttaaaattgaaaattggcctccaggctaagagaactaaaaaacctccaaagaacttggagaactatgtatgtcgacctgccataaaaacaactattaagcacccaaggaaagcacttaaaagtggaaagatgacggatgaaaagaatgaacactgtccttcaaaacgattccaagatgagatgggattctccaacatggaagatgatggcccagaagaggaggagcgtgtggctgagcctcaagctaactttaacacccctcaagctctacggtttgaggaactactggccaacctactaaatgaacaacatcagatagcgaaggaactatttgaacagctgaagatgaagaaaccttcagccaaacagcagaaggaggtagagaaggttaaaccccagtgtaaggaagttcatcagaccctgattctggacccagcacaaaggaagagactccagcagcagatgcagcagcatgttcagctcttgacacaaatccaccttcttgccacctgcaaccccaatctcaatccggaggccagtagcaccaggatatgtcttaaagagctgggaacctttgctcaaagctccatcgcccttcaccatcagtacaaccccaagtttcagaccctgttccaaccctgtaacttgatgggagctatgcagctgattgaagacttcagcacacatgtcagcattgactgcagccctcataaaactgtcaagaagactgccaatgaatttccctgtttgccaaagcaagtggcttggatcctggccacaagcaaggttttcatgtatccagagttacttccagtgtgttccctgaaggcaaagaatccccaggataagatcctcttcaccaaggctgaggacaacaagtaccttctaacctgcaagactgcccgccaactgacagtgagaatcaagaacctcaacatgaacagagctcctgacaacatcattaaattttataagaagaccaaacagctgccagtcctaggaaaatgctgtgaagagatccagccacatcagtggaagccacctatagagagagaagaacaccggctcccattctggttaaaggccagtctgccatccatccaggaagaactgcggcacatggctgatggtgctagagaggtaggaaatatgactggaaccactgagatcaactcagatcaaggcctagaaaaagacaactcagagttggggagtgaaactcggtacccactgctattgcctaagggtgtagtcctgaaactgaagccagttgccgaccgtttccccaagaaggcttggagacagaagcgttcatcagtcctgaaacccctccttatccaacccagcccctctctccagcccagcttcaaccctgggaaaacaccagcccaatcaactcattcagaagcccctccgagcaaaatggtgctccggattcctcacccaatacagccagccactgttttacagacagttccaggtgtccctccactgggggtcagtggaggtgagagttttgagtctcctgcagcactgcctgctatgccccctgaggccaggacaagcttccctctgtctgagtcccagactttgctctcttctgcccctgtgcccaaggtaatgatgccctcccctgcctcttccatgtttcgaaagccatatgtgagacggagaccctcaaaaagaaggggagccagggcctttcgctgtatcaaacctgcccctgttatccaccctgcatctgttatcttcactgttcctgctaccactgtgaagattgtgagccttggcggtggctgtaacatgatccagcctgtcaatgcggctgtggcccagagtccccagactattcccatcgccaccctcttggttaaccctacttccttcccctgtccattgaaccagccccttgtggcctcctctgtctcacccttaattgtttctggcaattctgtgaatcttcctataccatccacccctgaagataaggcccacatgaatgtggacattgcttgtgctgtggctgatggggaaaatgcctttcagggcctagaacccaaattagagccccaggaactatctcctctctctgctactgttttccccaaagtggaacatagcccagggcctccaccagtcgataaacagtgccaagaaggattgtcagagaacagtgcctatcgctggaccgttgtgaaaacagaggagggaaggcaagctctggagccgctccctcagggcatccaggagtctctaaacaactcttcccctggggatttagaggaagttgtcaagatggaacctgaagatgctacagaggaaatcagtggatttctttga

SEQ ID NO: 45 - DNA, 3558 bp, Homo sapiens
atggaccctagaaatactgctatgttaggattgggttctgattccgaaggtttttcaagaaagagtccttctgccatcagtactggcacattggtcagtaagagagaagtagagctagaaaaaaacacaaaggaggaagaggaccttcgcaaacggaatcgagaaagaaacatcgaagctgggaaagatgatggtttgactgatgcacagcaacagttttcagtgaaagaaacaaacttttcagagggaaatttaaaattgaaaattggcctccaggctaagagaactaaaaaacctccaaagaacttggagaactatgtatgtcgacctgccataaaaacaactattaagcacccaaggaaagcacttaaaagtggaaagatgacggatgaaaagaatgaacactgtccttcaaaacgacccatggatgacagtctcattgcatttcgaacgcgttctaagatgcccctgaaagatgttcccctgggccaattagaggcagagctccaagctccagacatcactccagatatgtatgaccccaatacggcagatgatgaggactggaagatgtggctggggggacttatgaatgatgatgtggggaatgaagatgaagcagatgatgatgatgatccagaatataatttcctggaagacctcgatgaaccagacacagaggatttccggactgaccgggcagtgagaatcaccaaaaaggaagtaaatgagctgatggaagagctgtttgaaactttccaagatgagatgggattctccaacatggaagatgatggcccagaagaggaggagtgtgtagctgagcctcgtcctaactttaacacccctcaagctctacggtttgaggaaccactggccaacctgttaaatgaacaacatcggacagtgaaggagctatttgaacagctgaagatgaagaaatcttcagccaaacagctgcaggaagtagagaaggttaaaccccagagtgagaaagttcatcagactctgattctggacccagcacagaggaagagactccagcagcagatgcagcagcacgttcagctcttgacccaaatccaccttcttgccacctgcaaccccaacctcaatccggaggccactaccaccaggatatttcttaaagagctgggaacctttgctcaaagctccatcgcccttcaccatcagtacaaccccaagtttcagaccctgttccaaccctgtaacttgatgggagctatgcagctgattgaagacttcagcacacatgtcagcattgactgcagccctcataaaactgtcaagaagactgcgaatgaatttccctgtttgccaaagcaagtggcttggattctggccacaagcaaggttttcatgtatccagagttacttccagtgtgttccctgaaggcaaagaatccccaggataagatcgtcttcaccaaggctgaggacaatttgttagctttaggactgaagcattttgaaggaactgagtttcctaatcctctaatcagcaagtaccttctaacctgcaaaactgcccaccaactgacagtgagaatcaagaacctcaacatgaacagagctcctgacaacatcattaaattttataagaagaccaaacagctgccagtcctaggaaaatgctgtgaagagatccagccacatcagtggaagccacctatagagagagaagaacaccggctcccattctggttaaaggccagtctgccatccatccaggaagaactgcggcacatggctgatggtgctagagaggtaggaaatatgactggaaccactgagatcaactcagatcgaagcctagaaaaagacaatttggagttggggagtgaatctcggtacccactgctattgcctaagggtgtagtcctgaaactgaagccagttgccacccgtttccccaggaaggcttggagacagaagcgttcatcagtcctgaagcccctccttatccaacccagcccctctctccagcccagcttcaaccctgggaaaacaccagcccgatcaactcattcagaagcccctccgagcaaaatggtgctccggattcctcacccaatacagccagccactgttttacagacagttccaggtgtccctccactgggggtcagtggaggtgagagttttgagtctcctgcagcactgcctgctgtgccccctgaggccaggacaagcttccctctgtctgagtcccagactttgctctcttctgcccctgtgcccaaggtaatgctgccctcccttgccccttctaagtttcgaaagccatatgtgagacggagaccctcaaagagaagaggagtcaaggcctctccctgtatgaaacctgcccctgttatccaccaccctgcatctgttatcttcactgttcctgctaccactgtgaagattgtgagccttggcggtggctgtaacatgatccagcctgtcaatgcggctgtggcccagagtccccagactattcccatcactaccctcttggttaaccctacttccttcccctgtccattgaaccagtcccttgtggcctcctctgtctcacccttaattgtttctggcaattctgtgaatcttcctataccatccacccctgaagataaggcccacgtgaatgtggacattgcttgtgctgtggctgatggggaaaatgcctttcagggcctagaacccaaattagagccccaggaactatctcctctctctgctactgttttcccgaaagtggaacatagcccagggcctccactagcagatgcagagtgccaagaaggattgtcagagaatagtgcctgtcgctggaccgttgtgaaaacagaggaggggaggcaagctctggagccgctccctcagggcatccaggagtctctaaacaaccctacccctggggatttagaggaaattgtcaagatggaacctgaagaagctagagaggaaatcagtggatcccctgagcgtgatatttgtgatgacatcaaagtggaacatgctgtggaattggacactggtgccccaagcgaggagttgagcagtgctggagaagtaacgaaacagacagtcttacagaaggaagaggagaggagtcagccaactaaaaccccttcatcttctcaagagccccctgatgaaggaacctcagggacagatgtgaacaaaggatcatcaaagaatgctttgtcctcaatggatcctgaagtgaggcttagtagccccccagggaagccagaagattcatccagtgttgatggtcagtcagtggggactccagttgggccagaaactggaggagagaagaatgggccagaagaagaggaagaagaggactttgatgacctcacccaagatgaggaagatgaaatgtcatcagcttctgaggaatctgtgctttctgtcccagaactccaggtgagagctggagaatattctcaagtatttcgtggactcagtaatatgtatcacttattgatatgccacctgcttgcttgctgcactatggatagtcctaaaatcatttgtatttga

SEQ ID NO: 46 - DNA, 990 bp, Homo sapiens
atggaccctagaaatactgctatgttaggattgggttctgattccgaaggtttttcaagaaagagtccttctgccatcagtactggcacattggtcagtaagagagaagtagagctagaaaaaaacacaaaggaggaagaggaccttcgcaaacggaatcgagaaagaaacatcgaagctgggaaagatgatggtttgactgatgcacagcaacagttttcagtgaaagaaacaaacttttcagagggaaatttaaaattgaaaattggcctccaggctaagagaactaaaaaacctccaaagaacttggagaactatgtatgtcgacctgccataaaaacaactattaagcacccaaggaaagcacttaaaagtggaaagatgacggatgaaaagaatgaacactgtccttcaaaacgattccaagatgagatgggattctccaacatggaagatgatggcccagaagaggaggagcgtgtggctgagcctcaagctaactttaacacccctcaagctctacggtttgaggaactactggccaacctactaaatgaacaacatcagatagcgaaggaactatttgaacagctgaagatgaagaaaccttcagccaaacagcagaaggaggtagagaaggttaaaccccagtgtaaggaagttcatcagaccctgattctggacccagcacaaaggaagagactccagcagcagatgcagcagcatgttcagctcttgacacaaatccaccttcttgccacctgcaaccccaatctcaatccggaggccagtagcaccaggatatgtcttaaagagctgggaacctttgctcaaagctccatcgcccttcaccatcagtacaaccccaagtttcagaccctgttccaaccctgtaacttgatgggagctatgcagctgattgaagacttcagcacacatgtcagcattgactgcagccctcataaaactgtcaagaagactgtttgttag

SEQ ID NO: 47 - DNA, 3483 bp, Homo sapiens
atggaccctagaaatactgctatgttaggattgggttctgattccgaaggtttttcaagaaagagtccttctgccatcagtactggcacattggtcagtaagagagaagtagagctagaaaaaaacacaaaggaggaagaggaccttcgcaaacggaatcgagaaagaaacatcgaagctgggaaagatgatggtttgactgatgcacagcaacagttttcagtgaaagaaacaaacttttcagagggaaatttaaaattgaaaattggcctccaggctaagagaactaaaaaacctccaaagaacttggagaactatgtatgtcgacctgccataaaaacaactattaagcacccaaggaaagcacttaaaagtggaaagatgacggatgaaaagaatgaacactgtccttcaaaacgattttataagaagaccaaacagctgccagtcctaggaaaatgctgtgaagagatccagccacatcagtggaagccacctatagagagagaagaacaccggctcccattctggttaaaggccagtctgccatccatccaggaagaactgcggcacatggctgatggtgctagagaggtaggaaatatgactggaaccactgagatcaactcagatcgaagcctagaaaaagacaatttggagttggggagtgaatctcggtacccactgctattgcctaagggtgtagtcctgaaactgaagccagttgccacccgtttccccaggaaggcttggagacagaagcgttcatcagtcctgaagcccctccttatccaacccagcccctctctccagcccagcttcaaccctgggaaaacaccagcccgatcaactcattcagaagcccctccgagcaaaatggtgctccggattcctcacccaatacagccagccactgttttacagacagttccaggtgtccctccactgggggtcagtggaggtgagagttttgagtctcctgcagcactgcctgctgtgccccctgaggccaggacaagcttccctctgtctgagtcccagactttgctctcttctgcccctgtgcccaaggtaatgctgccctcccttgccccttctaagtttcgaaagccatatgtgagacggagaccctcaaagagaagaggagtcaaggcctctccctgtatgaaacctgcccctgttatccaccaccctgcatctgttatcttcactgttcctgctaccactgtgaagattgtgagccttggcggtggctgtaacatgatccagcctgtcaatgcggctgtggcccagagtccccagactattcccatcactaccctcttggttaaccctacttccttcccctgtccattgaaccagtcccttgtggcctcctctgtctcacccttaattgtttctggcaattctgtgaatcttcctataccatccacccctgaagataaggcccacgtgaatgtggacattgcttgtgctgtggctgatggggaaaatgcctttcagggcctagaacccaaattagagccccaggaactatctcctctctctgctactgttttcccgaaagtggaacatagcccagggcctccactagcagatgcagagtgccaagaaggattgtcagagaatagtgcctgtcgctggaccgttgtgaaaacagaggaggggaggcaagctctggagccgctccctcagggcatccaggagtctctaaacaaccctacccctggggatttagaggaaattgtcaagatggaacctgaagaagctagagaggaaatcagtggatcccctgagcgtgatatttgtgatgacatcaaagtggaacatgctgtggaattggacactggtgccccaagcgaggagttgagcagtgctggagaagtaacgaaacagacagtcttacagaaggaagaggagaggagtcagccaactaaaaccccttcatcttctcaagagccccctgatgaaggaacctcagggacagatgtgaacaaaggatcatcaaagaatgctttgtcctcaatggatcctgaagtgaggcttagtagccccccagggaagccagaagattcatccagtgttgatggtcagtcagtggggactccagttgggccagaaactggaggagagaagaatgggccagaagaagaggaagaagaggactttgatgacctcacccaagatgaggaagatgaaatgtcatcagcttctgaggaatctgtgctttctgtcccagaactccaggaaacaatggagaaactgacttggctggcatctgaaaggcgcatgagtcaggagggtgagtctgaagaagagaattctcaggaggagaactctgagccagaagaagaggaggaagaagaagcagaaggaatggaaagcctgcagaaagaggatgaaatgacggatgaagcagttggagactctgctgagaagcctcctacttttgcttcacctgagactgctccagaagtggagaccagcagaactccaccaggagagagcatcaaagctgctggaaaaggccggaacaatcatcgagctcgcaacaagcggggaagtcgggctcgggccagcaaggacacctccaagctgctgttgctgtatgatgaggacattctcgagcgagatccactcagggagcagaaggacttggcctttgcccaagcttatctgaccagggtgcgagaagccctacaacatatccctggcaagtatgaagacttccttcaagtcatctatgaatttgagtcaagtacccagagacggacggctgtagatctctacaaaagcctgcaaattctgctccaagactggcctcagctgttgaaagactttgctgctttcctgttacctgagcaagctctggcctgtggattatttgaggagcagcaggcttttgagaagagccgcaagttccttcggcagctggagatttgctttgcagagaacccctcacaccaccagaagattatcaaggtcctccaaggctgtgcagactgccttccccaggagatcaccgagctcaagacacagatgtggcagctcctcaagggccacgaccacctgcaggatgagttttctatcttctttgaccacttgcgcccagcagctagccggatgggtgactttgaagagatcaattggactgaggaaaaggagtatgagtttgatggctttgaagaagtggccctgcctgatgtggaagaagaggaggagcctcccaagatacccacagcctcaaagaacaagaggaaaaaagagatcggggtccaaaatcatgataaggagactgaatggccagatggggccaaggactgtgcctgctcctgccatgaaggaggtccagattccaagctgaagaagagcaaaaggcggagctgtagccactgtagcagcaaggtgaggaaagtatcaagggtcccgagggtatcagagctgctgggggattgtttgctaccaagaattgtaccttactga

SEQ ID NO: 48 - DNA, 1344 bp, Homo sapiens
atggaccctagaaatactgctatgttaggattgggttctgattccgaaggtttttcaagaaagagtccttctgccatcagtactggcacattggtcagtaagagagaagtagagctagaaaaaaacacaaaggaggaagaggaccttcgcaaacggaatcgagaaagaaacatcgaagctgggaaagatgatggtttgactgatgcacagcaacagttttcagtgaaagaaacaaacttttcagagggaaatttaaaattgaaaattggcctccaggctaagagaactaaaaaacctccaaagaacttggagaactatgtatgtcgacctgccataaaaacaactattaagcacccaaggaaagcacttaaaagtggaaagatgacggatgaaaagaatgaacactgtccttcaaaacgacccatggatgacagtctcattgcatttcgaacgcgttctaagatgcccctgaaagatgttcccctgggccaattagaggcagagctccaagctccagacatcactccagatatgtatgaccccaatacggcagatgatgaggactggaagatgtggctggggggacttatgaatgatgatgtggggaatgaagatgaagcagatgatgatgatgatccagaatataatttcctggaagacctcgatgaaccagacacagaggatttccggactgaccgggcagtgagaatcaccaaaaaggaagtaaatgagctgatggaagagctgtttgaaactttccaagatgagatgggattctccaacatggaagatgatggcccagaagaggaggagtgtgtagctgagcctcgtcctaactttaacacccctcaagctctacggtttgaggaaccactggccaacctgttaaatgaacaacatcggacagtgaaggagctatttgaacagctgaagatgaagaaatcttcagccaaacagctgcaggaagtagagaaggttaaaccccagagtgagaaagttcatcagactctgattctggacccagcacagaggaagagactccagcagcagatgcagcagcacgttcagctcttgacccaaatccaccttcttgccacctgcaaccccaacctcaatccggaggccactaccaccaggatatttcttaaagagctgggaacctttgctcaaagctccatcgcccttcaccatcagtacaaccccaagtttcagaccctgttccaaccctgtaacttgatgggagctatgcagctgattgaagacttcagcacacatgtcagcattgactgcagccctcataaaactgtcaagaagactggtaggagacagatgtgtcagctttaa

SEQ ID NO: 49 - DNA, 1476 bp, Homo sapiens
atggaccctagaaatactgctatgttaggattgggttctgattccgaaggtttttcaagaaagagtccttctgccatcagtactggcacattggtcagtaagagagaagtagagctagaaaaaaacacaaaggaggaagaggaccttcgcaaacggaatcgagaaagaaacatcgaagctgggaaagatgatggtttgactgatgcacagcaacagttttcagtgaaagaaacaaacttttcagagggaaatttaaaattgaaaattggcctccaggctaagagaactaaaaaacctccaaagaacttggagaactatgtatgtcgacctgccataaaaacaactattaagcacccaaggaaagcacttaaaagtggaaagatgacggatgaaaagaatgaacactgtccttcaaaacgattccaagatgagatgggattctccaacatggaagatgatggcccagaagaggaggagcgtgtggctgagcctcaagctaactttaacacccctcaagctctacggtttgaggaactactggccaacctactaaatgaacaacatcagatagcgaaggaactatttgaacagctgaagatgaagaaaccttcagccaaacagcagaaggaggtagagaaggttaaaccccagtgtaaggaagttcatcagaccctgattctggacccagcacaaaggaagagactccagcagcagatgcagcagcatgttcagctcttgacacaaatccaccttcttgccacctgcaaccccaatctcaatccggaggccagtagcaccaggatatgtcttaaagagctgggaacctttgctcaaagctccatcgcccttcaccatcagtacaaccccaagtttcagaccctgttccaaccctgtaacttgatgggagctatgcagctgattgaagacttcagcacacatgtcagcattgactgcagccctcataaaactgtcaagaagactgccaatgaatttccctgtttgccaaagcaagtggcttggatcctggccacaagcaaggttttcatgtatccagagttacttccagtgtgttccctgaaggcaaagaatccccaggataagatcctcttcaccaaggctgaggacaatttgttagctttaggactgaagcattttgaagggactgagtttcttaaccctctaatcagcaagtaccttctaacctgcaagactgcccgccaactgacagtgagaatcaagaacctcaacatgaacagagctcctgacaacatcattaaattttataagaagaccaaacagctgccagtcctaggaaaatgctgtgaagagatccagccacatcagtggaagccacctatagagagagaagaacaccggctcccattctggttaaagagtgttctcatttccaataggccagtctgccatccatccaggaagaactgcggcacatggctgatggtgctagagaggtag

SEQ ID NO: 50 - DNA, 1794 bp, Homo sapiens
atggaccctagaaatactgctatgttaggattgggttctgattccgaaggtttttcaagaaagagtccttctgccatcagtactggcacattggtcagtaagagagaagtagagctagaaaaaaacacaaaggaggaagaggaccttcgcaaacggaatcgagaaagaaacatcgaagctgggaaagatgatggtttgactgatgcacagcaacagttttcagtgaaagaaacaaacttttcagagggaaatttaaaattgaaaattggcctccaggctaagagaactaaaaaacctccaaagaacttggagaactatgtatgtcgacctgccataaaaacaactattaagcacccaaggaaagcacttaaaagtggaaagatgacggatgaaaagaatgaacactgtccttcaaaacgattttataagaagaccaaacagctgccagtcctaggaaaatgctgtgaagagatccagccacatcagtggaagccacctatagagagagaagaacaccggctcccattctggttaaaggccagtctgccatccatccaggaagaactgcggcacatggctgatggtgctagagaggtaggaaatatgactggaaccactgagatcaactcagatcaaggcctagaaaaagacaactcagagttggggagtgaaactcggtacccactgctattgcctaagggtgtagtcctgaaactgaagccagttgccgaccgtttccccaagaaggcttggagacagaagcgttcatcagtcctgaaacccctccttatccaacccagcccctctctccagcccagcttcaaccctgggaaaacaccagcccaatcaactcattcagaagcccctccgagcaaaatggtgctccggattcctcacccaatacagccagccactgttttacagacagttccaggtgtccctccactgggggtcagtggaggtgagagttttgagtctcctgcagcactgcctgctatgccccctgaggccaggacaagcttccctctgtctgagtcccagactttgctctcttctgcccctgtgcccaaggtaatgatgccctcccctgcctcttccatgtttcgaaagccatatgtgagacggagaccctcaaaaagaaggggagccagggcctttcgctgtatcaaacctgcccctgttatccaccctgcatctgttatcttcactgttcctgctaccactgtgaagattgtgagccttggcggtggctgtaacatgatccagcctgtcaatgcggctgtggcccagagtccccagactattcccatcgccaccctcttggttaaccctacttccttcccctgtccattgaaccagccccttgtggcctcctctgtctcacccttaattgtttctggcaattctgtgaatcttcctataccatccacccctgaagataaggcccacatgaatgtggacattgcttgtgctgtggctgatggggaaaatgcctttcagggcctagaacccaaattagagccccaggaactatctcctctctctgctactgttttccccaaagtggaacatagcccagggcctccaccagtcgataaacagtgccaagaaggattgtcagagaacagtgcctatcgctggaccgttgtgaaaacagaggagggaaggcaagctctggagccgctccctcagggcatccaggagtctctaaacaactcttcccctggggatttagaggaagttgtcaagatggaacctgaagatgctacagaggaaatcagtggatttctttga

SEQ ID NO: 51 - DNA, 5691 bp, Homo sapiens
atggaccctagaaatactgctatgttaggattgggttctgattccgaaggtttttcaagaaagagtccttctgccatcagtactggcacattggtcagtaagagagaagtagagctagaaaaaaacacaaaggaggaagaggaccttcgcaaacggaatcgagaaagaaacatcgaagctgggaaagatgatggtttgactgatgcacagcaacagttttcagtgaaagaaacaaacttttcagagggaaatttaaaattgaaaattggcctccaggctaagagaactaaaaaacctccaaagaacttggagaactatgtatgtcgacctgccataaaaacaactattaagcacccaaggaaagcacttaaaagtggaaagatgacggatgaaaagaatgaacactgtccttcaaaacgacccatggatgacagtctcattgcatttcgaacgcgttctaagatgcccctgaaagatgttcccctgggccaattagaggcagagctccaagctccagacatcactccagatatgtatgaccccaatacggcagatgatgaggactggaagatgtggctggggggacttatgaatgatgatgtggggaatgaagatgaagcagatgatgatgatgatccagaatataatttcctggaagacctcgatgaaccagacacagaggatttccggactgaccgggcagtgagaatcaccaaaaaggaagtaaatgagctgatggaagagctgtttgaaactttccaagatgagatgggattctccaacatggaagatgatggcccagaagaggaggagtgtgtagctgagcctcgtcctaactttaacacccctcaagctctacggtttgaggaaccactggccaacctgttaaatgaacaacatcggacagtgaaggagctatttgaacagctgaagatgaagaaatcttcagccaaacagctgcaggaagtagagaaggttaaaccccagagtgagaaagttcatcagactctgattctggacccagcacagaggaagagactccagcagcagatgcagcagcacgttcagctcttgacccaaatccaccttcttgccacctgcaaccccaacctcaatccggaggccactaccaccaggatatttcttaaagagctgggaacctttgctcaaagctccatcgcccttcaccatcagtacaaccccaagtttcagaccctgttccaaccctgtaacttgatgggagctatgcagctgattgaagacttcagcacacatgtcagcattgactgcagccctcataaaactgtcaagaagactgcgaatgaatttccctgtttgccaaagcaagtggcttggattctggccacaagcaaggttttcatgtatccagagttacttccagtgtgttccctgaaggcaaagaatccccaggataagatcgtcttcaccaaggctgaggacaatttgttagctttaggactgaagcattttgaaggaactgagtttcctaatcctctaatcagcaagtaccttctaacctgcaaaactgcccaccaactgacagtgagaatcaagaacctcaacatgaacagagctcctgacaacatcattaaattttataagaagaccaaacagctgccagtcctaggaaaatgctgtgaagagatccagccacatcagtggaagccacctatagagagagaagaacaccggctcccattctggttaaaggccagtctgccatccatccaggaagaactgcggcacatggctgatggtgctagagaggtaggaaatatgactggaaccactgagatcaactcagatcgaagcctagaaaaagacaatttggagttggggagtgaatctcggtacccactgctattgcctaagggtgtagtcctgaaactgaagccagttgccacccgtttccccaggaaggcttggagacagaagcgttcatcagtcctgaagcccctccttatccaacccagcccctctctccagcccagcttcaaccctgggaaaacaccagcccgatcaactcattcagaagcccctccgagcaaaatggtgctccggattcctcacccaatacagccagccactgttttacagacagttccaggtgtccctccactgggggtcagtggaggtgagagttttgagtctcctgcagcactgcctgctgtgccccctgaggccaggacaagcttccctctgtctgagtcccagactttgctctcttctgcccctgtgcccaaggtaatgctgccctcccttgccccttctaagtttcgaaagccatatgtgagacggagaccctcaaagagaagaggagtcaaggcctctccctgtatgaaacctgcccctgttatccaccaccctgcatctgttatcttcactgttcctgctaccactgtgaagattgtgagccttggcggtggctgtaacatgatccagcctgtcaatgcggctgtggcccagagtccccagactattcccatcactaccctcttggttaaccctacttccttcccctgtccattgaaccagtcccttgtggcctcctctgtctcacccttaattgtttctggcaattctgtgaatcttcctataccatccacccctgaagataaggcccacgtgaatgtggacattgcttgtgctgtggctgatggggaaaatgcctttcagggcctagaacccaaattagagccccaggaactatctcctctctctgctactgttttcccgaaagtggaacatagcccagggcctccactagcagatgcagagtgccaagaaggattgtcagagaatagtgcctgtcgctggaccgttgtgaaaacagaggaggggaggcaagctctggagccgctccctcagggcatccaggagtctctaaacaaccctacccctggggatttagaggaaattgtcaagatggaacctgaagaagctagagaggaaatcagtggatcccctgagcgtgatatttgtgatgacatcaaagtggaacatgctgtggaattggacactggtgccccaagcgaggagttgagcagtgctggagaagtaacgaaacagacagtcttacagaaggaagaggagaggagtcagccaactaaaaccccttcatcttctcaagagccccctgatgaaggaacctcagggacagatgtgaacaaaggatcatcaaagaatgctttgtcctcaatggatcctgaagtgaggcttagtagccccccagggaagccagaagattcatccagtgttgatggtcagtcagtggggactccagttgggccagaaactggaggagagaagaatgggccagaagaagaggaagaagaggactttgatgacctcacccaagatgaggaagatgaaatgtcatcagcttctgaggaatctgtgctttctgtcccagaactccaggaaacaatggagaaactgacttggctggcatctgaaaggcgcatgagtcaggagggtgagtctgaagaagagaattctcaggaggagaactctgagccagaagaagaggaggaagaagaagcagaaggaatggaaagcctgcagaaagaggatgaaatgacggatgaagcagttggagactctgctgagaagcctcctacttttgcttcacctgagactgctccagaagtggagaccagcagaactccaccaggagagagcatcaaagctgctggaaaaggccggaacaatcatcgagctcgcaacaagcggggaagtcgggctcgggccagcaaggacacctccaagctgctgttgctgtatgatgaggacattctcgagcgagatccactcagggagcagaaggacttggcctttgcccaagcttatctgaccagggtgcgagaagccctacaacatatccctggcaagtatgaagacttccttcaagtcatctatgaatttgagtcaagtacccagagacggacggctgtagatctctacaaaagcctgcaaattctgctccaagactggcctcagctgttgaaagactttgctgctttcctgttacctgagcaagctctggcctgtggattatttgaggagcagcaggcttttgagaagagccgcaagttccttcggcagctggagatttgctttgcagagaacccctcacaccaccagaagattatcaaggtcctccaaggctgtgcagactgccttccccaggagatcaccgagctcaagacacagatgtggcagctcctcaagggccacgaccacctgcaggatgagttttctatcttctttgaccacttgcgcccagcagctagccggatgggtgactttgaagagatcaattggactgaggaaaaggagtatgagtttgatggctttgaagaagtggccctgcctgatgtggaagaagaggaggagcctcccaagatacccacagcctcaaagaacaagaggaaaaaagagatcggggtccaaaatcatgataaggagactgaatggccagatggggccaaggactgtgcctgctcctgccatgaaggaggtccagattccaagctgaagaagagcaaaaggcggagctgtagccactgtagcagcaaggtctgtgacagcaaatcctacaagagcaaggagccccatgagttggtgggcagcagcccccaccgagaggctagtcctatgcctggtgctaaggaagctgggcagggcaaggatatgatggaagaggaagccccagaggagcgggagagcactgaggccacccagagcaggactgtcaggaccaccagaaagggagagatgcctgtttcaggattggcagtggggagcactttgccatcccctcgagaagtgactgttacagaacggctcctcctggatggcccaccacctcattcaccagagactcctcaatttccccccacaactggagctgtactgtacactgttaagagaaaccaggttgggcctgaggttcgctcctgccccaaggcatcccccagacttcagaaagagagggagggccaaaaggcagtgagtgagtcagaggctttgatgctggtctgggatgcatcagaaactgagaaattgcctggtaccgtggaaccccctgcttccttcctgagtcctgtttcctcaaagaccagagatgcagggagaagacatgtgtccgggaaaccagacactcaagagagatggctgccctcaagcagagctcgggtgaagacaagagacaggacgtgccctgtccatgaatctccatcaggaattgacacctcagagacttctcccaaagcccctagagggggtttggctaaagacagtggaacacaggccaagggtccagagggggagcagcagccaaaggccgcagaagctacggtgtgtgccaacaacagcaaggtcagctccactggggaaaaggttgtcctgtggacaagggaagctgaccgtgtgatcctcaccatgtgccaggagcaaggggcacagccacagaccttcaacatcatctcccagcagctgggaaataagacccctgctgaggtttcccaccgttttcgagaactcatgcagctcttccacactgcctgtgaagccagctctgaggatgaggatgatgcaaccagtaccagcaatgcagaccagctgtctgaccatggggaccttctgtctgaagaggagctggatgaatga

SEQ ID NO: 52 - DNA, 1404 bp, Homo sapiens
atgaacagagctcctgacaacatcattaaattttataagaagaccaaacagctgccagtcctaggaaaatgctgtgaagagatccagccacatcagtggaagccacctatagagagagaagaacaccggctcccattctggttaaaggccagtctgccatccatccaggaagaactgcggcacatggctgatggtgctagagaggtaggaaatatgactggaaccactgagatcaactcagatcaaggcctagaaaaagacaactcagagttggggagtgaaactcggtacccactgctattgcctaagggtgtagtcctgaaactgaagccagttgccgaccgtttccccaagaaggcttggagacagaagcgttcatcagtcctgaaacccctccttatccaacccagcccctctctccagcccagcttcaaccctgggaaaacaccagcccaatcaactcattcagaagcccctccgagcaaaatggtgctccggattcctcacccaatacagccagccactgttttacagacagttccaggtgtccctccactgggggtcagtggaggtgagagttttgagtctcctgcagcactgcctgctatgccccctgaggccaggacaagcttccctctgtctgagtcccagactttgctctcttctgcccctgtgcccaaggtaatgatgccctcccctgcctcttccatgtttcgaaagccatatgtgagacggagaccctcaaaaagaaggggagccagggcctttcgctgtatcaaacctgcccctgttatccaccctgcatctgttatcttcactgttcctgctaccactgtgaagattgtgagccttggcggtggctgtaacatgatccagcctgtcaatgcggctgtggcccagagtccccagactattcccatcgccaccctcttggttaaccctacttccttcccctgtccattgaaccagccccttgtggcctcctctgtctcacccttaattgtttctggcaattctgtgaatcttcctataccatccacccctgaagataaggcccacatgaatgtggacattgcttgtgctgtggctgatggggaaaatgcctttcagggcctagaacccaaattagagccccaggaactatctcctctctctgctactgttttccccaaagtggaacatagcccagggcctccaccagtcgataaacagtgccaagaaggattgtcagagaacagtgcctatcgctggaccgttgtgaaaacagaggagggaaggcaagctctggagccgctccctcagggcatccaggagtctctaaacaactcttcccctggggatttagaggaagttgtcaagatggaacctgaagatgctacagaggaaatcagtggatttctttga

SEQ ID NO: 53 - DNA, 921 bp, Homo sapiens
atggaccctagaaatactgctatgttaggattgggttctgattccgaaggtttttcaagaaagagtccttctgccatcagtactggcacattggtcagtaagagagaagtagagctagaaaaaaacacaaaggaggaagaggaccttcgcaaacggaatcgagaaagaaacatcgaagctgggaaagatgatggtttgactgatgcacagcaacagttttcagtgaaagaaacaaacttttcagagggaaatttaaaattgaaaattggcctccaggctaagagaactaaaaaacctccaaagaacttggagaactatgtatgtcgacctgccataaaaacaactattaagcacccaaggaaagcacttaaaagtggaaagatgacggatgaaaagaatgaacactgtccttcaaaacgacccatggatgacagtctcattgcatttcgaacgcgttctaagatgcccctgaaagatgttcccctgggccaattagaggcagagctccaagctccagacatcactccagatatgtatgaccccaatacggcagatgatgaggactggaagatgtggctggggggacttatgaatgatgatgtggggaatgaagatgaagcagatgatgatgatgatccagaatataatttcctggaagacctcgatgaaccagacacagaggatttccggactgaccgggcagtgagaatcaccaaaaaggaagtaaatgagctgatggaagagctgtttgaaactgtgagtaatgatcctcgagtgagaacacgggattttaagtcagttctccagcaagatgtgtcatttggtctctgtgatgctccctctaggagagggggtctgactgaaccaattctccttttagtctacctgggaaagaatataatgacaagggaattttgctaa

SEQ ID NO: 54 - DNA, 2652 bp, Homo sapiens
atggaccctagaaatactgctatgttaggattgggttctgattccgaaggtttttcaagaaagagtccttctgccatcagtactggcacattggtcagtaagagagaagtagagctagaaaaaaacacaaaggaggaagaggaccttcgcaaacggaatcgagaaagaaacatcgaagctgggaaagatgatggtttgactgatgcacagcaacagttttcagtgaaagaaacaaacttttcagagggaaatttaaaattgaaaattggcctccaggctaagagaactaaaaaacctccaaagaacttggagaactatgtatgtcgacctgccataaaaacaactattaagcacccaaggaaagcacttaaaagtggaaagatgacggatgaaaagaatgaacactgtccttcaaaacgattccaagatgagatgggattctccaacatggaagatgatggcccagaagaggaggagcgtgtggctgagcctcaagctaactttaacacccctcaagctctacggtttgaggaactactggccaacctactaaatgaacaacatcagatagcgaaggaactatttgaacagctgaagatgaagaaaccttcagccaaacagcagaaggaggtagagaaggttaaaccccagtgtaaggaagttcatcagaccctgattctggacccagcacaaaggaagagactccagcagcagatgcagcagcatgttcagctcttgacacaaatccaccttcttgccacctgcaaccccaatctcaatccggaggccagtagcaccaggatatgtcttaaagagctgggaacctttgctcaaagctccatcgcccttcaccatcagtacaaccccaagtttcagaccctgttccaaccctgtaacttgatgggagctatgcagctgattgaagacttcagcacacatgtcagcattgactgcagccctcataaaactgtcaagaagactgccaatgaatttccctgtttgccaaagcaagtggcttggatcctggccacaagcaaggttttcatgtatccagagttacttccagtgtgttccctgaaggcaaagaatccccaggataagatcctcttcaccaaggctgaggacaatttgttagctttaggactgaagcattttgaagggactgagtttcttaaccctctaatcagcaagtaccttctaacctgcaagactgcccgccaactgacagtgagaatcaagaacctcaacatgaacagagctcctgacaacatcattaaattttataagaagaccaaacagctgccagtcctaggaaaatgctgtgaagagatccagccacatcagtggaagccacctatagagagagaagaacaccggctcccattctggttaaaggccagtctgccatccatccaggaagaactgcggcacatggctgatggtgctagagaggtaggaaatatgactggaaccactgagatcaactcagatcaaggcctagaaaaagacaactcagagttggggagtgaaactcggtacccactgctattgcctaagggtgtagtcctgaaactgaagccagttgccgaccgtttccccaagaaggcttggagacagaagcgttcatcagtcctgaaacccctccttatccaacccagcccctctctccagcccagcttcaaccctgggaaaacaccagcccaatcaactcattcagaagcccctccgagcaaaatggtgctccggattcctcacccaatacagccagccactgttttacagacagttccaggtgtccctccactgggggtcagtggaggtgagagttttgagtctcctgcagcactgcctgctatgccccctgaggccaggacaagcttccctctgtctgagtcccagactttgctctcttctgcccctgtgcccaaggtaatgatgccctcccctgcctcttccatgtttcgaaagccatatgtgagacggagaccctcaaaaagaaggggagccagggcctttcgctgtatcaaacctgcccctgttatccaccctgcatctgttatcttcactgttcctgctaccactgtgaagattgtgagccttggcggtggctgtaacatgatccagcctgtcaatgcggctgtggcccagagtccccagactattcccatcgccaccctcttggttaaccctacttccttcccctgtccattgaaccagccccttgtggcctcctctgtctcacccttaattgtttctggcaattctgtgaatcttcctataccatccacccctgaagataaggcccacatgaatgtggacattgcttgtgctgtggctgatggggaaaatgcctttcagggcctagaacccaaattagagccccaggaactatctcctctctctgctactgttttccccaaagtggaacatagcccagggcctccaccagtcgataaacagtgccaagaaggattgtcagagaacagtgcctatcgctggaccgttgtgaaaacagaggagggaaggcaagctctggagccgctccctcagggcatccaggagtctctaaacaactcttcccctggggatttagaggaagttgtcaagatggaacctgaagatgctacagaggaaatcagtggatttctttga

SEQ ID NO: 55 - DNA, 618 bp, Homo sapiens
atggaccctagaaatactgctatgttaggattgggttctgattccgaaggtttttcaagaaagagtccttctgccatcagtactggcacattggtcagtaagagagaagtagagctagaaaaaaacacaaaggaggaagaggaccttcgcaaacggaatcgagaaagaaacatcgaagctgggaaagatgatggtttgactgatgcacagcaacagttttcagtgaaagaaacaaacttttcagagggaaatttaaaattgaaaattggcctccaggctaagagaactaaaaaacctccaaagaacttggagaactatgtatgtcgacctgccataaaaacaactattaagcacccaaggaaagcacttaaaagtggaaagatgacggatgaaaagaatgaacactgtccttcaaaacgattttataagaagaccaaacagctgccagtcctaggaaaatgctgtgaagagatccagccacatcagtggaagccacctatagagagagaagaacaccggctcccattctggttaaagagtgttctcatttccaataggccagtctgccatccatccaggaagaactgcggcacatggctgatggtgctagagaggtag

SEQ ID NO: 56 - DNA, 4500 bp, Homo sapiens
atggaccctagaaatactgctatgttaggattgggttctgattccgaaggtttttcaagaaagagtccttctgccatcagtactggcacattggtcagtaagagagaagtagagctagaaaaaaacacaaaggaggaagaggaccttcgcaaacggaatcgagaaagaaacatcgaagctgggaaagatgatggtttgactgatgcacagcaacagttttcagtgaaagaaacaaacttttcagagggaaatttaaaattgaaaattggcctccaggctaagagaactaaaaaacctccaaagaacttggagaactatgtatgtcgacctgccataaaaacaactattaagcacccaaggaaagcacttaaaagtggaaagatgacggatgaaaagaatgaacactgtccttcaaaacgattttataagaagaccaaacagctgccagtcctaggaaaatgctgtgaagagatccagccacatcagtggaagccacctatagagagagaagaacaccggctcccattctggttaaaggccagtctgccatccatccaggaagaactgcggcacatggctgatggtgctagagaggtaggaaatatgactggaaccactgagatcaactcagatcgaagcctagaaaaagacaatttggagttggggagtgaatctcggtacccactgctattgcctaagggtgtagtcctgaaactgaagccagttgccacccgtttccccaggaaggcttggagacagaagcgttcatcagtcctgaagcccctccttatccaacccagcccctctctccagcccagcttcaaccctgggaaaacaccagcccgatcaactcattcagaagcccctccgagcaaaatggtgctccggattcctcacccaatacagccagccactgttttacagacagttccaggtgtccctccactgggggtcagtggaggtgagagttttgagtctcctgcagcactgcctgctgtgccccctgaggccaggacaagcttccctctgtctgagtcccagactttgctctcttctgcccctgtgcccaaggtaatgctgccctcccttgccccttctaagtttcgaaagccatatgtgagacggagaccctcaaagagaagaggagtcaaggcctctccctgtatgaaacctgcccctgttatccaccaccctgcatctgttatcttcactgttcctgctaccactgtgaagattgtgagccttggcggtggctgtaacatgatccagcctgtcaatgcggctgtggcccagagtccccagactattcccatcactaccctcttggttaaccctacttccttcccctgtccattgaaccagtcccttgtggcctcctctgtctcacccttaattgtttctggcaattctgtgaatcttcctataccatccacccctgaagataaggcccacgtgaatgtggacattgcttgtgctgtggctgatggggaaaatgcctttcagggcctagaacccaaattagagccccaggaactatctcctctctctgctactgttttcccgaaagtggaacatagcccagggcctccactagcagatgcagagtgccaagaaggattgtcagagaatagtgcctgtcgctggaccgttgtgaaaacagaggaggggaggcaagctctggagccgctccctcagggcatccaggagtctctaaacaaccctacccctggggatttagaggaaattgtcaagatggaacctgaagaagctagagaggaaatcagtggatcccctgagcgtgatatttgtgatgacatcaaagtggaacatgctgtggaattggacactggtgccccaagcgaggagttgagcagtgctggagaagtaacgaaacagacagtcttacagaaggaagaggagaggagtcagccaactaaaaccccttcatcttctcaagagccccctgatgaaggaacctcagggacagatgtgaacaaaggatcatcaaagaatgctttgtcctcaatggatcctgaagtgaggcttagtagccccccagggaagccagaagattcatccagtgttgatggtcagtcagtggggactccagttgggccagaaactggaggagagaagaatgggccagaagaagaggaagaagaggactttgatgacctcacccaagatgaggaagatgaaatgtcatcagcttctgaggaatctgtgctttctgtcccagaactccaggaaacaatggagaaactgacttggctggcatctgaaaggcgcatgagtcaggagggtgagtctgaagaagagaattctcaggaggagaactctgagccagaagaagaggaggaagaagaagcagaaggaatggaaagcctgcagaaagaggatgaaatgacggatgaagcagttggagactctgctgagaagcctcctacttttgcttcacctgagactgctccagaagtggagaccagcagaactccaccaggagagagcatcaaagctgctggaaaaggccggaacaatcatcgagctcgcaacaagcggggaagtcgggctcgggccagcaaggacacctccaagctgctgttgctgtatgatgaggacattctcgagcgagatccactcagggagcagaaggacttggcctttgcccaagcttatctgaccagggtgcgagaagccctacaacatatccctggcaagtatgaagacttccttcaagtcatctatgaatttgagtcaagtacccagagacggacggctgtagatctctacaaaagcctgcaaattctgctccaagactggcctcagctgttgaaagactttgctgctttcctgttacctgagcaagctctggcctgtggattatttgaggagcagcaggcttttgagaagagccgcaagttccttcggcagctggagatttgctttgcagagaacccctcacaccaccagaagattatcaaggtcctccaaggctgtgcagactgccttccccaggagatcaccgagctcaagacacagatgtggcagctcctcaagggccacgaccacctgcaggatgagttttctatcttctttgaccacttgcgcccagcagctagccggatgggtgactttgaagagatcaattggactgaggaaaaggagtatgagtttgatggctttgaagaagtggccctgcctgatgtggaagaagaggaggagcctcccaagatacccacagcctcaaagaacaagaggaaaaaagagatcggggtccaaaatcatgataaggagactgaatggccagatggggccaaggactgtgcctgctcctgccatgaaggaggtccagattccaagctgaagaagagcaaaaggcggagctgtagccactgtagcagcaaggtctgtgacagcaaatcctacaagagcaaggagccccatgagttggtgggcagcagcccccaccgagaggctagtcctatgcctggtgctaaggaagctgggcagggcaaggatatgatggaagaggaagccccagaggagcgggagagcactgaggccacccagagcaggactgtcaggaccaccagaaagggagagatgcctgtttcagcaggattggcagtggggagcactttgccatcccctcgagaagtgactgttacagaacggctcctcctggatggcccaccacctcattcaccagagactcctcaatttccccccacaactggagctgtactgtacactgttaagagaaaccaggttgggcctgaggttcgctcctgccccaaggcatcccccagacttcagaaagagagggagggccaaaaggcagtgagtgagtcagaggctttgatgctggtctgggatgcatcagaaactgagaaattgcctggtaccgtggaaccccctgcttccttcctgagtcctgtttcctcaaagaccagagatgcagggagaagacatgtgtccgggaaaccagacactcaagagagatggctgccctcaagcagagctcgggtgaagacaagagacaggacgtgccctgtccatgaatctccatcaggaattgacacctcagagacttctcccaaagcccctagagggggtttggctaaagacagtggaacacaggccaagggtccagagggggagcagcagccaaaggccgcagaagctacggtgtgtgccaacaacagcaaggtcagctccactggggaaaaggttgtcctgtggacaagggaagctgaccgtgtgatcctcaccatgtgccaggagcaaggggcacagccacagaccttcaacatcatctcccagcagctgggaaataagacccctgctgaggtttcccaccgttttcgagaactcatgcagctcttccacactgcctgtgaagccagctctgaggatgaggatgatgcaaccagtaccagcaatgcagaccagctgtctgaccatggggaccttctgtctgaagaggagctggatgaatga

SEQ ID NO: 57 - DNA, 2364 bp, Homo sapiens
atggaccctagaaatactgctatgttaggattgggttctgattccgaaggtttttcaagaaagagtccttctgccatcagtactggcacattggtcagtaagagagaagtagagctagaaaaaaacacaaaggaggaagaggaccttcgcaaacggaatcgagaaagaaacatcgaagctgggaaagatgatggtttgactgatgcacagcaacagttttcagtgaaagaaacaaacttttcagagggaaatttaaaattgaaaattggcctccaggctaagagaactaaaaaacctccaaagaacttggagaactatgtatgtcgacctgccataaaaacaactattaagcacccaaggaaagcacttaaaagtggaaagatgacggatgaaaagaatgaacactgtccttcaaaacgattttataagaagaccaaacagctgccagtcctaggaaaatgctgtgaagagatccagccacatcagtggaagccacctatagagagagaagaacaccggctcccattctggttaaaggccagtctgccatccatccaggaagaactgcggcacatggctgatggtgctagagaggtaggaaatatgactggaaccactgagatcaactcagatcgaagcctagaaaaagacaatttggagttggggagtgaatctcggtacccactgctattgcctaagggtgtagtcctgaaactgaagccagttgccacccgtttccccaggaaggcttggagacagaagcgttcatcagtcctgaagcccctccttatccaacccagcccctctctccagcccagcttcaaccctgggaaaacaccagcccgatcaactcattcagaagcccctccgagcaaaatggtgctccggattcctcacccaatacagccagccactgttttacagacagttccaggtgtccctccactgggggtcagtggaggtgagagttttgagtctcctgcagcactgcctgctgtgccccctgaggccaggacaagcttccctctgtctgagtcccagactttgctctcttctgcccctgtgcccaaggtaatgctgccctcccttgccccttctaagtttcgaaagccatatgtgagacggagaccctcaaagagaagaggagtcaaggcctctccctgtatgaaacctgcccctgttatccaccaccctgcatctgttatcttcactgttcctgctaccactgtgaagattgtgagccttggcggtggctgtaacatgatccagcctgtcaatgcggctgtggcccagagtccccagactattcccatcactaccctcttggttaaccctacttccttcccctgtccattgaaccagtcccttgtggcctcctctgtctcacccttaattgtttctggcaattctgtgaatcttcctataccatccacccctgaagataaggcccacgtgaatgtggacattgcttgtgctgtggctgatggggaaaatgcctttcagggcctagaacccaaattagagccccaggaactatctcctctctctgctactgttttcccgaaagtggaacatagcccagggcctccactagcagatgcagagtgccaagaaggattgtcagagaatagtgcctgtcgctggaccgttgtgaaaacagaggaggggaggcaagctctggagccgctccctcagggcatccaggagtctctaaacaaccctacccctggggatttagaggaaattgtcaagatggaacctgaagaagctagagaggaaatcagtggatcccctgagcgtgatatttgtgatgacatcaaagtggaacatgctgtggaattggacactggtgccccaagcgaggagttgagcagtgctggagaagtaacgaaacagacagtcttacagaaggaagaggagaggagtcagccaactaaaaccccttcatcttctcaagagccccctgatgaaggaacctcagggacagatgtgaacaaaggatcatcaaagaatgctttgtcctcaatggatcctgaagtgaggcttagtagccccccagggaagccagaagattcatccagtgttgatggtcagtcagtggggactccagttgggccagaaactggaggagagaagaatgggccagaagaagaggaagaagaggactttgatgacctcacccaagatgaggaagatgaaatgtcatcagcttctgaggaatctgtgctttctgtcccagaactccaggtgagagctggagaatattctcaagtatttcgtggactcagtaatatgtatcacttattgatatgccacctgcttgcttgctgcactatggatagtcctaaaatcatttgtatttga

SEQ ID NO: 58 - DNA, 1473 bp, Homo sapiens
atggaccctagaaatactgctatgttaggattgggttctgattccgaaggtttttcaagaaagagtccttctgccatcagtactggcacattggtcagtaagagagaagtagagctagaaaaaaacacaaaggaggaagaggaccttcgcaaacggaatcgagaaagaaacatcgaagctgggaaagatgatggtttgactgatgcacagcaacagttttcagtgaaagaaacaaacttttcagagggaaatttaaaattgaaaattggcctccaggctaagagaactaaaaaacctccaaagaacttggagaactatgtatgtcgacctgccataaaaacaactattaagcacccaaggaaagcacttaaaagtggaaagatgacggatgaaaagaatgaacactgtccttcaaaacgattccaagatgagatgggattctccaacatggaagatgatggcccagaagaggaggagcgtgtggctgagcctcaagctaactttaacacccctcaagctctacggtttgaggaactactggccaacctactaaatgaacaacatcagatagcgaaggaactatttgaacagctgaagatgaagaaaccttcagccaaacagcagaaggaggtagagaaggttaaaccccagtgtaaggaagttcatcagaccctgattctggacccagcacaaaggaagagactccagcagcagatgcagcagcatgttcagctcttgacacaaatccaccttcttgccacctgcaaccccaatctcaatccggaggccagtagcaccaggatatgtcttaaagagctgggaacctttgctcaaagctccatcgcccttcaccatcagtacaaccccaagtttcagaccctgttccaaccctgtaacttgatgggagctatgcagctgattgaagacttcagcacacatgtcagcattgactgcagccctcataaaactgtcaagaagactgccaatgaatttccctgtttgccaaagcaagtggcttggatcctggccacaagcaaggttttcatgtatccagagttacttccagtgtgttccctgaaggcaaagaatccccaggataagatcctcttcaccaaggctgaggacaatttgttagctttaggactgaagcattttgaagggactgagtttcttaaccctctaatcagcaagtaccttctaacctgcaagactgcccgccaactgacagtgagaatcaagaacctcaacatgaacagagctcctgacaacatcattaaattttataagaagaccaaacagctgccagtcctaggaaaatgctgtgaagagatccagccacatcagtggaagccacctatagagagagaagaacaccggctcccattctggttaaaggtacagccctcttcctcgaagtctgtaggaggcagaaggtcactgaaagttctgagagaatatcaaggacttccttaa

SEQ ID NO: 59 - DNA, 834 bp, Homo sapiens
atggatgacagtctcattgcatttcgaacgcgttctaagatgcccctgaaagatgttcccctgggccaattagaggcagagctccaagctccagacatcactccagatatgtatgaccccaatacggcagatgatgaggactggaagatgtggctggggggacttatgaatgatgatgtggggaatgaagatgaagcagatgatgatgatgatccagaatataatttcctggaagacctcgatgaaccagacacagaggatttccggactgaccgggcagtgagaatcaccaaaaaggaagtaaatgagctgatggaagagctgtttgaaactttccaagatgagatgggattctccaacatggaagatgatggcccagaagaggaggagtgtgtagctgagcctcgtcctaactttaacacccctcaagctctacggtttgaggaaccactggccaacctgttaaatgaacaacatcggacagtgaaggagctatttgaacagctgaagatgaagaaatcttcagccaaacagctgcaggaagtagagaaggttaaaccccagagtgagaaagttcatcagactctgattctggacccagcacagaggaagagactccagcagcagatgcagcagaaagagctgggaacctttgctcaaagctccatcgcccttcaccatcagtacaaccccaagtttcagaccctgttccaaccctgtaacttgatgggagctatgcagctgattgaagacttcagcacacatgtcagcattgactgcagccctcataaaactgtcaagaagactggtaggagacagatgtgtcagctttaa

SEQ ID NO: 60 - DNA, 5694 bp, Homo sapiens
atggaccctagaaatactgctatgttaggattgggttctgattccgaaggtttttcaagaaagagtccttctgccatcagtactggcacattggtcagtaagagagaagtagagctagaaaaaaacacaaaggaggaagaggaccttcgcaaacggaatcgagaaagaaacatcgaagctgggaaagatgatggtttgactgatgcacagcaacagttttcagtgaaagaaacaaacttttcagagggaaatttaaaattgaaaattggcctccaggctaagagaactaaaaaacctccaaagaacttggagaactatgtatgtcgacctgccataaaaacaactattaagcacccaaggaaagcacttaaaagtggaaagatgacggatgaaaagaatgaacactgtccttcaaaacgacccatggatgacagtctcattgcatttcgaacgcgttctaagatgcccctgaaagatgttcccctgggccaattagaggcagagctccaagctccagacatcactccagatatgtatgaccccaatacggcagatgatgaggactggaagatgtggctggggggacttatgaatgatgatgtggggaatgaagatgaagcagatgatgatgatgatccagaatataatttcctggaagacctcgatgaaccagacacagaggatttccggactgaccgggcagtgagaatcaccaaaaaggaagtaaatgagctgatggaagagctgtttgaaactttccaagatgagatgggattctccaacatggaagatgatggcccagaagaggaggagtgtgtagctgagcctcgtcctaactttaacacccctcaagctctacggtttgaggaaccactggccaacctgttaaatgaacaacatcggacagtgaaggagctatttgaacagctgaagatgaagaaatcttcagccaaacagctgcaggaagtagagaaggttaaaccccagagtgagaaagttcatcagactctgattctggacccagcacagaggaagagactccagcagcagatgcagcagcacgttcagctcttgacccaaatccaccttcttgccacctgcaaccccaacctcaatccggaggccactaccaccaggatatttcttaaagagctgggaacctttgctcaaagctccatcgcccttcaccatcagtacaaccccaagtttcagaccctgttccaaccctgtaacttgatgggagctatgcagctgattgaagacttcagcacacatgtcagcattgactgcagccctcataaaactgtcaagaagactgcgaatgaatttccctgtttgccaaagcaagtggcttggattctggccacaagcaaggttttcatgtatccagagttacttccagtgtgttccctgaaggcaaagaatccccaggataagatcgtcttcaccaaggctgaggacaatttgttagctttaggactgaagcattttgaaggaactgagtttcctaatcctctaatcagcaagtaccttctaacctgcaaaactgcccaccaactgacagtgagaatcaagaacctcaacatgaacagagctcctgacaacatcattaaattttataagaagaccaaacagctgccagtcctaggaaaatgctgtgaagagatccagccacatcagtggaagccacctatagagagagaagaacaccggctcccattctggttaaaggccagtctgccatccatccaggaagaactgcggcacatggctgatggtgctagagaggtaggaaatatgactggaaccactgagatcaactcagatcgaagcctagaaaaagacaatttggagttggggagtgaatctcggtacccactgctattgcctaagggtgtagtcctgaaactgaagccagttgccacccgtttccccaggaaggcttggagacagaagcgttcatcagtcctgaagcccctccttatccaacccagcccctctctccagcccagcttcaaccctgggaaaacaccagcccgatcaactcattcagaagcccctccgagcaaaatggtgctccggattcctcacccaatacagccagccactgttttacagacagttccaggtgtccctccactgggggtcagtggaggtgagagttttgagtctcctgcagcactgcctgctgtgccccctgaggccaggacaagcttccctctgtctgagtcccagactttgctctcttctgcccctgtgcccaaggtaatgctgccctcccttgccccttctaagtttcgaaagccatatgtgagacggagaccctcaaagagaagaggagtcaaggcctctccctgtatgaaacctgcccctgttatccaccaccctgcatctgttatcttcactgttcctgctaccactgtgaagattgtgagccttggcggtggctgtaacatgatccagcctgtcaatgcggctgtggcccagagtccccagactattcccatcactaccctcttggttaaccctacttccttcccctgtccattgaaccagtcccttgtggcctcctctgtctcacccttaattgtttctggcaattctgtgaatcttcctataccatccacccctgaagataaggcccacgtgaatgtggacattgcttgtgctgtggctgatggggaaaatgcctttcagggcctagaacccaaattagagccccaggaactatctcctctctctgctactgttttcccgaaagtggaacatagcccagggcctccactagcagatgcagagtgccaagaaggattgtcagagaatagtgcctgtcgctggaccgttgtgaaaacagaggaggggaggcaagctctggagccgctccctcagggcatccaggagtctctaaacaaccctacccctggggatttagaggaaattgtcaagatggaacctgaagaagctagagaggaaatcagtggatcccctgagcgtgatatttgtgatgacatcaaagtggaacatgctgtggaattggacactggtgccccaagcgaggagttgagcagtgctggagaagtaacgaaacagacagtcttacagaaggaagaggagaggagtcagccaactaaaaccccttcatcttctcaagagccccctgatgaaggaacctcagggacagatgtgaacaaaggatcatcaaagaatgctttgtcctcaatggatcctgaagtgaggcttagtagccccccagggaagccagaagattcatccagtgttgatggtcagtcagtggggactccagttgggccagaaactggaggagagaagaatgggccagaagaagaggaagaagaggactttgatgacctcacccaagatgaggaagatgaaatgtcatcagcttctgaggaatctgtgctttctgtcccagaactccaggaaacaatggagaaactgacttggctggcatctgaaaggcgcatgagtcaggagggtgagtctgaagaagagaattctcaggaggagaactctgagccagaagaagaggaggaagaagaagcagaaggaatggaaagcctgcagaaagaggatgaaatgacggatgaagcagttggagactctgctgagaagcctcctacttttgcttcacctgagactgctccagaagtggagaccagcagaactccaccaggagagagcatcaaagctgctggaaaaggccggaacaatcatcgagctcgcaacaagcggggaagtcgggctcgggccagcaaggacacctccaagctgctgttgctgtatgatgaggacattctcgagcgagatccactcagggagcagaaggacttggcctttgcccaagcttatctgaccagggtgcgagaagccctacaacatatccctggcaagtatgaagacttccttcaagtcatctatgaatttgagtcaagtacccagagacggacggctgtagatctctacaaaagcctgcaaattctgctccaagactggcctcagctgttgaaagactttgctgctttcctgttacctgagcaagctctggcctgtggattatttgaggagcagcaggcttttgagaagagccgcaagttccttcggcagctggagatttgctttgcagagaacccctcacaccaccagaagattatcaaggtcctccaaggctgtgcagactgccttccccaggagatcaccgagctcaagacacagatgtggcagctcctcaagggccacgaccacctgcaggatgagttttctatcttctttgaccacttgcgcccagcagctagccggatgggtgactttgaagagatcaattggactgaggaaaaggagtatgagtttgatggctttgaagaagtggccctgcctgatgtggaagaagaggaggagcctcccaagatacccacagcctcaaagaacaagaggaaaaaagagatcggggtccaaaatcatgataaggagactgaatggccagatggggccaaggactgtgcctgctcctgccatgaaggaggtccagattccaagctgaagaagagcaaaaggcggagctgtagccactgtagcagcaaggtctgtgacagcaaatcctacaagagcaaggagccccatgagttggtgggcagcagcccccaccgagaggctagtcctatgcctggtgctaaggaagctgggcagggcaaggatatgatggaagaggaagccccagaggagcgggagagcactgaggccacccagagcaggactgtcaggaccaccagaaagggagagatgcctgtttcagcaggattggcagtggggagcactttgccatcccctcgagaagtgactgttacagaacggctcctcctggatggcccaccacctcattcaccagagactcctcaatttccccccacaactggagctgtactgtacactgttaagagaaaccaggttgggcctgaggttcgctcctgccccaaggcatcccccagacttcagaaagagagggagggccaaaaggcagtgagtgagtcagaggctttgatgctggtctgggatgcatcagaaactgagaaattgcctggtaccgtggaaccccctgcttccttcctgagtcctgtttcctcaaagaccagagatgcagggagaagacatgtgtccgggaaaccagacactcaagagagatggctgccctcaagcagagctcgggtgaagacaagagacaggacgtgccctgtccatgaatctccatcaggaattgacacctcagagacttctcccaaagcccctagagggggtttggctaaagacagtggaacacaggccaagggtccagagggggagcagcagccaaaggccgcagaagctacggtgtgtgccaacaacagcaaggtcagctccactggggaaaaggttgtcctgtggacaagggaagctgaccgtgtgatcctcaccatgtgccaggagcaaggggcacagccacagaccttcaacatcatctcccagcagctgggaaataagacccctgctgaggtttcccaccgttttcgagaactcatgcagctcttccacactgcctgtgaagccagctctgaggatgaggatgatgcaaccagtaccagcaatgcagaccagctgtctgaccatggggaccttctgtctgaagaggagctggatgaatga

SEQ ID NO: 61 - DNA, 510 bp, Homo sapiens
atgctgctcctctgtcacgctctcgctatagctgttgtccagatcgttatcttctcagaaagctgggcatttgccaagaacatcaacttctataatgtgaggcctcctctcgaccctacaccatttccaaatagcttcaagtgctttacttgtgaaaacgcaggggataattataactgcaatcgatgggcagaagacaaatggtgtccacaaaatacacagtactgtttgacagttcatcacttcaccagccacggaagaagcacatccatcaccaaaaagtgtgcctccagaagtgaatgtcattttgtcggttgccaccacagccgagattctgaacatacggagtgtaggtcttgctgtgaaggaatgatctgcaatgtagaattacccaccaatcacactaatgcagtgtttgccgtaatgcacgctcagagaacatctggcagcagtgcccccacactctacctaccagtgcttgcctgggtctttgtgcttccattgctgtga

SEQ ID NO: 62 - DNA, 624 bp, Homo sapiens
atgttgctgattactctgagtgcaaaccttttcactgttccagagaggagcctgacaaccacattctccttctcaagatataagagttcggaccgcccagcacacaaggtcagcatgctgctcctctgtcacgctctcgctatagctgttgtccagatcgttatcttctcagaaagctgggcatttgccaagaacatcaacttctataatgtgaggcctcctctcgaccctacaccatttccaaatagcttcaagtgctttacttgtgaaaacgcaggggataattataactgcaatcgatgggcagaagacaaatggtgtccacaaaatacacagtactgtttgacagttcatcacttcaccagccacggaagaagcacatccatcaccaaaaagtgtgcctccagaagtgaatgtcattttgtcggttgccaccacagccgagattctgaacatacggagtgtaggtcttgctgtgaaggaatgatctgcaatgtagaattacccaccaatcacactaatgcagtgtttgccgtaatgcacgctcagagaacatctggcagcagtgcccccacactctacctaccagtgcttgcctgggtctttgtgcttccattgctgtga

SEQ ID NO: 63 - DNA, 513 bp, Homo sapiens
atggaacctggccctgctctggcctggctcctgctcctgagcctgctggcggattgtctgaaagctgctcagtcccgagacttcacagtgaaagacattatctacctccatccttcaactacaccatttccaaatagcttcaagtgctttacttgtgaaaacgcaggggataattataactgcaatcgatgggcagaagacaaatggtgtccacaaaatacacagtactgtttgacagttcatcacttcaccagccacggaagaagcacatccatcaccaaaaagtgtgcctccagaagtgaatgtcattttgtcggttgccaccacagccgagattctgaacatacggagtgtaggtcttgctgtgaaggaatgatctgcaatgtagaattacccaccaatcacactaatgcagtgtttgccgtaatgcacgctcagagaacatctggcagcagtgcccccacactctacctaccagtgcttgcctgggtctttgtgcttccattgctgtga

SEQ ID NO: 64 - DNA, 5262 bp, Homo sapiens
atggccgcagcggcgggcggcggcgggccggggacagcggtaggcgccacgggctcggggattgcggcggcagccgcaggcctagctgtttatcgacggaaggatgggggcccggccaccaagttttgggagagcccggagacggtgtcccagctggattcggtgcgggtctggctgggcaagcactacaagaagtatgttcatgcggatgctcctaccaataaaacactggctgggctggtggtgcagcttcttcagttccaggaagatgcctttgggaagcatgtcaccaacccggccttcaccaaactccctgcaaagtgtttcatggatttcaaagctggaggcgccttatgtcacattcttggggctgcttacaagtataaaaatgaacagggatggcggaggtttgacctacagaacccatctcgaatggatcgtaatgtggaaatgtttatgaacattgaaaaaacattggtgcagaacaattgtttgaccagacccaacatctacctcattccagacattgatctgaagttggctaacaaattgaaagatatcatcaaacgacatcagggaacatttacggatgagaagtcaaaagcttcccaccacatttacccatattcttcctcacaagacgatgaagaatggttgagaccggtgatgagaaaagagaagcaagtgttagtgcattggggcttttacccagacagctatgatacttgggtccatagtaatgatgttgatgctgaaattgaagatccaccaattccagaaaaaccatggaaggttcatgtgaaatggattttggacactgatattttcaatgaatggatgaatgaggaggattatgaggtggatgaaaataggaagcctgtgagttttcgtcagcggatttcaaccaagaatgaagagccagtcagaagtccagaaagaagagatagaaaagcatcagctaatgctcgaaagaggaaacattcgccttcgcctccccctccgacaccaacagaatcacggaagaagagtgggaagaaaggccaagctagcctttatgggaagcgcagaagtcagaaagaggaagatgagcaagaagatctaaccaaggatatggaagacccaacacctgtacccaatatagaagaagtagtacttcccaaaaatgtgaacctaaagaaagatagtgaaaatacacctgttaaaggaggaactgtagcggatctagatgagcaggatgaagaaacagtcacagcaggaggaaaggaagatgaagatcctgccaaaggtgatcagagtcgatcagttgaccttggggaagataatgtgacagagcagaccaatcacattattattcctagttatgcatcatggtttgattataactgtattcatgtgattgaacggcgtgctcttcctgagttcttcaatggaaaaaacaaatccaagactccagaaatatacttggcatatcgaaattttatgattgacacgtatcgtctaaacccccaagagtatttaactagcactgcttgtcggaggaacttgactggagatgtgtgtgctgtgatgagggtccatgcctttttagagcagtggggactcgttaattaccaagttgacccggaaagtagacccatggcaatgggacctcctcctactcctcattttaatgtattagctgataccccctctgggcttgtgcctctgcatcttcgatcacctcaggttcctgctgctcaacagatgctaaattttcctgagaaaaacaaggaaaaaccagttgatttgcagaactttggtctccgtactgacatttactccaagaaaacattagcaaagagtaaaggtgctagtgctggaagagaatggactgaacaggagacccttctactcctggaggccctggagatgtacaaggatgattggaacaaagtgtcggaacatgttggaagtcgtactcaggatgaatgcatcctccactttttgagacttcccattgaggacccataccttgagaattcagatgcttcccttgggcctttggcctaccagcctgtccccttcagtcagtcaggaaatccagttatgagtactgttgcttttttggcatctgtggtggaccctcgcgtggcatctgctgcagcaaaagcggctttggaggagttttctcgggtccgggaggaggtaccactggaattggttgaagctcatgtcaagaaagtacaagaagcagcacgagcctctgggaaagtggatcccacctacggtctggagagcagctgcattgcaggcacagggcccgatgagccagagaagcttgatccctttaagatgtaccatgatgatgacctggcagatttggtctttccctccagtgcgacagctgatacttcaatatttgcaggacaaaatgatcccttgaaagacagttacggtatgtctccctgcaacacagctgttgtacctcaggggtggtctgtggaagccttaaactctccacactcagagtcctttgtttccccagaggctgttgcagaacctcctcagccaacggcagttcccttagagctagccaaggagatagaaatggcatcagaagagaggccaccagcacaagcattggaaataatgatgggactgaagactactgacatggcaccatctaaagaaacagagatggccctcgccaaggacatggcactagctacaaaaaccgaggtggcattggctaaagatatggaatcacccaccaaattagatgtgacactggccaaggacatgcagccatccatggaatcagatatggccctagtcaaggacatggaactacccacagaaaaagaagtggccctggttaaggatgtcagatggcccacagaaacagatgtatcttcagccaagaatgtggtactgcccacagaaacagaggtagccccagccaaggatgtgacactgttgaaagaaacagagagggcatctcctataaaaatggacttagccccttccaaggacatgggaccacccaaagaaaacaagaaagaaacagagagggcatctcctataaaaatggacttggctccttccaaggacatgggaccacccaaagaaaacaagatagtcccagccaaggatttggtattactctcagaaatagaggtggcacaggctaatgacattatatcatccacagaaatatcctctgctgagaaggtggctttgtcctcagaaacagaggtagccctggccagggacatgacactgcccccggaaaccaacgtgatcttgaccaaggataaagcactacctttagaagcagaggtggccccagtcaaggacatggctcaactcccagaaacagaaatagccccggccaaggatgtggctccgtccacagtaaaagaagtgggcttgttgaaggacatgtctccactatcagaaacagaaatggctctgggcaaggatgtgactccacctccagaaacagaagtagttctcatcaagaacgtatgtctgcctccagaaatggaggtggccctgactgaggatcaggtcccagccctcaaaacagaagcacccctggctaaggatggggttctgaccctggccaacaatgtgactccagccaaagatgttccaccactctcagaaacagaggcaacaccagttccaattaaagacatggaaattgcacaaacacaaaaaggaataagtgaggattcccatttagaatctctgcaggatgtggggcagtcagctgcacctactttcatgatttcaccagaaaccgtcacaggaacggggaaaaagtgcagcttgccggccgaggaggattctgtgttagaaaaactaggggaaaggaaaccatgcaacagtcaaccttctgagctttcttcagagacctcagccaacttcatgtattgcggtacccctcccacacaagccaaacaagtttgcagacccagtgaccgcaggtcaacccggcccaagcctgccagggtccctcctgagctgctgggaggctctcctccatggaagactcttgatcacaggctgggccactgctctttgtctgagtcaggttgggtctctggttcatcctcctgtggtgggcctgggaaccaaagaaaaagtattcatgttgactcacttgaaccccagagggatcttggcagggaggcctgggatatagaaagcacaccaataatgatgaagaaaaagaagaagaaaccaaagcaaaagagatattctcaaccacgggctggaggaccttcggatgatgacaatgcagataagcctaaaggtcatccatttgcagctgacacacaaaaatcaggtgttctccccagccagcctaccactatgggtacagaatatggacttgtatctggagaaaacttgaaaagggaatgtttagttaactccagtgcagccagactggtagctgagaactttgtctcagagagtctcagaattcctttatatccttctgaagaagcccccaaaactgcaataagttctcagtctaagctgagagtagaggaagagagcaaaagtaacaagtcagtactacaaaaccaagacaagaaattgctgaagcaacatgaatacaaaccacagcctgcaccccacctgaagactcctgtagataaaagccagtcagtaggccctctcaatctgaaaggacccctagcagaagtttctgcatacaatgtagaaacccctttggatatcagacttaaagagggttgctctcctttcttggaccaagaggttatgggtgtagtttcaaaacccacagcagcaaaagaaataccaaatttggtacccactttgatagcaagtaatccattagaatgtaatctaaaagaagggaataatgaaagtaaaatgactaaactgcagaatgtcaaactgaaggagtttcctgaaggagctgaagaggataaagaactaaaaaaggaagcttttcccaacgaaagacaagagatcagcatctttacttctgagcagctgcagggccaagtgttggtacaggtccctggggtagagaatgaaccatttaagagaatggcaggtgatggcaaaagcaggaagggaaggggaagttctgggaaaatgagaacagattctgggaaggtaaaagcaaaatctgagctgccatttcttctggacagccagaaggacggaagggctgttctcataccgagtgagccagtctctaaaactgaaggaatgactactcaggataagagtgaggagctg

SEQ ID NO: 65 - DNA, 3015 bp, Homo sapiens
atggatttcaaagctggaggcgccttatgtcacattcttggggctgcttacaagtataaaaatgaacagggatggcggaggtttgacctacagaacccatctcgaatggatcgtaatgtggaaatgtttatgaacattgaaaaaacattggtgcagaacaattgtttgaccagacccaacatctacctcattccagacattgatctgaagttggctaacaaattgaaagatatcatcaaacgacatcagggaacatttacggatgagaagtcaaaagcttcccaccacatttacccatattcttcctcacaagacgatgaagaatggttgagaccggtgatgagaaaagagaagcaagtgttagtgcattggggcttttacccagacagctatgatacttgggtccatagtaatgatgttgatgctgaaattgaagatccaccaattccagaaaaaccatggaaggttcatgtgaaatggattttggacactgatattttcaatgaatggatgaatgaggaggattatgaggtggatgaaaataggaagcctgtgagttttcgtcagcggatttcaaccaagaatgaagagccagtcagaagtccagaaagaagagatagaaaagcatcagctaatgctcgaaagaggaaacattcgccttcgcctccccctccgacaccaacagaatcacggaagaagagtgggaagaaaggccaagctagcctttatgggaagcgcagaagtcagaaagaggaagatgagcaagaagatctaaccaaggatatggaagacccaacacctgtacccaatatagaagaagtagtacttcccaaaaatgtgaacctaaagaaagatagtgaaaatacacctgttaaaggaggaactgtagcggatctagatgagcaggatgaagaaacagtcacagcaggaggaaaggaagatgaagatcctgccaaaggtgatcagagtcgatcagttgaccttggggaagataatgtgacagagcagaccaatcacattattattcctagttatgcatcatggtttgattataactgtattcatgtgattgaacggcgtgctcttcctgagttcttcaatggaaaaaacaaatccaagactccagaaatatacttggcatatcgaaattttatgattgacacgtatcgtctaaacccccaagagtatttaactagcactgcttgtcggaggaacttgactggagatgtgtgtgctgtgatgagggtccatgcctttttagagcagtggggactcgttaattaccaagttgacccggaaagtagacccatggcaatgggacctcctcctactcctcattttaatgtattagctgataccccctctgggcttgtgcctctgcatcttcgatcacctcaggttcctgctgctcaacagatgctaaattttcctgagaaaaacaaggaaaaaccagttgatttgcagaactttggtctccgtactgacatttactccaagaaaacattagcaaagagtaaaggtgctagtgctggaagagaatggactgaacaggagacccttctactcctggaggccctggagatgtacaaggatgattggaacaaagtgtcggaacatgttggaagtcgtactcaggatgaatgcatcctccactttttgagacttcccattgaggacccataccttgagaattcagatgcttcccttgggcctttggcctaccagcctgtccccttcagtcagtcaggaaatccagttatgagtactgttgcttttttggcatctgtggtggaccctcgcgtggcatctgctgcagcaaaagcggctttggaggagttttctcgggtccgggaggaggtaccactggaattggttgaagctcatgtcaagaaagtacaagaagcagcacgagcctctgggaaagtggatcccacctacggtctggagagcagctgcattgcaggcacagggcccgatgagccagagaagcttggaatagccaggccagaagaaggaaggcctgtggtgagtgggacaggaaatgacatcaccaccccaccgaacaaggagctcccaccaagcccagagaagaaaacaaagcctttggccaccactcaacctgcaaagacttcaacatcgaaagccaaaacacagcccacttctctccctaagcagccagctcccaccaccattggtgggttgaataaaaaacccatgagccttgcttcaggcttagtgccagctgccccacccaaacgccctgccgtcgcctctgccaggccttccatcttaccttcaaaagacgtgaagccaaagcccattgcagatgcaaaggctcctgagaagcgggcctcaccatccaagccagcttctgccccagcctccagatctgggtccaagagcactcagactgttgcaaaaaccacaacagctgctgctgttgcctcaactggcccaagcagtaggagcccctccacgctcctgcccaagaagcccactgccattaagactgagggaaaacctgcagaagtcaagaagatgactgcaaagtctgtaccagctgacttgagtcgcccaaagagcacctccaccagttccatgaagaaaaccaccactctcagtgggacagcccccgctgcaggggtggttcccagccgagtcaaggccacacccatgccctcccggccctccacaactcctttcatagacaagaagcccacctcggccaaacccagctccaccaccccccggctcagccgcctggccaccaatacttctgctcctgatctgaagaatgtccgctccaaggccaaagtagagaaaaaaacagaggcagctgctacaacccgaaagcctgaatctaatgcagtcactaaaacagccggcccaattgcaagtgcacagaaacaacctgcggggaaagtccagatagtctccaaaaaagtgagctacagccatattcagtccaagtgtggttccaaggacaatattaagcatgtccctggaggtggtaat

SEQ ID NO: 66 - DNA, 5313 bp, Homo sapiens
atggccgcagcggcgggcggcggcgggccggggacagcggtaggcgccacgggctcggggattgcggcggcagccgcaggcctagctgtttatcgacggaaggatgggggcccggccaccaagttttgggagagcccggagacggtgtcccagctggattcggtgcgggtctggctgggcaagcactacaagaagtatgttcatgcggatgctcctaccaataaaacactggctgggctggtggtgcagcttcttcagttccaggaagatgcctttgggaagcatgtcaccaacccggccttcaccaaactccctgcaaagtgtttcatggatttcaaagctggaggcgccttatgtcacattcttggggctgcttacaagtataaaaatgaacagggatggcggaggtttgacctacagaacccatctcgaatggatcgtaatgtggaaatgtttatgaacattgaaaaaacattggtgcagaacaattgtttgaccagacccaacatctacctcattccagacattgatctgaagttggctaacaaattgaaagatatcatcaaacgacatcagggaacatttacggatgagaagtcaaaagcttcccaccacatttacccatattcttcctcacaagacgatgaagaatggttgagaccggtgatgagaaaagagaagcaagtgttagtgcattggggcttttacccagacagctatgatacttgggtccatagtaatgatgttgatgctgaaattgaagatccaccaattccagaaaaaccatggaaggttcatgtgaaatggattttggacactgatattttcaatgaatggatgaatgaggaggattatgaggtggatgaaaataggaagcctgtgagttttcgtcagcggatttcaaccaagaatgaagagccagtcagaagtccagaaagaagagatagaaaagcatcagctaatgctcgaaagaggaaacattcgccttcgcctccccctccgacaccaacagaatcacggaagaagagtgggaagaaaggccaagctagcctttatgggaagcgcagaagtcagaaagaggaagatgagcaagaagatctaaccaaggatatggaagacccaacacctgtacccaatatagaagaagtagtacttcccaaaaatgtgaacctaaagaaagatagtgaaaatacacctgttaaaggaggaactgtagcggatctagatgagcaggatgaagaaacagtcacagcaggaggaaaggaagatgaagatcctgccaaaggtgatcagagtcgatcagttgaccttggggaagataatgtgacagagcagaccaatcacattattattcctagttatgcatcatggtttgattataactgtattcatgtgattgaacggcgtgctcttcctgagttcttcaatggaaaaaacaaatccaagactccagaaatatacttggcatatcgaaattttatgattgacacgtatcgtctaaacccccaagagtatttaactagcactgcttgtcggaggaacttgactggagatgtgtgtgctgtgatgagggtccatgcctttttagagcagtggggactcgttaattaccaagttgacccggaaagtagacccatggcaatgggacctcctcctactcctcattttaatgtattagctgataccccctctgggcttgtgcctctgcatcttcgatcacctcaggttcctgctgctcaacagatgctaaattttcctgagaaaaacaaggaaaaaccagttgatttgcagaactttggtctccgtactgacatttactccaagaaaacattagcaaagagtaaaggtgctagtgctggaagagaatggactgaacaggagacccttctactcctggaggccctggagatgtacaaggatgattggaacaaagtgtcggaacatgttggaagtcgtactcaggatgaatgcatcctccactttttgagacttcccattgaggacccataccttgagaattcagatgcttcccttgggcctttggcctaccagcctgtccccttcagtcagtcaggaaatccagttatgagtactgttgcttttttggcatctgtggtggaccctcgcgtggcatctgctgcagcaaaagcggctttggaggagttttctcgggtccgggaggaggtaccactggaattggttgaagctcatgtcaagaaagtacaagaagcagcacgagcctctgggaaagtggatcccacctacggtctggagagcagctgcattgcaggcacagggcccgatgagccagagaagcttgatccctttaagatgtaccatgatgatgacctggcagatttggtctttccctccagtgcgacagctgatacttcaatatttgcaggacaaaatgatcccttgaaagacagttacggtatgtctccctgcaacacagctgttgtacctcaggggtggtctgtggaagccttaaactctccacactcagagtcctttgtttccccagaggctgttgcagaacctcctcagccaacggcagttcccttagagctagccaaggagatagaaatggcatcagaagagaggccaccagcacaagcattggaaataatgatgggactgaagactactgacatggcaccatctaaagaaacagagatggccctcgccaaggacatggcactagctacaaaaaccgaggtggcattggctaaagatatggaatcacccaccaaattagatgtgacactggccaaggacatgcagccatccatggaatcagatatggccctagtcaaggacatggaactacccacagaaaaagaagtggccctggttaaggatgtcagatggcccacagaaacagatgtatcttcagccaagaatgtggtactgcccacagaaacagaggtagccccagccaaggatgtgacactgttgaaagaaacagagagggcatctcctataaaaatggacttagccccttccaaggacatgggaccacccaaagaaaacaagaaagaaacagagagggcatctcctataaaaatggacttggctccttccaaggacatgggaccacccaaagaaaacaagatagtcccagccaaggatttggtattactctcagaaatagaggtggcacaggctaatgacattatatcatccacagaaatatcctctgctgagaaggtggctttgtcctcagaaacagaggtagccctggccagggacatgacactgcccccggaaaccaacgtgatcttgaccaaggataaagcactacctttagaagcagaggtggccccagtcaaggacatggctcaactcccagaaacagaaatagccccggccaaggatgtggctccgtccacagtaaaagaagtgggcttgttgaaggacatgtctccactatcagaaacagaaatggctctgggcaaggatgtgactccacctccagaaacagaagtagttctcatcaagaacgtatgtctgcctccagaaatggaggtggccctgactgaggatcaggtcccagccctcaaaacagaagcacccctggctaaggatggggttctgaccctggccaacaatgtgactccagccaaagatgttccaccactctcagaaacagaggcaacaccagttccaattaaagacatggaaattgcacaaacacaaaaaggaataagtgaggattcccatttagaatctctgcaggatgtggggcagtcagctgcacctactttcatgatttcaccagaaaccgtcacaggaacggggaaaaagtgcagcttgccggccgaggaggattctgtgttagaaaaactaggggaaaggaaaccatgcaacagtcaaccttctgagctttcttcagagacctcaggaatagccaggccagaagaaggaaggcctgtggtgagtgggacaggaaatgacatcaccaccccaccgaacaaggagctcccaccaagcccagagaagaaaacaaagcctttggccaccactcaacctgcaaagacttcaacatcgaaagccaaaacacagcccacttctctccctaagcagccagctcccaccaccattggtgggttgaataaaaaacccatgagccttgcttcaggcttagtgccagctgccccacccaaacgccctgccgtcgcctctgccaggccttccatcttaccttcaaaagacgtgaagccaaagcccattgcagatgcaaaggctcctgagaagcgggcctcaccatccaagccagcttctgccccagcctccagatctgggtccaagagcactcagactgttgcaaaaaccacaacagctgctgctgttgcctcaactggcccaagcagtaggagcccctccacgctcctgcccaagaagcccactgccattaagactgagggaaaacctgcagaagtcaagaagatgactgcaaagtctgtaccagctgacttgagtcgcccaaagagcacctccaccagttccatgaagaaaaccaccactctcagtgggacagcccccgctgcaggggtggttcccagccgagtcaaggccacacccatgccctcccggccctccacaactcctttcatagacaagaagcccacctcggccaaacccagctccaccaccccccggctcagccgcctggccaccaatacttctgctcctgatctgaagaatgtccgctccaaggttggctccacggaaaacatcaagcatcagcctggaggaggccgggccaaagtagagaaaaaaacagaggcagctgctacaacccgaaagcctgaatctaatgcagtcactaaaacagccggcccaattgcaagtgcacagaaacaacctgcggggaaagtccagatagtctccaaaaaagtgagctacagccatattcagtccaagtgtggttccaaggacaatattaagcatgtccctggaggtggtaatgttcagattcagaacaagaaagtggacatctctaaggtctcctccaagtgtgggtctaaggctaacatcaagcacaagcctggtggaggagatgtcaagattgaaagtcagaagttgaacttcaaggagaaggcccaggccaaggtgggatccctcgataatgtgggccacctacctgcaggaggtgctgtgaagattgagacctacaggctgacgttccgggcaaatgccagggcccgcaccgaccacggggccgacattgtctcccgccccccacacttccctggcggccccaactcgggctcccgggtccttggccccctttcccgggctgtccactag

SEQ ID NO: 67 - DNA, 5109 bp, Homo sapiens
atggatttcaaagctggaggcgccttatgtcacattcttggggctgcttacaagtataaaaatgaacagggatggcggaggtttgacctacagaacccatctcgaatggatcgtaatgtggaaatgtttatgaacattgaaaaaacattggtgcagaacaattgtttgaccagacccaacatctacctcattccagacattgatctgaagttggctaacaaattgaaagatatcatcaaacgacatcagggaacatttacggatgagaagtcaaaagcttcccaccacatttacccatattcttcctcacaagacgatgaagaatggttgagaccggtgatgagaaaagagaagcaagtgttagtgcattggggcttttacccagacagctatgatacttgggtccatagtaatgatgttgatgctgaaattgaagatccaccaattccagaaaaaccatggaaggttcatgtgaaatggattttggacactgatattttcaatgaatggatgaatgaggaggattatgaggtggatgaaaataggaagcctgtgagttttcgtcagcggatttcaaccaagaatgaagagccagtcagaagtccagaaagaagagatagaaaagcatcagctaatgctcgaaagaggaaacattcgccttcgcctccccctccgacaccaacagaatcacggaagaagagtgggaagaaaggccaagctagcctttatgggaagcgcagaagtcagaaagaggaagatgagcaagaagatctaaccaaggatatggaagacccaacacctgtacccaatatagaagaagtagtacttcccaaaaatgtgaacctaaagaaagatagtgaaaatacacctgttaaaggaggaactgtagcggatctagatgagcaggatgaagaaacagtcacagcaggaggaaaggaagatgaagatcctgccaaaggtgatcagagtcgatcagttgaccttggggaagataatgtgacagagcagaccaatcacattattattcctagttatgcatcatggtttgattataactgtattcatgtgattgaacggcgtgctcttcctgagttcttcaatggaaaaaacaaatccaagactccagaaatatacttggcatatcgaaattttatgattgacacgtatcgtctaaacccccaagagtatttaactagcactgcttgtcggaggaacttgactggagatgtgtgtgctgtgatgagggtccatgcctttttagagcagtggggactcgttaattaccaagttgacccggaaagtagacccatggcaatgggacctcctcctactcctcattttaatgtattagctgataccccctctgggcttgtgcctctgcatcttcgatcacctcaggttcctgctgctcaacagatgctaaattttcctgagaaaaacaaggaaaaaccagttgatttgcagaactttggtctccgtactgacatttactccaagaaaacattagcaaagagtaaaggtgctagtgctggaagagaatggactgaacaggagacccttctactcctggaggccctggagatgtacaaggatgattggaacaaagtgtcggaacatgttggaagtcgtactcaggatgaatgcatcctccactttttgagacttcccattgaggacccataccttgagaattcagatgcttcccttgggcctttggcctaccagcctgtccccttcagtcagtcaggaaatccagttatgagtactgttgcttttttggcatctgtggtggaccctcgcgtggcatctgctgcagcaaaagcggctttggaggagttttctcgggtccgggaggaggtaccactggaattggttgaagctcatgtcaagaaagtacaagaagcagcacgagcctctgggaaagtggatcccacctacggtctggagagcagctgcattgcaggcacagggcccgatgagccagagaagcttgggtctccaactgaattccttgaagagaaaatggcctaccaggaatacccaaatagccagaactggccagaagataccaacttttgtttccaacctgagcaagtggtcgatcctatccagactgatccctttaagatgtaccatgatgatgacctggcagatttggtctttccctccagtgcgacagctgatacttcaatatttgcaggacaaaatgatcccttgaaagacagttacggtatgtctccctgcaacacagctgttgtacctcaggggtggtctgtggaagccttaaactctccacactcagagtcctttgtttccccagaggctgttgcagaacctcctcagccaacggcagttcccttagagctagccaaggagatagaaatggcatcagaagagaggccaccagcacaagcattggaaataatgatgggactgaagactactgacatggcaccatctaaagaaacagagatggccctcgccaaggacatggcactagctacaaaaaccgaggtggcattggctaaagatatggaatcacccaccaaattagatgtgacactggccaaggacatgcagccatccatggaatcagatatggccctagtcaaggacatggaactacccacagaaaaagaagtggccctggttaaggatgtcagatggcccacagaaacagatgtatcttcagccaagaatgtggtactgcccacagaaacagaggtagccccagccaaggatgtgacactgttgaaagaaacagagagggcatctcctataaaaatggacttagccccttccaaggacatgggaccacccaaagaaaacaagaaagaaacagagagggcatctcctataaaaatggacttggctccttccaaggacatgggaccacccaaagaaaacaagatagtcccagccaaggatttggtattactctcagaaatagaggtggcacaggctaatgacattatatcatccacagaaatatcctctgctgagaaggtggctttgtcctcagaaacagaggtagccctggccagggacatgacactgcccccggaaaccaacgtgatcttgaccaaggataaagcactacctttagaagcagaggtggccccagtcaaggacatggctcaactcccagaaacagaaatagccccggccaaggatgtggctccgtccacagtaaaagaagtgggcttgttgaaggacatgtctccactatcagaaacagaaatggctctgggcaaggatgtgactccacctccagaaacagaagtagttctcatcaagaacgtatgtctgcctccagaaatggaggtggccctgactgaggatcaggtcccagccctcaaaacagaagcacccctggctaaggatggggttctgaccctggccaacaatgtgactccagccaaagatgttccaccactctcagaaacagaggcaacaccagttccaattaaagacatggaaattgcacaaacacaaaaaggaataagtgaggattcccatttagaatctctgcaggatgtggggcagtcagctgcacctactttcatgatttcaccagaaaccgtcacaggaacggggaaaaagtgcagcttgccggccgaggaggattctgtgttagaaaaactaggggaaaggaaaccatgcaacagtcaaccttctgagctttcttcagagacctcaggaatagccaggccagaagaaggaaggcctgtggtgagtgggacaggaaatgacatcaccaccccaccgaacaaggagctcccaccaagcccagagaagaaaacaaagcctttggccaccactcaacctgcaaagacttcaacatcgaaagccaaaacacagcccacttctctccctaagcagccagctcccaccaccattggtgggttgaataaaaaacccatgagccttgcttcaggcttagtgccagctgccccacccaaacgccctgccgtcgcctctgccaggccttccatcttaccttcaaaagacgtgaagccaaagcccattgcagatgcaaaggctcctgagaagcgggcctcaccatccaagccagcttctgccccagcctccagatctgggtccaagagcactcagactgttgcaaaaaccacaacagctgctgctgttgcctcaactggcccaagcagtaggagcccctccacgctcctgcccaagaagcccactgccattaagactgagggaaaacctgcagaagtcaagaagatgactgcaaagtctgtaccagctgacttgagtcgcccaaagagcacctccaccagttccatgaagaaaaccaccactctcagtgggacagcccccgctgcaggggtggttcccagccgagtcaaggccacacccatgccctcccggccctccacaactcctttcatagacaagaagcccacctcggccaaacccagctccaccaccccccggctcagccgcctggccaccaatacttctgctcctgatctgaagaatgtccgctccaaggttggctccacggaaaacatcaagcatcagcctggaggaggccgggccaaagtagagaaaaaaacagaggcagctgctacaacccgaaagcctgaatctaatgcagtcactaaaacagccggcccaattgcaagtgcacagaaacaacctgcggggaaagtccagatagtctccaaaaaagtgagctacagccatattcagtccaagtgtggttccaaggacaatattaagcatgtccctggaggtggtaatgttcagattcagaacaagaaagtggacatctctaaggtctcctccaagtgtgggtctaaggctaacatcaagcacaagcctggtggaggagatgtcaagattgaaagtcagaagttgaacttcaaggagaaggcccaggccaaggtgggatccctcgataatgtgggccacctacctgcaggaggtgctgtgaagattgagacctacaggctgacgttccgggcaaatgccagggcccgcaccgaccacggggccgacattgtctcccgccccccacacttccctggcggccccaactcgggctcccgggtccttggccccctttcccgggctgtccactag

SEQ ID NO: 68 - DNA, 585 bp, Homo sapiens
atggccgcagcggcgggcggcggcgggccggggacagcggtaggcgccacgggctcggggattgcggcggcagccgcaggcctagctgtttatcgacggaaggatgggggcccggccaccaagttttgggagagcccggagacggtgtcccagctggattcggtgcgggtctggctgggcaagcactacaagaaggttcagattcagaacaagaaagtggacatctctaaggtctcctccaagtgtgggtctaaggctaacatcaagcacaagcctggtggaggagatgtcaagattgaaagtcagaagttgaacttcaaggagaaggcccaggccaaggtgggatccctcgataatgtgggccacctacctgcaggaggtgctgtgaagactgagggcggtggcagcgaggctcctctgtgtccgggtccccctgctggggaggagccggccatctctgaggcagcgcctgaagctggcgcccccacttcagccagtggcctcaatggccaccccaccctgtcagggggtggtgaccaaagggaggcccagaccttggacagccagatccaggagacaaattga

SEQ ID NO: 69 - DNA, 5037 bp, Homo sapiens
atggatttcaaagctggaggcgccttatgtcacattcttggggctgcttacaagtataaaaatgaacagggatggcggaggtttgacctacagaacccatctcgaatggatcgtaatgtggaaatgtttatgaacattgaaaaaacattggtgcagaacaattgtttgaccagacccaacatctacctcattccagacattgatctgaagttggctaacaaattgaaagatatcatcaaacgacatcagggaacatttacggatgagaagtcaaaagcttcccaccacatttacccatattcttcctcacaagacgatgaagaatggttgagaccggtgatgagaaaagagaagcaagtgttagtgcattggggcttttacccagacagctatgatacttgggtccatagtaatgatgttgatgctgaaattgaagatccaccaattccagaaaaaccatggaaggttcatgtgaaatggattttggacactgatattttcaatgaatggatgaatgaggaggattatgaggtggatgaaaataggaagcctgtgagttttcgtcagcggatttcaaccaagaatgaagagccagtcagaagtccagaaagaagagatagaaaagcatcagctaatgctcgaaagaggaaacattcgccttcgcctccccctccgacaccaacagaatcacggaagaagagtgggaagaaaggccaagctagcctttatgggaagcgcagaagtcagaaagaggaagatgagcaagaagatctaaccaaggatatggaagacccaacacctgtacccaatatagaagaagtagtacttcccaaaaatgtgaacctaaagaaagatagtgaaaatacacctgttaaaggaggaactgtagcggatctagatgagcaggatgaagaaacagtcacagcaggaggaaaggaagatgaagatcctgccaaaggtgatcagagtcgatcagttgaccttggggaagataatgtgacagagcagaccaatcacattattattcctagttatgcatcatggtttgattataactgtattcatgtgattgaacggcgtgctcttcctgagttcttcaatggaaaaaacaaatccaagactccagaaatatacttggcatatcgaaattttatgattgacacgtatcgtctaaacccccaagagtatttaactagcactgcttgtcggaggaacttgactggagatgtgtgtgctgtgatgagggtccatgcctttttagagcagtggggactcgttaattaccaagttgacccggaaagtagacccatggcaatgggacctcctcctactcctcattttaatgtattagctgataccccctctgggcttgtgcctctgcatcttcgatcacctcaggttcctgctgctcaacagatgctaaattttcctgagaaaaacaaggaaaaaccagttgatttgcagaactttggtctccgtactgacatttactccaagaaaacattagcaaagagtaaaggtgctagtgctggaagagaatggactgaacaggagacccttctactcctggaggccctggagatgtacaaggatgattggaacaaagtgtcggaacatgttggaagtcgtactcaggatgaatgcatcctccactttttgagacttcccattgaggacccataccttgagaattcagatgcttcccttgggcctttggcctaccagcctgtccccttcagtcagtcaggaaatccagttatgagtactgttgcttttttggcatctgtggtggaccctcgcgtggcatctgctgcagcaaaagcggctttggaggagttttctcgggtccgggaggaggtaccactggaattggttgaagctcatgtcaagaaagtacaagaagcagcacgagcctctgggaaagtggatcccacctacggtctggagagcagctgcattgcaggcacagggcccgatgagccagagaagcttgatccctttaagatgtaccatgatgatgacctggcagatttggtctttccctccagtgcgacagctgatacttcaatatttgcaggacaaaatgatcccttgaaagacagttacggtatgtctccctgcaacacagctgttgtacctcaggggtggtctgtggaagccttaaactctccacactcagagtcctttgtttccccagaggctgttgcagaacctcctcagccaacggcagttcccttagagctagccaaggagatagaaatggcatcagaagagaggccaccagcacaagcattggaaataatgatgggactgaagactactgacatggcaccatctaaagaaacagagatggccctcgccaaggacatggcactagctacaaaaaccgaggtggcattggctaaagatatggaatcacccaccaaattagatgtgacactggccaaggacatgcagccatccatggaatcagatatggccctagtcaaggacatggaactacccacagaaaaagaagtggccctggttaaggatgtcagatggcccacagaaacagatgtatcttcagccaagaatgtggtactgcccacagaaacagaggtagccccagccaaggatgtgacactgttgaaagaaacagagagggcatctcctataaaaatggacttagccccttccaaggacatgggaccacccaaagaaaacaagaaagaaacagagagggcatctcctataaaaatggacttggctccttccaaggacatgggaccacccaaagaaaacaagatagtcccagccaaggatttggtattactctcagaaatagaggtggcacaggctaatgacattatatcatccacagaaatatcctctgctgagaaggtggctttgtcctcagaaacagaggtagccctggccagggacatgacactgcccccggaaaccaacgtgatcttgaccaaggataaagcactacctttagaagcagaggtggccccagtcaaggacatggctcaactcccagaaacagaaatagccccggccaaggatgtggctccgtccacagtaaaagaagtgggcttgttgaaggacatgtctccactatcagaaacagaaatggctctgggcaaggatgtgactccacctccagaaacagaagtagttctcatcaagaacgtatgtctgcctccagaaatggaggtggccctgactgaggatcaggtcccagccctcaaaacagaagcacccctggctaaggatggggttctgaccctggccaacaatgtgactccagccaaagatgttccaccactctcagaaacagaggcaacaccagttccaattaaagacatggaaattgcacaaacacaaaaaggaataagtgaggattcccatttagaatctctgcaggatgtggggcagtcagctgcacctactttcatgatttcaccagaaaccgtcacaggaacggggaaaaagtgcagcttgccggccgaggaggattctgtgttagaaaaactaggggaaaggaaaccatgcaacagtcaaccttctgagctttcttcagagacctcaggaatagccaggccagaagaaggaaggcctgtggtgagtgggacaggaaatgacatcaccaccccaccgaacaaggagctcccaccaagcccagagaagaaaacaaagcctttggccaccactcaacctgcaaagacttcaacatcgaaagccaaaacacagcccacttctctccctaagcagccagctcccaccaccattggtgggttgaataaaaaacccatgagccttgcttcaggcttagtgccagctgccccacccaaacgccctgccgtcgcctctgccaggccttccatcttaccttcaaaagacgtgaagccaaagcccattgcagatgcaaaggctcctgagaagcgggcctcaccatccaagccagcttctgccccagcctccagatctgggtccaagagcactcagactgttgcaaaaaccacaacagctgctgctgttgcctcaactggcccaagcagtaggagcccctccacgctcctgcccaagaagcccactgccattaagactgagggaaaacctgcagaagtcaagaagatgactgcaaagtctgtaccagctgacttgagtcgcccaaagagcacctccaccagttccatgaagaaaaccaccactctcagtgggacagcccccgctgcaggggtggttcccagccgagtcaaggccacacccatgccctcccggccctccacaactcctttcatagacaagaagcccacctcggccaaacccagctccaccaccccccggctcagccgcctggccaccaatacttctgctcctgatctgaagaatgtccgctccaaggttggctccacggaaaacatcaagcatcagcctggaggaggccgggccaaagtagagaaaaaaacagaggcagctgctacaacccgaaagcctgaatctaatgcagtcactaaaacagccggcccaattgcaagtgcacagaaacaacctgcggggaaagtccagatagtctccaaaaaagtgagctacagccatattcagtccaagtgtggttccaaggacaatattaagcatgtccctggaggtggtaatgttcagattcagaacaagaaagtggacatctctaaggtctcctccaagtgtgggtctaaggctaacatcaagcacaagcctggtggaggagatgtcaagattgaaagtcagaagttgaacttcaaggagaaggcccaggccaaggtgggatccctcgataatgtgggccacctacctgcaggaggtgctgtgaagactgagggcggtggcagcgaggctcctctgtgtccgggtccccctgctggggaggagccggccatctctgaggcagcgcctgaagctggcgcccccacttcagccagtggcctcaatggccaccccaccctgtcagggggtggtgaccaaagggaggcccagaccttggacagccagatccaggagacaagcatctaa

SEQ ID NO: 70 - DNA, 537 bp, Homo sapiens
atggccgcagcggcgggcggcggcgggccggggacagcggtaggcgccacgggctcggggattgcggcggcagccgcaggcctagctgtttatcgacggaaggatgggggcccggccaccaagttttgggagagcccggagacggtgtcccagctggattcggtgcgggtctggctgggcaagcactacaagaaggttcagattcagaacaagaaagtggacatctctaaggtctcctccaagtgtgggtctaaggctaacatcaagcacaagcctggtggaggagatgtcaagattgaaagtcagaagttgaacttcaaggagaaggcccaggccaaggtgggatccctcgataatgtgggccacctacctgcaggaggtgctgtgaagattgagacctacaggctgacgttccgggcaaatgccagggcccgcaccgaccacggggccgacattgtctcccgccccccacacttccctggcggccccaactcgggctcccgggtccttggccccctttcccgggctgtccactag

SEQ ID NO: 71 - DNA, 4935 bp, Homo sapiens
atggatttcaaagctggaggcgccttatgtcacattcttggggctgcttacaagtataaaaatgaacagggatggcggaggtttgacctacagaacccatctcgaatggatcgtaatgtggaaatgtttatgaacattgaaaaaacattggtgcagaacaattgtttgaccagacccaacatctacctcattccagacattgatctgaagttggctaacaaattgaaagatatcatcaaacgacatcagggaacatttacggatgagaagtcaaaagcttcccaccacatttacccatattcttcctcacaagacgatgaagaatggttgagaccggtgatgagaaaagagaagcaagtgttagtgcattggggcttttacccagacagctatgatacttgggtccatagtaatgatgttgatgctgaaattgaagatccaccaattccagaaaaaccatggaaggttcatgtgaaatggattttggacactgatattttcaatgaatggatgaatgaggaggattatgaggtggatgaaaataggaagcctgtgagttttcgtcagcggatttcaaccaagaatgaagagccagtcagaagtccagaaagaagagatagaaaagcatcagctaatgctcgaaagaggaaacattcgccttcgcctccccctccgacaccaacagaatcacggaagaagagtgggaagaaaggccaagctagcctttatgggaagcgcagaagtcagaaagaggaagatgagcaagaagatctaaccaaggatatggaagacccaacacctgtacccaatatagaagaagtagtacttcccaaaaatgtgaacctaaagaaagatagtgaaaatacacctgttaaaggaggaactgtagcggatctagatgagcaggatgaagaaacagtcacagcaggaggaaaggaagatgaagatcctgccaaaggtgatcagagtcgatcagttgaccttggggaagataatgtgacagagcagaccaatcacattattattcctagttatgcatcatggtttgattataactgtattcatgtgattgaacggcgtgctcttcctgagttcttcaatggaaaaaacaaatccaagactccagaaatatacttggcatatcgaaattttatgattgacacgtatcgtctaaacccccaagagtatttaactagcactgcttgtcggaggaacttgactggagatgtgtgtgctgtgatgagggtccatgcctttttagagcagtggggactcgttaattaccaagttgacccggaaagtagacccatggcaatgggacctcctcctactcctcattttaatgtattagctgataccccctctgggcttgtgcctctgcatcttcgatcacctcaggttcctgctgctcaacagatgctaaattttcctgagaaaaacaaggaaaaaccagttgatttgcagaactttggtctccgtactgacatttactccaagaaaacattagcaaagagtaaaggtgctagtgctggaagagaatggactgaacaggagacccttctactcctggaggccctggagatgtacaaggatgattggaacaaagtgtcggaacatgttggaagtcgtactcaggatgaatgcatcctccactttttgagacttcccattgaggacccataccttgagaattcagatgcttcccttgggcctttggcctaccagcctgtccccttcagtcagtcaggaaatccagttatgagtactgttgcttttttggcatctgtggtggaccctcgcgtggcatctgctgcagcaaaagcggctttggaggagttttctcgggtccgggaggaggtaccactggaattggttgaagctcatgtcaagaaagtacaagaagcagcacgagcctctgggaaagtggatcccacctacggtctggagagcagctgcattgcaggcacagggcccgatgagccagagaagcttgatccctttaagatgtaccatgatgatgacctggcagatttggtctttccctccagtgcgacagctgatacttcaatatttgcaggacaaaatgatcccttgaaagacagttacggtatgtctccctgcaacacagctgttgtacctcaggggtggtctgtggaagccttaaactctccacactcagagtcctttgtttccccagaggctgttgcagaacctcctcagccaacggcagttcccttagagctagccaaggagatagaaatggcatcagaagagaggccaccagcacaagcattggaaataatgatgggactgaagactactgacatggcaccatctaaagaaacagagatggccctcgccaaggacatggcactagctacaaaaaccgaggtggcattggctaaagatatggaatcacccaccaaattagatgtgacactggccaaggacatgcagccatccatggaatcagatatggccctagtcaaggacatggaactacccacagaaaaagaagtggccctggttaaggatgtcagatggcccacagaaacagatgtatcttcagccaagaatgtggtactgcccacagaaacagaggtagccccagccaaggatgtgacactgttgaaagaaacagagagggcatctcctataaaaatggacttagccccttccaaggacatgggaccacccaaagaaaacaagaaagaaacagagagggcatctcctataaaaatggacttggctccttccaaggacatgggaccacccaaagaaaacaagatagtcccagccaaggatttggtattactctcagaaatagaggtggcacaggctaatgacattatatcatccacagaaatatcctctgctgagaaggtggctttgtcctcagaaacagaggtagccctggccagggacatgacactgcccccggaaaccaacgtgatcttgaccaaggataaagcactacctttagaagcagaggtggccccagtcaaggacatggctcaactcccagaaacagaaatagccccggccaaggatgtggctccgtccacagtaaaagaagtgggcttgttgaaggacatgtctccactatcagaaacagaaatggctctgggcaaggatgtgactccacctccagaaacagaagtagttctcatcaagaacgtatgtctgcctccagaaatggaggtggccctgactgaggatcaggtcccagccctcaaaacagaagcacccctggctaaggatggggttctgaccctggccaacaatgtgactccagccaaagatgttccaccactctcagaaacagaggcaacaccagttccaattaaagacatggaaattgcacaaacacaaaaaggaataagtgaggattcccatttagaatctctgcaggatgtggggcagtcagctgcacctactttcatgatttcaccagaaaccgtcacaggaacggggaaaaagtgcagcttgccggccgaggaggattctgtgttagaaaaactaggggaaaggaaaccatgcaacagtcaaccttctgagctttcttcagagacctcagccaacttcatgtattgcggtacccctcccacacaagccaaacaagtttgcagacccagtgaccgcaggtcaacccggcccaagcctgccagggtccctcctgagctgctgggaggctctcctccatggaagactcttgatcacaggctgggccactgctctttgtctgagtcaggttgggtctctggttcatcctcctgtggtgggcctgggaaccaaagaaaaagtattcatgttgactcacttgaaccccagagggatcttggcagggaggcctgggatatagaaagcacaccaataatgatgaagaaaaagaagaagaaaccaaagcaaaagagatattctcaaccacgggctggaggaccttcggatgatgacaatgcagataagcctaaaggtcatccatttgcagctgacacacaaaaatcaggtgttctccccagccagcctaccactatgggtacagaatatggacttgtatctggagaaaacttgaaaagggaatgtttagttaactccagtgcagccagactggtagctgagaactttgtctcagagagtctcagaattcctttatatccttctgaagaagcccccaaaactgcaataagttctcagtctaagctgagagtagaggaagagagcaaaagtaacaagtcagtactacaaaaccaagacaagaaattgctgaagcaacatgaatacaaaccacagcctgcaccccacctgaagactcctgtagataaaagccagtcagtaggccctctcaatctgaaaggacccctagcagaagtttctgcatacaatgtagaaacccctttggatatcagacttaaagagggttgctctcctttcttggaccaagaggttatgggtgtagtttcaaaacccacagcagcaaaagaaataccaaatttggtacccactttgatagcaagtaatccattagaatgtaatctaaaagaagggaataatgaaagtaaaatgactaaactgcagaatgtcaaactgaaggagtttcctgaaggagctgaagaggataaagaactaaaaaaggaagcttttcccaacgaaagacaagagatcagcatctttacttctgagcagctgcagggccaagtgttggtacaggtccctggggtagagaatgaaccatttaagagaatggcaggtgatggcaaaagcaggaagggaaggggaagttctgggaaaatgagaacagattctgggaaggtaaaagcaaaatctgagctgccatttcttctggacagccagaaggacggaagggctgttctcataccgagtgagccagtctctaaaactgaaggaatgactactcaggataagagtgaggagctg

SEQ ID NO: 72 - DNA, 2472 bp, Homo sapiens
atggccgcagcggcgggcggcggcgggccggggacagcggtaggcgccacgggctcggggattgcggcggcagccgcaggcctagctgtttatcgacggaaggatgggggcccggccaccaagttttgggagagcccggagacggtgtcccagctggattcggtgcgggtctggctgggcaagcactacaagaagtatgttcatgcggatgctcctaccaataaaacactggctgggctggtggtgcagcttcttcagttccaggaagatgcctttgggaagcatgtcaccaacccggccttcaccaaactccctgcaaagtgtttcatggatttcaaagctggaggcgccttatgtcacattcttggggctgcttacaagtataaaaatgaacagggatggcggaggtttgacctacagaacccatctcgaatggatcgtaatgtggaaatgtttatgaacattgaaaaaacattggtgcagaacaattgtttgaccagacccaacatctacctcattccagacattgatctgaagttggctaacaaattgaaagatatcatcaaacgacatcagggaacatttacggatgagaagtcaaaagcttcccaccacatttacccatattcttcctcacaagacgatgaagaatggttgagaccggtgatgagaaaagagaagcaagtgttagtgcattggggcttttacccagacagctatgatacttgggtccatagtaatgatgttgatgctgaaattgaagatccaccaattccagaaaaaccatggaaggttcatgtgaaatggattttggacactgatattttcaatgaatggatgaatgaggaggattatgaggtggatgaaaataggaagcctgtgagttttcgtcagcggatttcaaccaagaatgaagagccagtcagaagtccagaaagaagagatagaaaagcatcagctaatgctcgaaagaggaaacattcgccttcgcctccccctccgacaccaacagaatcacggaagaagagtgggaagaaaggccaagctagcctttatgggaagcgcagaagtcagaaagaggaagatgagcaagaagatctaaccaaggatatggaagacccaacacctgtacccaatatagaagaagtagtacttcccaaaaatgtgaacctaaagaaagatagtgaaaatacacctgttaaaggaggaactgtagcggatctagatgagcaggatgaagaaacagtcacagcaggaggaaaggaagatgaagatcctgccaaaggtgatcagagtcgatcagttgaccttggggaagataatgtgacagagcagaccaatcacattattattcctagttatgcatcatggtttgattataactgtattcatgtgattgaacggcgtgctcttcctgagttcttcaatggaaaaaacaaatccaagactccagaaatatacttggcatatcgaaattttatgattgacacgtatcgtctaaacccccaagagtatttaactagcactgcttgtcggaggaacttgactggagatgtgtgtgctgtgatgagggtccatgcctttttagagcagtggggactcgttaattaccaagttgacccggaaagtagacccatggcaatgggacctcctcctactcctcattttaatgtattagctgataccccctctgggcttgtgcctctgcatcttcgatcacctcaggttcctgctgctcaacagatgctaaattttcctgagaaaaacaaggaaaaaccagttgatttgcagaactttggtctccgtactgacatttactccaagaaaacattagcaaagagtaaaggtgctagtgctggaagagaatggactgaacaggagacccttctactcctggaggccctggagatgtacaaggatgattggaacaaagtgtcggaacatgttggaagtcgtactcaggatgaatgcatcctccactttttgagacttcccattgaggacccataccttgagaattcagatgcttcccttgggcctttggcctaccagcctgtccccttcagtcagtcaggaaatccagttatgagtactgttgcttttttggcatctgtggtggaccctcgcgtggcatctgctgcagcaaaagcggctttggaggagttttctcgggtccgggaggaggtaccactggaattggttgaagctcatgtcaagaaagtacaagaagcagcacgagcctctgggaaagtggatcccacctacggtctggagagcagctgcattgcaggcacagggcccgatgagccagagaagcttggaatagccaggccagaagaaggaaggcctgtggtgagtgggacaggaaatgacatcaccaccccaccgaacaaggagctcccaccaagcccagagaagaaaacaaaggtaggtgccagaatggtggttatcttctactgccataatttttaa

SEQ ID NO: 73 - DNA, 3243 bp, Homo sapiens
atggatttcaaagctggaggcgccttatgtcacattcttggggctgcttacaagtataaaaatgaacagggatggcggaggtttgacctacagaacccatctcgaatggatcgtaatgtggaaatgtttatgaacattgaaaaaacattggtgcagaacaattgtttgaccagacccaacatctacctcattccagacattgatctgaagttggctaacaaattgaaagatatcatcaaacgacatcagggaacatttacggatgagaagtcaaaagcttcccaccacatttacccatattcttcctcacaagacgatgaagaatggttgagaccggtgatgagaaaagagaagcaagtgttagtgcattggggcttttacccagacagctatgatacttgggtccatagtaatgatgttgatgctgaaattgaagatccaccaattccagaaaaaccatggaaggttcatgtgaaatggattttggacactgatattttcaatgaatggatgaatgaggaggattatgaggtggatgaaaataggaagcctgtgagttttcgtcagcggatttcaaccaagaatgaagagccagtcagaagtccagaaagaagagatagaaaagcatcagctaatgctcgaaagaggaaacattcgccttcgcctccccctccgacaccaacagaatcacggaagaagagtgggaagaaaggccaagctagcctttatgggaagcgcagaagtcagaaagaggaagatgagcaagaagatctaaccaaggatatggaagacccaacacctgtacccaatatagaagaagtagtacttcccaaaaatgtgaacctaaagaaagatagtgaaaatacacctgttaaaggaggaactgtagcggatctagatgagcaggatgaagaaacagtcacagcaggaggaaaggaagatgaagatcctgccaaaggtgatcagagtcgatcagttgaccttggggaagataatgtgacagagcagaccaatcacattattattcctagttatgcatcatggtttgattataactgtattcatgtgattgaacggcgtgctcttcctgagttcttcaatggaaaaaacaaatccaagactccagaaatatacttggcatatcgaaattttatgattgacacgtatcgtctaaacccccaagagtatttaactagcactgcttgtcggaggaacttgactggagatgtgtgtgctgtgatgagggtccatgcctttttagagcagtggggactcgttaattaccaagttgacccggaaagtagacccatggcaatgggacctcctcctactcctcattttaatgtattagctgataccccctctgggcttgtgcctctgcatcttcgatcacctcaggttcctgctgctcaacagatgctaaattttcctgagaaaaacaaggaaaaaccagttgatttgcagaactttggtctccgtactgacatttactccaagaaaacattagcaaagagtaaaggtgctagtgctggaagagaatggactgaacaggagacccttctactcctggaggccctggagatgtacaaggatgattggaacaaagtgtcggaacatgttggaagtcgtactcaggatgaatgcatcctccactttttgagacttcccattgaggacccataccttgagaattcagatgcttcccttgggcctttggcctaccagcctgtccccttcagtcagtcaggaaatccagttatgagtactgttgcttttttggcatctgtggtggaccctcgcgtggcatctgctgcagcaaaagcggctttggaggagttttctcgggtccgggaggaggtaccactggaattggttgaagctcatgtcaagaaagtacaagaagcagcacgagcctctgggaaagtggatcccacctacggtctggagagcagctgcattgcaggcacagggcccgatgagccagagaagcttggaatagccaggccagaagaaggaaggcctgtggtgagtgggacaggaaatgacatcaccaccccaccgaacaaggagctcccaccaagcccagagaagaaaacaaagcctttggccaccactcaacctgcaaagacttcaacatcgaaagccaaaacacagcccacttctctccctaagcagccagctcccaccaccattggtgggttgaataaaaaacccatgagccttgcttcaggcttagtgccagctgccccacccaaacgccctgccgtcgcctctgccaggccttccatcttaccttcaaaagacgtgaagccaaagcccattgcagatgcaaaggctcctgagaagcgggcctcaccatccaagccagcttctgccccagcctccagatctgggtccaagagcactcagactgttgcaaaaaccacaacagctgctgctgttgcctcaactggcccaagcagtaggagcccctccacgctcctgcccaagaagcccactgccattaagactgagggaaaacctgcagaagtcaagaagatgactgcaaagtctgtaccagctgacttgagtcgcccaaagagcacctccaccagttccatgaagaaaaccaccactctcagtgggacagcccccgctgcaggggtggttcccagccgagtcaaggccacacccatgccctcccggccctccacaactcctttcatagacaagaagcccacctcggccaaacccagctccaccaccccccggctcagccgcctggccaccaatacttctgctcctgatctgaagaatgtccgctccaaggttggctccacggaaaacatcaagcatcagcctggaggaggccgggttcagattcagaacaagaaagtggacatctctaaggtctcctccaagtgtgggtctaaggctaacatcaagcacaagcctggtggaggagatgtcaagattgaaagtcagaagttgaacttcaaggagaaggcccaggccaaggtgggatccctcgataatgtgggccacctacctgcaggaggtgctgtgaagactgagggcggtggcagcgaggctcctctgtgtccgggtccccctgctggggaggagccggccatctctgaggcagcgcctgaagctggcgcccccacttcagccagtggcctcaatggccaccccaccctgtcagggggtggtgaccaaagggaggcccagaccttggacagccagatccaggagacaaattga

SEQ ID NO: 74 - DNA, 2145 bp, Homo sapiens
atggatttcaaagctggaggcgccttatgtcacattcttggggctgcttacaagtataaaaatgaacagggatggcggaggtttgacctacagaacccatctcgaatggatcgtaatgtggaaatgtttatgaacattgaaaaaacattggtgcagaacaattgtttgaccagacccaacatctacctcattccagacattgatctgaagttggctaacaaattgaaagatatcatcaaacgacatcagggaacatttacggatgagaagtcaaaagcttcccaccacatttacccatattcttcctcacaagacgatgaagaatggttgagaccggtgatgagaaaagagaagcaagtgttagtgcattggggcttttacccagacagctatgatacttgggtccatagtaatgatgttgatgctgaaattgaagatccaccaattccagaaaaaccatggaaggttcatgtgaaatggattttggacactgatattttcaatgaatggatgaatgaggaggattatgaggtggatgaaaataggaagcctgtgagttttcgtcagcggatttcaaccaagaatgaagagccagtcagaagtccagaaagaagagatagaaaagcatcagctaatgctcgaaagaggaaacattcgccttcgcctccccctccgacaccaacagaatcacggaagaagagtgggaagaaaggccaagctagcctttatgggaagcgcagaagtcagaaagaggaagatgagcaagaagatctaaccaaggatatggaagacccaacacctgtacccaatatagaagaagtagtacttcccaaaaatgtgaacctaaagaaagatagtgaaaatacacctgttaaaggaggaactgtagcggatctagatgagcaggatgaagaaacagtcacagcaggaggaaaggaagatgaagatcctgccaaaggtgatcagagtcgatcagttgaccttggggaagataatgtgacagagcagaccaatcacattattattcctagttatgcatcatggtttgattataactgtattcatgtgattgaacggcgtgctcttcctgagttcttcaatggaaaaaacaaatccaagactccagaaatatacttggcatatcgaaattttatgattgacacgtatcgtctaaacccccaagagtatttaactagcactgcttgtcggaggaacttgactggagatgtgtgtgctgtgatgagggtccatgcctttttagagcagtggggactcgttaattaccaagttgacccggaaagtagacccatggcaatgggacctcctcctactcctcattttaatgtattagctgataccccctctgggcttgtgcctctgcatcttcgatcacctcaggttcctgctgctcaacagatgctaaattttcctgagaaaaacaaggaaaaaccagttgatttgcagaactttggtctccgtactgacatttactccaagaaaacattagcaaagagtaaaggtgctagtgctggaagagaatggactgaacaggagacccttctactcctggaggccctggagatgtacaaggatgattggaacaaagtgtcggaacatgttggaagtcgtactcaggatgaatgcatcctccactttttgagacttcccattgaggacccataccttgagaattcagatgcttcccttgggcctttggcctaccagcctgtccccttcagtcagtcaggaaatccagttatgagtactgttgcttttttggcatctgtggtggaccctcgcgtggcatctgctgcagcaaaagcggctttggaggagttttctcgggtccgggaggaggtaccactggaattggttgaagctcatgtcaagaaagtacaagaagcagcacgagcctctgggaaagtggatcccacctacggtctggagagcagctgcattgcaggcacagggcccgatgagccagagaagcttggaatagccaggccagaagaaggaaggcctgtggtgagtgggacaggaaatgacatcaccaccccaccgaacaaggagctcccaccaagcccagagaagaaaacaaaggtaggtgccagaatggtggttatcttctactgccataatttttaa

SEQ ID NO: 75 - DNA, 4227 bp, Homo sapiens
atggccgcagcggcgggcggcggcgggccggggacagcggtaggcgccacgggctcggggattgcggcggcagccgcaggcctagctgtttatcgacggaaggatgggggcccggccaccaagttttgggagagcccggagacggtgtcccagctggattcggtgcgggtctggctgggcaagcactacaagaagtatgttcatgcggatgctcctaccaataaaacactggctgggctggtggtgcagcttcttcagttccaggaagatgcctttgggaagcatgtcaccaacccggccttcaccaaactccctgcaaagtgtttcatggatttcaaagctggaggcgccttatgtcacattcttggggctgcttacaagtataaaaatgaacagggatggcggaggtttgacctacagaacccatctcgaatggatcgtaatgtggaaatgtttatgaacattgaaaaaacattggtgcagaacaattgtttgaccagacccaacatctacctcattccagacattgatctgaagttggctaacaaattgaaagatatcatcaaacgacatcagggaacatttacggatgagaagtcaaaagcttcccaccacatttacccatattcttcctcacaagacgatgaagaatggttgagaccggtgatgagaaaagagaagcaagtgttagtgcattggggcttttacccagacagctatgatacttgggtccatagtaatgatgttgatgctgaaattgaagatccaccaattccagaaaaaccatggaaggttcatgtgaaatggattttggacactgatattttcaatgaatggatgaatgaggaggattatgaggtggatgaaaataggaagcctgtgagttttcgtcagcggatttcaaccaagaatgaagagccagtcagaagtccagaaagaagagatagaaaagcatcagctaatgctcgaaagaggaaacattcgccttcgcctccccctccgacaccaacagaatcacggaagaagagtgggaagaaaggccaagctagcctttatgggaagcgcagaagtcagaaagaggaagatgagcaagaagatctaaccaaggatatggaagacccaacacctgtacccaatatagaagaagtagtacttcccaaaaatgtgaacctaaagaaagatagtgaaaatacacctgttaaaggaggaactgtagcggatctagatgagcaggatgaagaaacagtcacagcaggaggaaaggaagatgaagatcctgccaaaggtgatcagagtcgatcagttgaccttggggaagataatgtgacagagcagaccaatcacattattattcctagttatgcatcatggtttgattataactgtattcatgtgattgaacggcgtgctcttcctgagttcttcaatggaaaaaacaaatccaagactccagaaatatacttggcatatcgaaattttatgattgacacgtatcgtctaaacccccaagagtatttaactagcactgcttgtcggaggaacttgactggagatgtgtgtgctgtgatgagggtccatgcctttttagagcagtggggactcgttaattaccaagttgacccggaaagtagacccatggcaatgggacctcctcctactcctcattttaatgtattagctgataccccctctgggcttgtgcctctgcatcttcgatcacctcaggttcctgctgctcaacagatgctaaattttcctgagaaaaacaaggaaaaaccagttgatttgcagaactttggtctccgtactgacatttactccaagaaaacattagcaaagagtaaaggtgctagtgctggaagagaatggactgaacaggagacccttctactcctggaggccctggagatgtacaaggatgattggaacaaagtgtcggaacatgttggaagtcgtactcaggatgaatgcatcctccactttttgagacttcccattgaggacccataccttgagaattcagatgcttcccttgggcctttggcctaccagcctgtccccttcagtcagtcaggaaatccagttatgagtactgttgcttttttggcatctgtggtggaccctcgcgtggcatctgctgcagcaaaagcggctttggaggagttttctcgggtccgggaggaggtaccactggaattggttgaagctcatgtcaagaaagtacaagaagcagcacgagcctctgggaaagtggatcccacctacggtctggagagcagctgcattgcaggcacagggcccgatgagccagagaagcttgatccctttaagatgtaccatgatgatgacctggcagatttggtctttccctccagtgcgacagctgatacttcaatatttgcaggacaaaatgatcccttgaaagacagttacggtatgtctccctgcaacacagctgttgtacctcaggggtggtctgtggaagccttaaactctccacactcagagtcctttgtttccccagaggctgttgcagaacctcctcagccaacggcagttcccttagagctagccaaggagatagaaatggcatcagaagagaggccaccagcacaagcattggaaataatgatgggactgaagactactgacatggcaccatctaaagaaacagagatggccctcgccaaggacatggcactagctacaaaaaccgaggtggcattggctaaagatatggaatcacccaccaaattagatgtgacactggccaaggacatgcagccatccatggaatcagatatggccctagtcaaggacatggaactacccacagaaaaagaagtggccctggttaaggatgtcagatggcccacagaaacagatgtatcttcagccaagaatgtggtactgcccacagaaacagaggtagccccagccaaggatgtgacactgttgaaagaaacagagagggcatctcctataaaaatggacttagccccttccaaggacatgggaccacccaaagaaaacaagaaagaaacagagagggcatctcctataaaaatggacttggctccttccaaggacatgggaccacccaaagaaaacaagatagtcccagccaaggatttggtattactctcagaaatagaggtggcacaggctaatgacattatatcatccacagaaatatcctctgctgagaaggtggctttgtcctcagaaacagaggtagccctggccagggacatgacactgcccccggaaaccaacgtgatcttgaccaaggataaagcactacctttagaagcagaggtggccccagtcaaggacatggctcaactcccagaaacagaaatagccccggccaaggatgtggctccgtccacagtaaaagaagtgggcttgttgaaggacatgtctccactatcagaaacagaaatggctctgggcaaggatgtgactccacctccagaaacagaagtagttctcatcaagaacgtatgtctgcctccagaaatggaggtggccctgactgaggatcaggtcccagccctcaaaacagaagcacccctggctaaggatggggttctgaccctggccaacaatgtgactccagccaaagatgttccaccactctcagaaacagaggcaacaccagttccaattaaagacatggaaattgcacaaacacaaaaaggaataagtgaggattcccatttagaatctctgcaggatgtggggcagtcagctgcacctactttcatgatttcaccagaaaccgtcacaggaacggggaaaaagtgcagcttgccggccgaggaggattctgtgttagaaaaactaggggaaaggaaaccatgcaacagtcaaccttctgagctttcttcagagacctcaggaatagccaggccagaagaaggaaggcctgtggtgagtgggacaggaaatgacatcaccaccccaccgaacaaggagctcccaccaagcccagagaagaaaacaaagcctttggccaccactcaacctgcaaagacttcaacatcgaaagccaaaacacagcccacttctctccctaagcagccagctcccaccaccattggtgggttgaataaaaaacccatgagccttgcttcaggcttagtgccagctgccccacccaaacgccctgccgtcgcctctgccaggccttccatcttaccttcaaaagacgtgaagccaaag

SEQ ID NO: 76 - DNA, 708 bp, Homo sapiens
atggccgcagcggcgggcggcggcgggccggggacagcggtaggcgccacgggctcggggattgcggcggcagccgcaggcctagctgtttatcgacggaaggatgggggcccggccaccaagttttgggagagcccggagacggtgtcccagctggattcggtgcgggtctggctgggcaagcactacaagaagtatgttcatgcggatgctcctaccaataaaacactggctgggctggtggtgcagcttcttcagttccaggaagatgcctttgggaagcatgtcaccaacccggccttcaccaaactccctgttcagattcagaacaagaaagtggacatctctaaggtctcctccaagtgtgggtctaaggctaacatcaagcacaagcctggtggaggagatgtcaagattgaaagtcagaagttgaacttcaaggagaaggcccaggccaaggtgggatccctcgataatgtgggccacctacctgcaggaggtgctgtgaagactgagggcggtggcagcgaggctcctctgtgtccgggtccccctgctggggaggagccggccatctctgaggcagcgcctgaagctggcgcccccacttcagccagtggcctcaatggccaccccaccctgtcagggggtggtgaccaaagggaggcccagaccttggacagccagatccaggagacaagcatctaa

SEQ ID NO: 77 - DNA, 3729 bp, Homo sapiens
atggccgcagcggcgggcggcggcgggccggggacagcggtaggcgccacgggctcggggattgcggcggcagccgcaggcctagctgtttatcgacggaaggatgggggcccggccaccaagttttgggagagcccggagacggtgtcccagctggattcggtgcgggtctggctgggcaagcactacaagaagtatgttcatgcggatgctcctaccaataaaacactggctgggctggtggtgcagcttcttcagttccaggaagatgcctttgggaagcatgtcaccaacccggccttcaccaaactccctgcaaagtgtttcatggatttcaaagctggaggcgccttatgtcacattcttggggctgcttacaagtataaaaatgaacagggatggcggaggtttgacctacagaacccatctcgaatggatcgtaatgtggaaatgtttatgaacattgaaaaaacattggtgcagaacaattgtttgaccagacccaacatctacctcattccagacattgatctgaagttggctaacaaattgaaagatatcatcaaacgacatcagggaacatttacggatgagaagtcaaaagcttcccaccacatttacccatattcttcctcacaagacgatgaagaatggttgagaccggtgatgagaaaagagaagcaagtgttagtgcattggggcttttacccagacagctatgatacttgggtccatagtaatgatgttgatgctgaaattgaagatccaccaattccagaaaaaccatggaaggttcatgtgaaatggattttggacactgatattttcaatgaatggatgaatgaggaggattatgaggtggatgaaaataggaagcctgtgagttttcgtcagcggatttcaaccaagaatgaagagccagtcagaagtccagaaagaagagatagaaaagcatcagctaatgctcgaaagaggaaacattcgccttcgcctccccctccgacaccaacagaatcacggaagaagagtgggaagaaaggccaagctagcctttatgggaagcgcagaagtcagaaagaggaagatgagcaagaagatctaaccaaggatatggaagacccaacacctgtacccaatatagaagaagtagtacttcccaaaaatgtgaacctaaagaaagatagtgaaaatacacctgttaaaggaggaactgtagcggatctagatgagcaggatgaagaaacagtcacagcaggaggaaaggaagatgaagatcctgccaaaggtgatcagagtcgatcagttgaccttggggaagataatgtgacagagcagaccaatcacattattattcctagttatgcatcatggtttgattataactgtattcatgtgattgaacggcgtgctcttcctgagttcttcaatggaaaaaacaaatccaagactccagaaatatacttggcatatcgaaattttatgattgacacgtatcgtctaaacccccaagagtatttaactagcactgcttgtcggaggaacttgactggagatgtgtgtgctgtgatgagggtccatgcctttttagagcagtggggactcgttaattaccaagttgacccggaaagtagacccatggcaatgggacctcctcctactcctcattttaatgtattagctgataccccctctgggcttgtgcctctgcatcttcgatcacctcaggttcctgctgctcaacagatgctaaattttcctgagaaaaacaaggaaaaaccagttgatttgcagaactttggtctccgtactgacatttactccaagaaaacattagcaaagagtaaaggtgctagtgctggaagagaatggactgaacaggagacccttctactcctggaggccctggagatgtacaaggatgattggaacaaagtgtcggaacatgttggaagtcgtactcaggatgaatgcatcctccactttttgagacttcccattgaggacccataccttgagaattcagatgcttcccttgggcctttggcctaccagcctgtccccttcagtcagtcaggaaatccagttatgagtactgttgcttttttggcatctgtggtggaccctcgcgtggcatctgctgcagcaaaagcggctttggaggagttttctcgggtccgggaggaggtaccactggaattggttgaagctcatgtcaagaaagtacaagaagcagcacgagcctctgggaaagtggatcccacctacggtctggagagcagctgcattgcaggcacagggcccgatgagccagagaagcttggaatagccaggccagaagaaggaaggcctgtggtgagtgggacaggaaatgacatcaccaccccaccgaacaaggagctcccaccaagcccagagaagaaaacaaagcctttggccaccactcaacctgcaaagacttcaacatcgaaagccaaaacacagcccacttctctccctaagcagccagctcccaccaccattggtgggttgaataaaaaacccatgagccttgcttcaggcttagtgccagctgccccacccaaacgccctgccgtcgcctctgccaggccttccatcttaccttcaaaagacgtgaagccaaagcccattgcagatgcaaaggctcctgagaagcgggcctcaccatccaagccagcttctgccccagcctccagatctgggtccaagagcactcagactgttgcaaaaaccacaacagctgctgctgttgcctcaactggcccaagcagtaggagcccctccacgctcctgcccaagaagcccactgccattaagactgagggaaaacctgcagaagtcaagaagatgactgcaaagtctgtaccagctgacttgagtcgcccaaagagcacctccaccagttccatgaagaaaaccaccactctcagtgggacagcccccgctgcaggggtggttcccagccgagtcaaggccacacccatgccctcccggccctccacaactcctttcatagacaagaagcccacctcggccaaacccagctccaccaccccccggctcagccgcctggccaccaatacttctgctcctgatctgaagaatgtccgctccaaggttggctccacggaaaacatcaagcatcagcctggaggaggccgggccaaagtagagaaaaaaacagaggcagctgctacaacccgaaagcctgaatctaatgcagtcactaaaacagccggcccaattgcaagtgcacagaaacaacctgcggggaaagtccagatagtctccaaaaaagtgagctacagccatattcagtccaagtgtggttccaaggacaatattaagcatgtccctggaggtggtaatgttcagattcagaacaagaaagtggacatctctaaggtctcctccaagtgtgggtctaaggctaacatcaagcacaagcctggtggaggagatgtcaagattgaaagtcagaagttgaacttcaaggagaaggcccaggccaaggtgggatccctcgataatgtgggccacctacctgcaggaggtgctgtgaagattgagacctacaggctgacgttccgggcaaatgccagggcccgcaccgaccacggggccgacattgtctcccgccccccacacttccctggcggccccaactcgggctcccgggtccttggccccctttcccgggctgtccactag

SEQ ID NO: 78 - DNA, 5364 bp, Homo sapiens
atggccgcagcggcgggcggcggcgggccggggacagcggtaggcgccacgggctcggggattgcggcggcagccgcaggcctagctgtttatcgacggaaggatgggggcccggccaccaagttttgggagagcccggagacggtgtcccagctggattcggtgcgggtctggctgggcaagcactacaagaagtatgttcatgcggatgctcctaccaataaaacactggctgggctggtggtgcagcttcttcagttccaggaagatgcctttgggaagcatgtcaccaacccggccttcaccaaactccctgcaaagtgtttcatggatttcaaagctggaggcgccttatgtcacattcttggggctgcttacaagtataaaaatgaacagggatggcggaggtttgacctacagaacccatctcgaatggatcgtaatgtggaaatgtttatgaacattgaaaaaacattggtgcagaacaattgtttgaccagacccaacatctacctcattccagacattgatctgaagttggctaacaaattgaaagatatcatcaaacgacatcagggaacatttacggatgagaagtcaaaagcttcccaccacatttacccatattcttcctcacaagacgatgaagaatggttgagaccggtgatgagaaaagagaagcaagtgttagtgcattggggcttttacccagacagctatgatacttgggtccatagtaatgatgttgatgctgaaattgaagatccaccaattccagaaaaaccatggaaggttcatgtgaaatggattttggacactgatattttcaatgaatggatgaatgaggaggattatgaggtggatgaaaataggaagcctgtgagttttcgtcagcggatttcaaccaagaatgaagagccagtcagaagtccagaaagaagagatagaaaagcatcagctaatgctcgaaagaggaaacattcgccttcgcctccccctccgacaccaacagaatcacggaagaagagtgggaagaaaggccaagctagcctttatgggaagcgcagaagtcagaaagaggaagatgagcaagaagatctaaccaaggatatggaagacccaacacctgtacccaatatagaagaagtagtacttcccaaaaatgtgaacctaaagaaagatagtgaaaatacacctgttaaaggaggaactgtagcggatctagatgagcaggatgaagaaacagtcacagcaggaggaaaggaagatgaagatcctgccaaaggtgatcagagtcgatcagttgaccttggggaagataatgtgacagagcagaccaatcacattattattcctagttatgcatcatggtttgattataactgtattcatgtgattgaacggcgtgctcttcctgagttcttcaatggaaaaaacaaatccaagactccagaaatatacttggcatatcgaaattttatgattgacacgtatcgtctaaacccccaagagtatttaactagcactgcttgtcggaggaacttgactggagatgtgtgtgctgtgatgagggtccatgcctttttagagcagtggggactcgttaattaccaagttgacccggaaagtagacccatggcaatgggacctcctcctactcctcattttaatgtattagctgataccccctctgggcttgtgcctctgcatcttcgatcacctcaggttcctgctgctcaacagatgctaaattttcctgagaaaaacaaggaaaaaccagttgatttgcagaactttggtctccgtactgacatttactccaagaaaacattagcaaagagtaaaggtgctagtgctggaagagaatggactgaacaggagacccttctactcctggaggccctggagatgtacaaggatgattggaacaaagtgtcggaacatgttggaagtcgtactcaggatgaatgcatcctccactttttgagacttcccattgaggacccataccttgagaattcagatgcttcccttgggcctttggcctaccagcctgtccccttcagtcagtcaggaaatccagttatgagtactgttgcttttttggcatctgtggtggaccctcgcgtggcatctgctgcagcaaaagcggctttggaggagttttctcgggtccgggaggaggtaccactggaattggttgaagctcatgtcaagaaagtacaagaagcagcacgagcctctgggaaagtggatcccacctacggtctggagagcagctgcattgcaggcacagggcccgatgagccagagaagcttgatccctttaagatgtaccatgatgatgacctggcagatttggtctttccctccagtgcgacagctgatacttcaatatttgcaggacaaaatgatcccttgaaagacagttacggtatgtctccctgcaacacagctgttgtacctcaggggtggtctgtggaagccttaaactctccacactcagagtcctttgtttccccagaggctgttgcagaacctcctcagccaacggcagttcccttagagctagccaaggagatagaaatggcatcagaagagaggccaccagcacaagcattggaaataatgatgggactgaagactactgacatggcaccatctaaagaaacagagatggccctcgccaaggacatggcactagctacaaaaaccgaggtggcattggctaaagatatggaatcacccaccaaattagatgtgacactggccaaggacatgcagccatccatggaatcagatatggccctagtcaaggacatggaactacccacagaaaaagaagtggccctggttaaggatgtcagatggcccacagaaacagatgtatcttcagccaagaatgtggtactgcccacagaaacagaggtagccccagccaaggatgtgacactgttgaaagaaacagagagggcatctcctataaaaatggacttagccccttccaaggacatgggaccacccaaagaaaacaagaaagaaacagagagggcatctcctataaaaatggacttggctccttccaaggacatgggaccacccaaagaaaacaagatagtcccagccaaggatttggtattactctcagaaatagaggtggcacaggctaatgacattatatcatccacagaaatatcctctgctgagaaggtggctttgtcctcagaaacagaggtagccctggccagggacatgacactgcccccggaaaccaacgtgatcttgaccaaggataaagcactacctttagaagcagaggtggccccagtcaaggacatggctcaactcccagaaacagaaatagccccggccaaggatgtggctccgtccacagtaaaagaagtgggcttgttgaaggacatgtctccactatcagaaacagaaatggctctgggcaaggatgtgactccacctccagaaacagaagtagttctcatcaagaacgtatgtctgcctccagaaatggaggtggccctgactgaggatcaggtcccagccctcaaaacagaagcacccctggctaaggatggggttctgaccctggccaacaatgtgactccagccaaagatgttccaccactctcagaaacagaggcaacaccagttccaattaaagacatggaaattgcacaaacacaaaaaggaataagtgaggattcccatttagaatctctgcaggatgtggggcagtcagctgcacctactttcatgatttcaccagaaaccgtcacaggaacggggaaaaagtgcagcttgccggccgaggaggattctgtgttagaaaaactaggggaaaggaaaccatgcaacagtcaaccttctgagctttcttcagagacctcaggaatagccaggccagaagaaggaaggcctgtggtgagtgggacaggaaatgacatcaccaccccaccgaacaaggagctcccaccaagcccagagaagaaaacaaagcctttggccaccactcaacctgcaaagacttcaacatcgaaagccaaaacacagcccacttctctccctaagcagccagctcccaccaccattggtgggttgaataaaaaacccatgagccttgcttcaggcttagtgccagctgccccacccaaacgccctgccgtcgcctctgccaggccttccatcttaccttcaaaagacgtgaagccaaagcccattgcagatgcaaaggctcctgagaagcgggcctcaccatccaagccagcttctgccccagcctccagatctgggtccaagagcactcagactgttgcaaaaaccacaacagctgctgctgttgcctcaactggcccaagcagtaggagcccctccacgctcctgcccaagaagcccactgccattaagactgagggaaaacctgcagaagtcaagaagatgactgcaaagtctgtaccagctgacttgagtcgcccaaagagcacctccaccagttccatgaagaaaaccaccactctcagtgggacagcccccgctgcaggggtggttcccagccgagtcaaggccacacccatgccctcccggccctccacaactcctttcatagacaagaagcccacctcggccaaacccagctccaccaccccccggctcagccgcctggccaccaatacttctgctcctgatctgaagaatgtccgctccaaggttggctccacggaaaacatcaagcatcagcctggaggaggccgggccaaagtagagaaaaaaacagaggcagctgctacaacccgaaagcctgaatctaatgcagtcactaaaacagccggcccaattgcaagtgcacagaaacaacctgcggggaaagtccagatagtctccaaaaaagtgagctacagccatattcagtccaagtgtggttccaaggacaatattaagcatgtccctggaggtggtaatgttcagattcagaacaagaaagtggacatctctaaggtctcctccaagtgtgggtctaaggctaacatcaagcacaagcctggtggaggagatgtcaagattgaaagtcagaagttgaacttcaaggagaaggcccaggccaaggtgggatccctcgataatgtgggccacctacctgcaggaggtgctgtgaagactgagggcggtggcagcgaggctcctctgtgtccgggtccccctgctggggaggagccggccatctctgaggcagcgcctgaagctggcgcccccacttcagccagtggcctcaatggccaccccaccctgtcagggggtggtgaccaaagggaggcccagaccttggacagccagatccaggagacaagcatctaa

SEQ ID NO: 79 - DNA, 3342 bp, Homo sapiens
atggccgcagcggcgggcggcggcgggccggggacagcggtaggcgccacgggctcggggattgcggcggcagccgcaggcctagctgtttatcgacggaaggatgggggcccggccaccaagttttgggagagcccggagacggtgtcccagctggattcggtgcgggtctggctgggcaagcactacaagaagtatgttcatgcggatgctcctaccaataaaacactggctgggctggtggtgcagcttcttcagttccaggaagatgcctttgggaagcatgtcaccaacccggccttcaccaaactccctgcaaagtgtttcatggatttcaaagctggaggcgccttatgtcacattcttggggctgcttacaagtataaaaatgaacagggatggcggaggtttgacctacagaacccatctcgaatggatcgtaatgtggaaatgtttatgaacattgaaaaaacattggtgcagaacaattgtttgaccagacccaacatctacctcattccagacattgatctgaagttggctaacaaattgaaagatatcatcaaacgacatcagggaacatttacggatgagaagtcaaaagcttcccaccacatttacccatattcttcctcacaagacgatgaagaatggttgagaccggtgatgagaaaagagaagcaagtgttagtgcattggggcttttacccagacagctatgatacttgggtccatagtaatgatgttgatgctgaaattgaagatccaccaattccagaaaaaccatggaaggttcatgtgaaatggattttggacactgatattttcaatgaatggatgaatgaggaggattatgaggtggatgaaaataggaagcctgtgagttttcgtcagcggatttcaaccaagaatgaagagccagtcagaagtccagaaagaagagatagaaaagcatcagctaatgctcgaaagaggaaacattcgccttcgcctccccctccgacaccaacagaatcacggaagaagagtgggaagaaaggccaagctagcctttatgggaagcgcagaagtcagaaagaggaagatgagcaagaagatctaaccaaggatatggaagacccaacacctgtacccaatatagaagaagtagtacttcccaaaaatgtgaacctaaagaaagatagtgaaaatacacctgttaaaggaggaactgtagcggatctagatgagcaggatgaagaaacagtcacagcaggaggaaaggaagatgaagatcctgccaaaggtgatcagagtcgatcagttgaccttggggaagataatgtgacagagcagaccaatcacattattattcctagttatgcatcatggtttgattataactgtattcatgtgattgaacggcgtgctcttcctgagttcttcaatggaaaaaacaaatccaagactccagaaatatacttggcatatcgaaattttatgattgacacgtatcgtctaaacccccaagagtatttaactagcactgcttgtcggaggaacttgactggagatgtgtgtgctgtgatgagggtccatgcctttttagagcagtggggactcgttaattaccaagttgacccggaaagtagacccatggcaatgggacctcctcctactcctcattttaatgtattagctgataccccctctgggcttgtgcctctgcatcttcgatcacctcaggttcctgctgctcaacagatgctaaattttcctgagaaaaacaaggaaaaaccagttgatttgcagaactttggtctccgtactgacatttactccaagaaaacattagcaaagagtaaaggtgctagtgctggaagagaatggactgaacaggagacccttctactcctggaggccctggagatgtacaaggatgattggaacaaagtgtcggaacatgttggaagtcgtactcaggatgaatgcatcctccactttttgagacttcccattgaggacccataccttgagaattcagatgcttcccttgggcctttggcctaccagcctgtccccttcagtcagtcaggaaatccagttatgagtactgttgcttttttggcatctgtggtggaccctcgcgtggcatctgctgcagcaaaagcggctttggaggagttttctcgggtccgggaggaggtaccactggaattggttgaagctcatgtcaagaaagtacaagaagcagcacgagcctctgggaaagtggatcccacctacggtctggagagcagctgcattgcaggcacagggcccgatgagccagagaagcttggaatagccaggccagaagaaggaaggcctgtggtgagtgggacaggaaatgacatcaccaccccaccgaacaaggagctcccaccaagcccagagaagaaaacaaagcctttggccaccactcaacctgcaaagacttcaacatcgaaagccaaaacacagcccacttctctccctaagcagccagctcccaccaccattggtgggttgaataaaaaacccatgagccttgcttcaggcttagtgccagctgccccacccaaacgccctgccgtcgcctctgccaggccttccatcttaccttcaaaagacgtgaagccaaagcccattgcagatgcaaaggctcctgagaagcgggcctcaccatccaagccagcttctgccccagcctccagatctgggtccaagagcactcagactgttgcaaaaaccacaacagctgctgctgttgcctcaactggcccaagcagtaggagcccctccacgctcctgcccaagaagcccactgccattaagactgagggaaaacctgcagaagtcaagaagatgactgcaaagtctgtaccagctgacttgagtcgcccaaagagcacctccaccagttccatgaagaaaaccaccactctcagtgggacagcccccgctgcaggggtggttcccagccgagtcaaggccacacccatgccctcccggccctccacaactcctttcatagacaagaagcccacctcggccaaacccagctccaccaccccccggctcagccgcctggccaccaatacttctgctcctgatctgaagaatgtccgctccaaggccaaagtagagaaaaaaacagaggcagctgctacaacccgaaagcctgaatctaatgcagtcactaaaacagccggcccaattgcaagtgcacagaaacaacctgcggggaaagtccagatagtctccaaaaaagtgagctacagccatattcagtccaagtgtggttccaaggacaatattaagcatgtccctggaggtggtaat

SEQ ID NO: 80 - DNA, 3453 bp, Homo sapiens
atggatttcaaagctggaggcgccttatgtcacattcttggggctgcttacaagtataaaaatgaacagggatggcggaggtttgacctacagaacccatctcgaatggatcgtaatgtggaaatgtttatgaacattgaaaaaacattggtgcagaacaattgtttgaccagacccaacatctacctcattccagacattgatctgaagttggctaacaaattgaaagatatcatcaaacgacatcagggaacatttacggatgagaagtcaaaagcttcccaccacatttacccatattcttcctcacaagacgatgaagaatggttgagaccggtgatgagaaaagagaagcaagtgttagtgcattggggcttttacccagacagctatgatacttgggtccatagtaatgatgttgatgctgaaattgaagatccaccaattccagaaaaaccatggaaggttcatgtgaaatggattttggacactgatattttcaatgaatggatgaatgaggaggattatgaggtggatgaaaataggaagcctgtgagttttcgtcagcggatttcaaccaagaatgaagagccagtcagaagtccagaaagaagagatagaaaagcatcagctaatgctcgaaagaggaaacattcgccttcgcctccccctccgacaccaacagaatcacggaagaagagtgggaagaaaggccaagctagcctttatgggaagcgcagaagtcagaaagaggaagatgagcaagaagatctaaccaaggatatggaagacccaacacctgtacccaatatagaagaagtagtacttcccaaaaatgtgaacctaaagaaagatagtgaaaatacacctgttaaaggaggaactgtagcggatctagatgagcaggatgaagaaacagtcacagcaggaggaaaggaagatgaagatcctgccaaaggtgatcagagtcgatcagttgaccttggggaagataatgtgacagagcagaccaatcacattattattcctagttatgcatcatggtttgattataactgtattcatgtgattgaacggcgtgctcttcctgagttcttcaatggaaaaaacaaatccaagactccagaaatatacttggcatatcgaaattttatgattgacacgtatcgtctaaacccccaagagtatttaactagcactgcttgtcggaggaacttgactggagatgtgtgtgctgtgatgagggtccatgcctttttagagcagtggggactcgttaattaccaagttgacccggaaagtagacccatggcaatgggacctcctcctactcctcattttaatgtattagctgataccccctctgggcttgtgcctctgcatcttcgatcacctcaggttcctgctgctcaacagatgctaaattttcctgagaaaaacaaggaaaaaccagttgatttgcagaactttggtctccgtactgacatttactccaagaaaacattagcaaagagtaaaggtgctagtgctggaagagaatggactgaacaggagacccttctactcctggaggccctggagatgtacaaggatgattggaacaaagtgtcggaacatgttggaagtcgtactcaggatgaatgcatcctccactttttgagacttcccattgaggacccataccttgagaattcagatgcttcccttgggcctttggcctaccagcctgtccccttcagtcagtcaggaaatccagttatgagtactgttgcttttttggcatctgtggtggaccctcgcgtggcatctgctgcagcaaaagcggctttggaggagttttctcgggtccgggaggaggtaccactggaattggttgaagctcatgtcaagaaagtacaagaagcagcacgagcctctgggaaagtggatcccacctacggtctggagagcagctgcattgcaggcacagggcccgatgagccagagaagcttggaatagccaggccagaagaaggaaggcctgtggtgagtgggacaggaaatgacatcaccaccccaccgaacaaggagctcccaccaagcccagagaagaaaacaaagcctttggccaccactcaacctgcaaagacttcaacatcgaaagccaaaacacagcccacttctctccctaagcagccagctcccaccaccattggtgggttgaataaaaaacccatgagccttgcttcaggcttagtgccagctgccccacccaaacgccctgccgtcgcctctgccaggccttccatcttaccttcaaaagacgtgaagccaaagcccattgcagatgcaaaggctcctgagaagcgggcctcaccatccaagccagcttctgccccagcctccagatctgggtccaagagcactcagactgttgcaaaaaccacaacagctgctgctgttgcctcaactggcccaagcagtaggagcccctccacgctcctgcccaagaagcccactgccattaagactgagggaaaacctgcagaagtcaagaagatgactgcaaagtctgtaccagctgacttgagtcgcccaaagagcacctccaccagttccatgaagaaaaccaccactctcagtgggacagcccccgctgcaggggtggttcccagccgagtcaaggccacacccatgccctcccggccctccacaactcctttcatagacaagaagcccacctcggccaaacccagctccaccaccccccggctcagccgcctggccaccaatacttctgctcctgatctgaagaatgtccgctccaaggttggctccacggaaaacatcaagcatcagcctggaggaggccgggccaaagtagagaaaaaaacagaggcagctgctacaacccgaaagcctgaatctaatgcagtcactaaaacagccggcccaattgcaagtgcacagaaacaacctgcggggaaagtccagatagtctccaaaaaagtgagctacagccatattcagtccaagtgtggttccaaggacaatattaagcatgtccctggaggtggtaatgttcagattcagaacaagaaagtggacatctctaaggtctcctccaagtgtgggtctaaggctaacatcaagcacaagcctggtggaggagatgtcaagattgaaagtcagaagttgaacttcaaggagaaggcccaggccaaggtgggatccctcgataatgtgggccacctacctgcaggaggtgctgtgaagactgagggcggtggcagcgaggctcctctgtgtccgggtccccctgctggggaggagccggccatctctgaggcagcgcctgaagctggcgcccccacttcagccagtggcctcaatggccaccccaccctgtcagggggtggtgaccaaagggaggcccagaccttggacagccagatccaggagacaagcatctaa

SEQ ID NO: 81 - DNA, 5058 bp, Homo sapiens
atggatttcaaagctggaggcgccttatgtcacattcttggggctgcttacaagtataaaaatgaacagggatggcggaggtttgacctacagaacccatctcgaatggatcgtaatgtggaaatgtttatgaacattgaaaaaacattggtgcagaacaattgtttgaccagacccaacatctacctcattccagacattgatctgaagttggctaacaaattgaaagatatcatcaaacgacatcagggaacatttacggatgagaagtcaaaagcttcccaccacatttacccatattcttcctcacaagacgatgaagaatggttgagaccggtgatgagaaaagagaagcaagtgttagtgcattggggcttttacccagacagctatgatacttgggtccatagtaatgatgttgatgctgaaattgaagatccaccaattccagaaaaaccatggaaggttcatgtgaaatggattttggacactgatattttcaatgaatggatgaatgaggaggattatgaggtggatgaaaataggaagcctgtgagttttcgtcagcggatttcaaccaagaatgaagagccagtcagaagtccagaaagaagagatagaaaagcatcagctaatgctcgaaagaggaaacattcgccttcgcctccccctccgacaccaacagaatcacggaagaagagtgggaagaaaggccaagctagcctttatgggaagcgcagaagtcagaaagaggaagatgagcaagaagatctaaccaaggatatggaagacccaacacctgtacccaatatagaagaagtagtacttcccaaaaatgtgaacctaaagaaagatagtgaaaatacacctgttaaaggaggaactgtagcggatctagatgagcaggatgaagaaacagtcacagcaggaggaaaggaagatgaagatcctgccaaaggtgatcagagtcgatcagttgaccttggggaagataatgtgacagagcagaccaatcacattattattcctagttatgcatcatggtttgattataactgtattcatgtgattgaacggcgtgctcttcctgagttcttcaatggaaaaaacaaatccaagactccagaaatatacttggcatatcgaaattttatgattgacacgtatcgtctaaacccccaagagtatttaactagcactgcttgtcggaggaacttgactggagatgtgtgtgctgtgatgagggtccatgcctttttagagcagtggggactcgttaattaccaagttgacccggaaagtagacccatggcaatgggacctcctcctactcctcattttaatgtattagctgataccccctctgggcttgtgcctctgcatcttcgatcacctcaggttcctgctgctcaacagatgctaaattttcctgagaaaaacaaggaaaaaccagttgatttgcagaactttggtctccgtactgacatttactccaagaaaacattagcaaagagtaaaggtgctagtgctggaagagaatggactgaacaggagacccttctactcctggaggccctggagatgtacaaggatgattggaacaaagtgtcggaacatgttggaagtcgtactcaggatgaatgcatcctccactttttgagacttcccattgaggacccataccttgagaattcagatgcttcccttgggcctttggcctaccagcctgtccccttcagtcagtcaggaaatccagttatgagtactgttgcttttttggcatctgtggtggaccctcgcgtggcatctgctgcagcaaaagcggctttggaggagttttctcgggtccgggaggaggtaccactggaattggttgaagctcatgtcaagaaagtacaagaagcagcacgagcctctgggaaagtggatcccacctacggtctggagagcagctgcattgcaggcacagggcccgatgagccagagaagcttgggtctccaactgaattccttgaagagaaaatggcctaccaggaatacccaaatagccagaactggccagaagataccaacttttgtttccaacctgagcaagtggtcgatcctatccagactgatccctttaagatgtaccatgatgatgacctggcagatttggtctttccctccagtgcgacagctgatacttcaatatttgcaggacaaaatgatcccttgaaagacagttacggtatgtctccctgcaacacagctgttgtacctcaggggtggtctgtggaagccttaaactctccacactcagagtcctttgtttccccagaggctgttgcagaacctcctcagccaacggcagttcccttagagctagccaaggagatagaaatggcatcagaagagaggccaccagcacaagcattggaaataatgatgggactgaagactactgacatggcaccatctaaagaaacagagatggccctcgccaaggacatggcactagctacaaaaaccgaggtggcattggctaaagatatggaatcacccaccaaattagatgtgacactggccaaggacatgcagccatccatggaatcagatatggccctagtcaaggacatggaactacccacagaaaaagaagtggccctggttaaggatgtcagatggcccacagaaacagatgtatcttcagccaagaatgtggtactgcccacagaaacagaggtagccccagccaaggatgtgacactgttgaaagaaacagagagggcatctcctataaaaatggacttagccccttccaaggacatgggaccacccaaagaaaacaagaaagaaacagagagggcatctcctataaaaatggacttggctccttccaaggacatgggaccacccaaagaaaacaagatagtcccagccaaggatttggtattactctcagaaatagaggtggcacaggctaatgacattatatcatccacagaaatatcctctgctgagaaggtggctttgtcctcagaaacagaggtagccctggccagggacatgacactgcccccggaaaccaacgtgatcttgaccaaggataaagcactacctttagaagcagaggtggccccagtcaaggacatggctcaactcccagaaacagaaatagccccggccaaggatgtggctccgtccacagtaaaagaagtgggcttgttgaaggacatgtctccactatcagaaacagaaatggctctgggcaaggatgtgactccacctccagaaacagaagtagttctcatcaagaacgtatgtctgcctccagaaatggaggtggccctgactgaggatcaggtcccagccctcaaaacagaagcacccctggctaaggatggggttctgaccctggccaacaatgtgactccagccaaagatgttccaccactctcagaaacagaggcaacaccagttccaattaaagacatggaaattgcacaaacacaaaaaggaataagtgaggattcccatttagaatctctgcaggatgtggggcagtcagctgcacctactttcatgatttcaccagaaaccgtcacaggaacggggaaaaagtgcagcttgccggccgaggaggattctgtgttagaaaaactaggggaaaggaaaccatgcaacagtcaaccttctgagctttcttcagagacctcagccaacttcatgtattgcggtacccctcccacacaagccaaacaagtttgcagacccagtgaccgcaggtcaacccggcccaagcctgccagggtccctcctgagctgctgggaggctctcctccatggaagactcttgatcacaggctgggccactgctctttgtctgagtcaggttgggtctctggttcatcctcctgtggtgggcctgggaaccaaagaaaaagtattcatgttgactcacttgaaccccagagggatcttggcagggaggcctgggatatagaaagcacaccaataatgatgaagaaaaagaagaagaaaccaaagcaaaagagatattctcaaccacgggctggaggaccttcggatgatgacaatgcagataagcctaaaggtcatccatttgcagctgacacacaaaaatcaggtgttctccccagccagcctaccactatgggtacagaatatggacttgtatctggagaaaacttgaaaagggaatgtttagttaactccagtgcagccagactggtagctgagaactttgtctcagagagtctcagaattcctttatatccttctgaagaagcccccaaaactgcaataagttctcagtctaagctgagagtagaggaagagagcaaaagtaacaagtcagtactacaaaaccaagacaagaaattgctgaagcaacatgaatacaaaccacagcctgcaccccacctgaagactcctgtagataaaagccagtcagtaggccctctcaatctgaaaggacccctagcagaagtttctgcatacaatgtagaaacccctttggatatcagacttaaagagggttgctctcctttcttggaccaagaggttatgggtgtagtttcaaaacccacagcagcaaaagaaataccaaatttggtacccactttgatagcaagtaatccattagaatgtaatctaaaagaagggaataatgaaagtaaaatgactaaactgcagaatgtcaaactgaaggagtttcctgaaggagctgaagaggataaagaactaaaaaaggaagcttttcccaacgaaagacaagagatcagcatctttacttctgagcagctgcagggccaagtgttggtacaggtccctggggtagagaatgaaccatttaagagaatggcaggtgatggcaaaagcaggaagggaaggggaagttctgggaaaatgagaacagattctgggaaggtaaaagcaaaatctgagctgccatttcttctggacagccagaaggacggaagggctgttctcataccgagtgagccagtctctaaaactgaaggaatgactactcaggataagagtgaggagctg

SEQ ID NO: 82 - DNA, 5160 bp, Homo sapiens
atggatttcaaagctggaggcgccttatgtcacattcttggggctgcttacaagtataaaaatgaacagggatggcggaggtttgacctacagaacccatctcgaatggatcgtaatgtggaaatgtttatgaacattgaaaaaacattggtgcagaacaattgtttgaccagacccaacatctacctcattccagacattgatctgaagttggctaacaaattgaaagatatcatcaaacgacatcagggaacatttacggatgagaagtcaaaagcttcccaccacatttacccatattcttcctcacaagacgatgaagaatggttgagaccggtgatgagaaaagagaagcaagtgttagtgcattggggcttttacccagacagctatgatacttgggtccatagtaatgatgttgatgctgaaattgaagatccaccaattccagaaaaaccatggaaggttcatgtgaaatggattttggacactgatattttcaatgaatggatgaatgaggaggattatgaggtggatgaaaataggaagcctgtgagttttcgtcagcggatttcaaccaagaatgaagagccagtcagaagtccagaaagaagagatagaaaagcatcagctaatgctcgaaagaggaaacattcgccttcgcctccccctccgacaccaacagaatcacggaagaagagtgggaagaaaggccaagctagcctttatgggaagcgcagaagtcagaaagaggaagatgagcaagaagatctaaccaaggatatggaagacccaacacctgtacccaatatagaagaagtagtacttcccaaaaatgtgaacctaaagaaagatagtgaaaatacacctgttaaaggaggaactgtagcggatctagatgagcaggatgaagaaacagtcacagcaggaggaaaggaagatgaagatcctgccaaaggtgatcagagtcgatcagttgaccttggggaagataatgtgacagagcagaccaatcacattattattcctagttatgcatcatggtttgattataactgtattcatgtgattgaacggcgtgctcttcctgagttcttcaatggaaaaaacaaatccaagactccagaaatatacttggcatatcgaaattttatgattgacacgtatcgtctaaacccccaagagtatttaactagcactgcttgtcggaggaacttgactggagatgtgtgtgctgtgatgagggtccatgcctttttagagcagtggggactcgttaattaccaagttgacccggaaagtagacccatggcaatgggacctcctcctactcctcattttaatgtattagctgataccccctctgggcttgtgcctctgcatcttcgatcacctcaggttcctgctgctcaacagatgctaaattttcctgagaaaaacaaggaaaaaccagttgatttgcagaactttggtctccgtactgacatttactccaagaaaacattagcaaagagtaaaggtgctagtgctggaagagaatggactgaacaggagacccttctactcctggaggccctggagatgtacaaggatgattggaacaaagtgtcggaacatgttggaagtcgtactcaggatgaatgcatcctccactttttgagacttcccattgaggacccataccttgagaattcagatgcttcccttgggcctttggcctaccagcctgtccccttcagtcagtcaggaaatccagttatgagtactgttgcttttttggcatctgtggtggaccctcgcgtggcatctgctgcagcaaaagcggctttggaggagttttctcgggtccgggaggaggtaccactggaattggttgaagctcatgtcaagaaagtacaagaagcagcacgagcctctgggaaagtggatcccacctacggtctggagagcagctgcattgcaggcacagggcccgatgagccagagaagcttgggtctccaactgaattccttgaagagaaaatggcctaccaggaatacccaaatagccagaactggccagaagataccaacttttgtttccaacctgagcaagtggtcgatcctatccagactgatccctttaagatgtaccatgatgatgacctggcagatttggtctttccctccagtgcgacagctgatacttcaatatttgcaggacaaaatgatcccttgaaagacagttacggtatgtctccctgcaacacagctgttgtacctcaggggtggtctgtggaagccttaaactctccacactcagagtcctttgtttccccagaggctgttgcagaacctcctcagccaacggcagttcccttagagctagccaaggagatagaaatggcatcagaagagaggccaccagcacaagcattggaaataatgatgggactgaagactactgacatggcaccatctaaagaaacagagatggccctcgccaaggacatggcactagctacaaaaaccgaggtggcattggctaaagatatggaatcacccaccaaattagatgtgacactggccaaggacatgcagccatccatggaatcagatatggccctagtcaaggacatggaactacccacagaaaaagaagtggccctggttaaggatgtcagatggcccacagaaacagatgtatcttcagccaagaatgtggtactgcccacagaaacagaggtagccccagccaaggatgtgacactgttgaaagaaacagagagggcatctcctataaaaatggacttagccccttccaaggacatgggaccacccaaagaaaacaagaaagaaacagagagggcatctcctataaaaatggacttggctccttccaaggacatgggaccacccaaagaaaacaagatagtcccagccaaggatttggtattactctcagaaatagaggtggcacaggctaatgacattatatcatccacagaaatatcctctgctgagaaggtggctttgtcctcagaaacagaggtagccctggccagggacatgacactgcccccggaaaccaacgtgatcttgaccaaggataaagcactacctttagaagcagaggtggccccagtcaaggacatggctcaactcccagaaacagaaatagccccggccaaggatgtggctccgtccacagtaaaagaagtgggcttgttgaaggacatgtctccactatcagaaacagaaatggctctgggcaaggatgtgactccacctccagaaacagaagtagttctcatcaagaacgtatgtctgcctccagaaatggaggtggccctgactgaggatcaggtcccagccctcaaaacagaagcacccctggctaaggatggggttctgaccctggccaacaatgtgactccagccaaagatgttccaccactctcagaaacagaggcaacaccagttccaattaaagacatggaaattgcacaaacacaaaaaggaataagtgaggattcccatttagaatctctgcaggatgtggggcagtcagctgcacctactttcatgatttcaccagaaaccgtcacaggaacggggaaaaagtgcagcttgccggccgaggaggattctgtgttagaaaaactaggggaaaggaaaccatgcaacagtcaaccttctgagctttcttcagagacctcaggaatagccaggccagaagaaggaaggcctgtggtgagtgggacaggaaatgacatcaccaccccaccgaacaaggagctcccaccaagcccagagaagaaaacaaagcctttggccaccactcaacctgcaaagacttcaacatcgaaagccaaaacacagcccacttctctccctaagcagccagctcccaccaccattggtgggttgaataaaaaacccatgagccttgcttcaggcttagtgccagctgccccacccaaacgccctgccgtcgcctctgccaggccttccatcttaccttcaaaagacgtgaagccaaagcccattgcagatgcaaaggctcctgagaagcgggcctcaccatccaagccagcttctgccccagcctccagatctgggtccaagagcactcagactgttgcaaaaaccacaacagctgctgctgttgcctcaactggcccaagcagtaggagcccctccacgctcctgcccaagaagcccactgccattaagactgagggaaaacctgcagaagtcaagaagatgactgcaaagtctgtaccagctgacttgagtcgcccaaagagcacctccaccagttccatgaagaaaaccaccactctcagtgggacagcccccgctgcaggggtggttcccagccgagtcaaggccacacccatgccctcccggccctccacaactcctttcatagacaagaagcccacctcggccaaacccagctccaccaccccccggctcagccgcctggccaccaatacttctgctcctgatctgaagaatgtccgctccaaggttggctccacggaaaacatcaagcatcagcctggaggaggccgggccaaagtagagaaaaaaacagaggcagctgctacaacccgaaagcctgaatctaatgcagtcactaaaacagccggcccaattgcaagtgcacagaaacaacctgcggggaaagtccagatagtctccaaaaaagtgagctacagccatattcagtccaagtgtggttccaaggacaatattaagcatgtccctggaggtggtaatgttcagattcagaacaagaaagtggacatctctaaggtctcctccaagtgtgggtctaaggctaacatcaagcacaagcctggtggaggagatgtcaagattgaaagtcagaagttgaacttcaaggagaaggcccaggccaaggtgggatccctcgataatgtgggccacctacctgcaggaggtgctgtgaagactgagggcggtggcagcgaggctcctctgtgtccgggtccccctgctggggaggagccggccatctctgaggcagcgcctgaagctggcgcccccacttcagccagtggcctcaatggccaccccaccctgtcagggggtggtgaccaaagggaggcccagaccttggacagccagatccaggagacaagcatctaa

SEQ ID NO: 83 - DNA, 588 bp, Homo sapiens
atggccgcagcggcgggcggcggcgggccggggacagcggtaggcgccacgggctcggggattgcggcggcagccgcaggcctagctgtttatcgacggaaggatgggggcccggccaccaagttttgggagagcccggagacggtgtcccagctggattcggtgcgggtctggctgggcaagcactacaagaaggttcagattcagaacaagaaagtggacatctctaaggtctcctccaagtgtgggtctaaggctaacatcaagcacaagcctggtggaggagatgtcaagattgaaagtcagaagttgaacttcaaggagaaggcccaggccaaggtgggatccctcgataatgtgggccacctacctgcaggaggtgctgtgaagactgagggcggtggcagcgaggctcctctgtgtccgggtccccctgctggggaggagccggccatctctgaggcagcgcctgaagctggcgcccccacttcagccagtggcctcaatggccaccccaccctgtcagggggtggtgaccaaagggaggcccagaccttggacagccagatccaggagacaagcatctaa

SEQ ID NO: 84 - DNA, 5385 bp, Homo sapiens
atggccgcagcggcgggcggcggcgggccggggacagcggtaggcgccacgggctcggggattgcggcggcagccgcaggcctagctgtttatcgacggaaggatgggggcccggccaccaagttttgggagagcccggagacggtgtcccagctggattcggtgcgggtctggctgggcaagcactacaagaagtatgttcatgcggatgctcctaccaataaaacactggctgggctggtggtgcagcttcttcagttccaggaagatgcctttgggaagcatgtcaccaacccggccttcaccaaactccctgcaaagtgtttcatggatttcaaagctggaggcgccttatgtcacattcttggggctgcttacaagtataaaaatgaacagggatggcggaggtttgacctacagaacccatctcgaatggatcgtaatgtggaaatgtttatgaacattgaaaaaacattggtgcagaacaattgtttgaccagacccaacatctacctcattccagacattgatctgaagttggctaacaaattgaaagatatcatcaaacgacatcagggaacatttacggatgagaagtcaaaagcttcccaccacatttacccatattcttcctcacaagacgatgaagaatggttgagaccggtgatgagaaaagagaagcaagtgttagtgcattggggcttttacccagacagctatgatacttgggtccatagtaatgatgttgatgctgaaattgaagatccaccaattccagaaaaaccatggaaggttcatgtgaaatggattttggacactgatattttcaatgaatggatgaatgaggaggattatgaggtggatgaaaataggaagcctgtgagttttcgtcagcggatttcaaccaagaatgaagagccagtcagaagtccagaaagaagagatagaaaagcatcagctaatgctcgaaagaggaaacattcgccttcgcctccccctccgacaccaacagaatcacggaagaagagtgggaagaaaggccaagctagcctttatgggaagcgcagaagtcagaaagaggaagatgagcaagaagatctaaccaaggatatggaagacccaacacctgtacccaatatagaagaagtagtacttcccaaaaatgtgaacctaaagaaagatagtgaaaatacacctgttaaaggaggaactgtagcggatctagatgagcaggatgaagaaacagtcacagcaggaggaaaggaagatgaagatcctgccaaaggtgatcagagtcgatcagttgaccttggggaagataatgtgacagagcagaccaatcacattattattcctagttatgcatcatggtttgattataactgtattcatgtgattgaacggcgtgctcttcctgagttcttcaatggaaaaaacaaatccaagactccagaaatatacttggcatatcgaaattttatgattgacacgtatcgtctaaacccccaagagtatttaactagcactgcttgtcggaggaacttgactggagatgtgtgtgctgtgatgagggtccatgcctttttagagcagtggggactcgttaattaccaagttgacccggaaagtagacccatggcaatgggacctcctcctactcctcattttaatgtattagctgataccccctctgggcttgtgcctctgcatcttcgatcacctcaggttcctgctgctcaacagatgctaaattttcctgagaaaaacaaggaaaaaccagttgatttgcagaactttggtctccgtactgacatttactccaagaaaacattagcaaagagtaaaggtgctagtgctggaagagaatggactgaacaggagacccttctactcctggaggccctggagatgtacaaggatgattggaacaaagtgtcggaacatgttggaagtcgtactcaggatgaatgcatcctccactttttgagacttcccattgaggacccataccttgagaattcagatgcttcccttgggcctttggcctaccagcctgtccccttcagtcagtcaggaaatccagttatgagtactgttgcttttttggcatctgtggtggaccctcgcgtggcatctgctgcagcaaaagcggctttggaggagttttctcgggtccgggaggaggtaccactggaattggttgaagctcatgtcaagaaagtacaagaagcagcacgagcctctgggaaagtggatcccacctacggtctggagagcagctgcattgcaggcacagggcccgatgagccagagaagcttgggtctccaactgaattccttgaagagaaaatggcctaccaggaatacccaaatagccagaactggccagaagataccaacttttgtttccaacctgagcaagtggtcgatcctatccagactgatccctttaagatgtaccatgatgatgacctggcagatttggtctttccctccagtgcgacagctgatacttcaatatttgcaggacaaaatgatcccttgaaagacagttacggtatgtctccctgcaacacagctgttgtacctcaggggtggtctgtggaagccttaaactctccacactcagagtcctttgtttccccagaggctgttgcagaacctcctcagccaacggcagttcccttagagctagccaaggagatagaaatggcatcagaagagaggccaccagcacaagcattggaaataatgatgggactgaagactactgacatggcaccatctaaagaaacagagatggccctcgccaaggacatggcactagctacaaaaaccgaggtggcattggctaaagatatggaatcacccaccaaattagatgtgacactggccaaggacatgcagccatccatggaatcagatatggccctagtcaaggacatggaactacccacagaaaaagaagtggccctggttaaggatgtcagatggcccacagaaacagatgtatcttcagccaagaatgtggtactgcccacagaaacagaggtagccccagccaaggatgtgacactgttgaaagaaacagagagggcatctcctataaaaatggacttagccccttccaaggacatgggaccacccaaagaaaacaagaaagaaacagagagggcatctcctataaaaatggacttggctccttccaaggacatgggaccacccaaagaaaacaagatagtcccagccaaggatttggtattactctcagaaatagaggtggcacaggctaatgacattatatcatccacagaaatatcctctgctgagaaggtggctttgtcctcagaaacagaggtagccctggccagggacatgacactgcccccggaaaccaacgtgatcttgaccaaggataaagcactacctttagaagcagaggtggccccagtcaaggacatggctcaactcccagaaacagaaatagccccggccaaggatgtggctccgtccacagtaaaagaagtgggcttgttgaaggacatgtctccactatcagaaacagaaatggctctgggcaaggatgtgactccacctccagaaacagaagtagttctcatcaagaacgtatgtctgcctccagaaatggaggtggccctgactgaggatcaggtcccagccctcaaaacagaagcacccctggctaaggatggggttctgaccctggccaacaatgtgactccagccaaagatgttccaccactctcagaaacagaggcaacaccagttccaattaaagacatggaaattgcacaaacacaaaaaggaataagtgaggattcccatttagaatctctgcaggatgtggggcagtcagctgcacctactttcatgatttcaccagaaaccgtcacaggaacggggaaaaagtgcagcttgccggccgaggaggattctgtgttagaaaaactaggggaaaggaaaccatgcaacagtcaaccttctgagctttcttcagagacctcagccaacttcatgtattgcggtacccctcccacacaagccaaacaagtttgcagacccagtgaccgcaggtcaacccggcccaagcctgccagggtccctcctgagctgctgggaggctctcctccatggaagactcttgatcacaggctgggccactgctctttgtctgagtcaggttgggtctctggttcatcctcctgtggtgggcctgggaaccaaagaaaaagtattcatgttgactcacttgaaccccagagggatcttggcagggaggcctgggatatagaaagcacaccaataatgatgaagaaaaagaagaagaaaccaaagcaaaagagatattctcaaccacgggctggaggaccttcggatgatgacaatgcagataagcctaaaggtcatccatttgcagctgacacacaaaaatcaggtgttctccccagccagcctaccactatgggtacagaatatggacttgtatctggagaaaacttgaaaagggaatgtttagttaactccagtgcagccagactggtagctgagaactttgtctcagagagtctcagaattcctttatatccttctgaagaagcccccaaaactgcaataagttctcagtctaagctgagagtagaggaagagagcaaaagtaacaagtcagtactacaaaaccaagacaagaaattgctgaagcaacatgaatacaaaccacagcctgcaccccacctgaagactcctgtagataaaagccagtcagtaggccctctcaatctgaaaggacccctagcagaagtttctgcatacaatgtagaaacccctttggatatcagacttaaagagggttgctctcctttcttggaccaagaggttatgggtgtagtttcaaaacccacagcagcaaaagaaataccaaatttggtacccactttgatagcaagtaatccattagaatgtaatctaaaagaagggaataatgaaagtaaaatgactaaactgcagaatgtcaaactgaaggagtttcctgaaggagctgaagaggataaagaactaaaaaaggaagcttttcccaacgaaagacaagagatcagcatctttacttctgagcagctgcagggccaagtgttggtacaggtccctggggtagagaatgaaccatttaagagaatggcaggtgatggcaaaagcaggaagggaaggggaagttctgggaaaatgagaacagattctgggaaggtaaaagcaaaatctgagctgccatttcttctggacagccagaaggacggaagggctgttctcataccgagtgagccagtctctaaaactgaaggaatgactactcaggataagagtgaggagctg

SEQ ID NO: 85 - DNA, 5487 bp, Homo sapiens
atggccgcagcggcgggcggcggcgggccggggacagcggtaggcgccacgggctcggggattgcggcggcagccgcaggcctagctgtttatcgacggaaggatgggggcccggccaccaagttttgggagagcccggagacggtgtcccagctggattcggtgcgggtctggctgggcaagcactacaagaagtatgttcatgcggatgctcctaccaataaaacactggctgggctggtggtgcagcttcttcagttccaggaagatgcctttgggaagcatgtcaccaacccggccttcaccaaactccctgcaaagtgtttcatggatttcaaagctggaggcgccttatgtcacattcttggggctgcttacaagtataaaaatgaacagggatggcggaggtttgacctacagaacccatctcgaatggatcgtaatgtggaaatgtttatgaacattgaaaaaacattggtgcagaacaattgtttgaccagacccaacatctacctcattccagacattgatctgaagttggctaacaaattgaaagatatcatcaaacgacatcagggaacatttacggatgagaagtcaaaagcttcccaccacatttacccatattcttcctcacaagacgatgaagaatggttgagaccggtgatgagaaaagagaagcaagtgttagtgcattggggcttttacccagacagctatgatacttgggtccatagtaatgatgttgatgctgaaattgaagatccaccaattccagaaaaaccatggaaggttcatgtgaaatggattttggacactgatattttcaatgaatggatgaatgaggaggattatgaggtggatgaaaataggaagcctgtgagttttcgtcagcggatttcaaccaagaatgaagagccagtcagaagtccagaaagaagagatagaaaagcatcagctaatgctcgaaagaggaaacattcgccttcgcctccccctccgacaccaacagaatcacggaagaagagtgggaagaaaggccaagctagcctttatgggaagcgcagaagtcagaaagaggaagatgagcaagaagatctaaccaaggatatggaagacccaacacctgtacccaatatagaagaagtagtacttcccaaaaatgtgaacctaaagaaagatagtgaaaatacacctgttaaaggaggaactgtagcggatctagatgagcaggatgaagaaacagtcacagcaggaggaaaggaagatgaagatcctgccaaaggtgatcagagtcgatcagttgaccttggggaagataatgtgacagagcagaccaatcacattattattcctagttatgcatcatggtttgattataactgtattcatgtgattgaacggcgtgctcttcctgagttcttcaatggaaaaaacaaatccaagactccagaaatatacttggcatatcgaaattttatgattgacacgtatcgtctaaacccccaagagtatttaactagcactgcttgtcggaggaacttgactggagatgtgtgtgctgtgatgagggtccatgcctttttagagcagtggggactcgttaattaccaagttgacccggaaagtagacccatggcaatgggacctcctcctactcctcattttaatgtattagctgataccccctctgggcttgtgcctctgcatcttcgatcacctcaggttcctgctgctcaacagatgctaaattttcctgagaaaaacaaggaaaaaccagttgatttgcagaactttggtctccgtactgacatttactccaagaaaacattagcaaagagtaaaggtgctagtgctggaagagaatggactgaacaggagacccttctactcctggaggccctggagatgtacaaggatgattggaacaaagtgtcggaacatgttggaagtcgtactcaggatgaatgcatcctccactttttgagacttcccattgaggacccataccttgagaattcagatgcttcccttgggcctttggcctaccagcctgtccccttcagtcagtcaggaaatccagttatgagtactgttgcttttttggcatctgtggtggaccctcgcgtggcatctgctgcagcaaaagcggctttggaggagttttctcgggtccgggaggaggtaccactggaattggttgaagctcatgtcaagaaagtacaagaagcagcacgagcctctgggaaagtggatcccacctacggtctggagagcagctgcattgcaggcacagggcccgatgagccagagaagcttgggtctccaactgaattccttgaagagaaaatggcctaccaggaatacccaaatagccagaactggccagaagataccaacttttgtttccaacctgagcaagtggtcgatcctatccagactgatccctttaagatgtaccatgatgatgacctggcagatttggtctttccctccagtgcgacagctgatacttcaatatttgcaggacaaaatgatcccttgaaagacagttacggtatgtctccctgcaacacagctgttgtacctcaggggtggtctgtggaagccttaaactctccacactcagagtcctttgtttccccagaggctgttgcagaacctcctcagccaacggcagttcccttagagctagccaaggagatagaaatggcatcagaagagaggccaccagcacaagcattggaaataatgatgggactgaagactactgacatggcaccatctaaagaaacagagatggccctcgccaaggacatggcactagctacaaaaaccgaggtggcattggctaaagatatggaatcacccaccaaattagatgtgacactggccaaggacatgcagccatccatggaatcagatatggccctagtcaaggacatggaactacccacagaaaaagaagtggccctggttaaggatgtcagatggcccacagaaacagatgtatcttcagccaagaatgtggtactgcccacagaaacagaggtagccccagccaaggatgtgacactgttgaaagaaacagagagggcatctcctataaaaatggacttagccccttccaaggacatgggaccacccaaagaaaacaagaaagaaacagagagggcatctcctataaaaatggacttggctccttccaaggacatgggaccacccaaagaaaacaagatagtcccagccaaggatttggtattactctcagaaatagaggtggcacaggctaatgacattatatcatccacagaaatatcctctgctgagaaggtggctttgtcctcagaaacagaggtagccctggccagggacatgacactgcccccggaaaccaacgtgatcttgaccaaggataaagcactacctttagaagcagaggtggccccagtcaaggacatggctcaactcccagaaacagaaatagccccggccaaggatgtggctccgtccacagtaaaagaagtgggcttgttgaaggacatgtctccactatcagaaacagaaatggctctgggcaaggatgtgactccacctccagaaacagaagtagttctcatcaagaacgtatgtctgcctccagaaatggaggtggccctgactgaggatcaggtcccagccctcaaaacagaagcacccctggctaaggatggggttctgaccctggccaacaatgtgactccagccaaagatgttccaccactctcagaaacagaggcaacaccagttccaattaaagacatggaaattgcacaaacacaaaaaggaataagtgaggattcccatttagaatctctgcaggatgtggggcagtcagctgcacctactttcatgatttcaccagaaaccgtcacaggaacggggaaaaagtgcagcttgccggccgaggaggattctgtgttagaaaaactaggggaaaggaaaccatgcaacagtcaaccttctgagctttcttcagagacctcaggaatagccaggccagaagaaggaaggcctgtggtgagtgggacaggaaatgacatcaccaccccaccgaacaaggagctcccaccaagcccagagaagaaaacaaagcctttggccaccactcaacctgcaaagacttcaacatcgaaagccaaaacacagcccacttctctccctaagcagccagctcccaccaccattggtgggttgaataaaaaacccatgagccttgcttcaggcttagtgccagctgccccacccaaacgccctgccgtcgcctctgccaggccttccatcttaccttcaaaagacgtgaagccaaagcccattgcagatgcaaaggctcctgagaagcgggcctcaccatccaagccagcttctgccccagcctccagatctgggtccaagagcactcagactgttgcaaaaaccacaacagctgctgctgttgcctcaactggcccaagcagtaggagcccctccacgctcctgcccaagaagcccactgccattaagactgagggaaaacctgcagaagtcaagaagatgactgcaaagtctgtaccagctgacttgagtcgcccaaagagcacctccaccagttccatgaagaaaaccaccactctcagtgggacagcccccgctgcaggggtggttcccagccgagtcaaggccacacccatgccctcccggccctccacaactcctttcatagacaagaagcccacctcggccaaacccagctccaccaccccccggctcagccgcctggccaccaatacttctgctcctgatctgaagaatgtccgctccaaggttggctccacggaaaacatcaagcatcagcctggaggaggccgggccaaagtagagaaaaaaacagaggcagctgctacaacccgaaagcctgaatctaatgcagtcactaaaacagccggcccaattgcaagtgcacagaaacaacctgcggggaaagtccagatagtctccaaaaaagtgagctacagccatattcagtccaagtgtggttccaaggacaatattaagcatgtccctggaggtggtaatgttcagattcagaacaagaaagtggacatctctaaggtctcctccaagtgtgggtctaaggctaacatcaagcacaagcctggtggaggagatgtcaagattgaaagtcagaagttgaacttcaaggagaaggcccaggccaaggtgggatccctcgataatgtgggccacctacctgcaggaggtgctgtgaagactgagggcggtggcagcgaggctcctctgtgtccgggtccccctgctggggaggagccggccatctctgaggcagcgcctgaagctggcgcccccacttcagccagtggcctcaatggccaccccaccctgtcagggggtggtgaccaaagggaggcccagaccttggacagccagatccaggagacaagcatctaa

SEQ ID NO: 86 - DNA, 5436 bp, Homo sapiens
atggccgcagcggcgggcggcggcgggccggggacagcggtaggcgccacgggctcggggattgcggcggcagccgcaggcctagctgtttatcgacggaaggatgggggcccggccaccaagttttgggagagcccggagacggtgtcccagctggattcggtgcgggtctggctgggcaagcactacaagaagtatgttcatgcggatgctcctaccaataaaacactggctgggctggtggtgcagcttcttcagttccaggaagatgcctttgggaagcatgtcaccaacccggccttcaccaaactccctgcaaagtgtttcatggatttcaaagctggaggcgccttatgtcacattcttggggctgcttacaagtataaaaatgaacagggatggcggaggtttgacctacagaacccatctcgaatggatcgtaatgtggaaatgtttatgaacattgaaaaaacattggtgcagaacaattgtttgaccagacccaacatctacctcattccagacattgatctgaagttggctaacaaattgaaagatatcatcaaacgacatcagggaacatttacggatgagaagtcaaaagcttcccaccacatttacccatattcttcctcacaagacgatgaagaatggttgagaccggtgatgagaaaagagaagcaagtgttagtgcattggggcttttacccagacagctatgatacttgggtccatagtaatgatgttgatgctgaaattgaagatccaccaattccagaaaaaccatggaaggttcatgtgaaatggattttggacactgatattttcaatgaatggatgaatgaggaggattatgaggtggatgaaaataggaagcctgtgagttttcgtcagcggatttcaaccaagaatgaagagccagtcagaagtccagaaagaagagatagaaaagcatcagctaatgctcgaaagaggaaacattcgccttcgcctccccctccgacaccaacagaatcacggaagaagagtgggaagaaaggccaagctagcctttatgggaagcgcagaagtcagaaagaggaagatgagcaagaagatctaaccaaggatatggaagacccaacacctgtacccaatatagaagaagtagtacttcccaaaaatgtgaacctaaagaaagatagtgaaaatacacctgttaaaggaggaactgtagcggatctagatgagcaggatgaagaaacagtcacagcaggaggaaaggaagatgaagatcctgccaaaggtgatcagagtcgatcagttgaccttggggaagataatgtgacagagcagaccaatcacattattattcctagttatgcatcatggtttgattataactgtattcatgtgattgaacggcgtgctcttcctgagttcttcaatggaaaaaacaaatccaagactccagaaatatacttggcatatcgaaattttatgattgacacgtatcgtctaaacccccaagagtatttaactagcactgcttgtcggaggaacttgactggagatgtgtgtgctgtgatgagggtccatgcctttttagagcagtggggactcgttaattaccaagttgacccggaaagtagacccatggcaatgggacctcctcctactcctcattttaatgtattagctgataccccctctgggcttgtgcctctgcatcttcgatcacctcaggttcctgctgctcaacagatgctaaattttcctgagaaaaacaaggaaaaaccagttgatttgcagaactttggtctccgtactgacatttactccaagaaaacattagcaaagagtaaaggtgctagtgctggaagagaatggactgaacaggagacccttctactcctggaggccctggagatgtacaaggatgattggaacaaagtgtcggaacatgttggaagtcgtactcaggatgaatgcatcctccactttttgagacttcccattgaggacccataccttgagaattcagatgcttcccttgggcctttggcctaccagcctgtccccttcagtcagtcaggaaatccagttatgagtactgttgcttttttggcatctgtggtggaccctcgcgtggcatctgctgcagcaaaagcggctttggaggagttttctcgggtccgggaggaggtaccactggaattggttgaagctcatgtcaagaaagtacaagaagcagcacgagcctctgggaaagtggatcccacctacggtctggagagcagctgcattgcaggcacagggcccgatgagccagagaagcttgggtctccaactgaattccttgaagagaaaatggcctaccaggaatacccaaatagccagaactggccagaagataccaacttttgtttccaacctgagcaagtggtcgatcctatccagactgatccctttaagatgtaccatgatgatgacctggcagatttggtctttccctccagtgcgacagctgatacttcaatatttgcaggacaaaatgatcccttgaaagacagttacggtatgtctccctgcaacacagctgttgtacctcaggggtggtctgtggaagccttaaactctccacactcagagtcctttgtttccccagaggctgttgcagaacctcctcagccaacggcagttcccttagagctagccaaggagatagaaatggcatcagaagagaggccaccagcacaagcattggaaataatgatgggactgaagactactgacatggcaccatctaaagaaacagagatggccctcgccaaggacatggcactagctacaaaaaccgaggtggcattggctaaagatatggaatcacccaccaaattagatgtgacactggccaaggacatgcagccatccatggaatcagatatggccctagtcaaggacatggaactacccacagaaaaagaagtggccctggttaaggatgtcagatggcccacagaaacagatgtatcttcagccaagaatgtggtactgcccacagaaacagaggtagccccagccaaggatgtgacactgttgaaagaaacagagagggcatctcctataaaaatggacttagccccttccaaggacatgggaccacccaaagaaaacaagaaagaaacagagagggcatctcctataaaaatggacttggctccttccaaggacatgggaccacccaaagaaaacaagatagtcccagccaaggatttggtattactctcagaaatagaggtggcacaggctaatgacattatatcatccacagaaatatcctctgctgagaaggtggctttgtcctcagaaacagaggtagccctggccagggacatgacactgcccccggaaaccaacgtgatcttgaccaaggataaagcactacctttagaagcagaggtggccccagtcaaggacatggctcaactcccagaaacagaaatagccccggccaaggatgtggctccgtccacagtaaaagaagtgggcttgttgaaggacatgtctccactatcagaaacagaaatggctctgggcaaggatgtgactccacctccagaaacagaagtagttctcatcaagaacgtatgtctgcctccagaaatggaggtggccctgactgaggatcaggtcccagccctcaaaacagaagcacccctggctaaggatggggttctgaccctggccaacaatgtgactccagccaaagatgttccaccactctcagaaacagaggcaacaccagttccaattaaagacatggaaattgcacaaacacaaaaaggaataagtgaggattcccatttagaatctctgcaggatgtggggcagtcagctgcacctactttcatgatttcaccagaaaccgtcacaggaacggggaaaaagtgcagcttgccggccgaggaggattctgtgttagaaaaactaggggaaaggaaaccatgcaacagtcaaccttctgagctttcttcagagacctcaggaatagccaggccagaagaaggaaggcctgtggtgagtgggacaggaaatgacatcaccaccccaccgaacaaggagctcccaccaagcccagagaagaaaacaaagcctttggccaccactcaacctgcaaagacttcaacatcgaaagccaaaacacagcccacttctctccctaagcagccagctcccaccaccattggtgggttgaataaaaaacccatgagccttgcttcaggcttagtgccagctgccccacccaaacgccctgccgtcgcctctgccaggccttccatcttaccttcaaaagacgtgaagccaaagcccattgcagatgcaaaggctcctgagaagcgggcctcaccatccaagccagcttctgccccagcctccagatctgggtccaagagcactcagactgttgcaaaaaccacaacagctgctgctgttgcctcaactggcccaagcagtaggagcccctccacgctcctgcccaagaagcccactgccattaagactgagggaaaacctgcagaagtcaagaagatgactgcaaagtctgtaccagctgacttgagtcgcccaaagagcacctccaccagttccatgaagaaaaccaccactctcagtgggacagcccccgctgcaggggtggttcccagccgagtcaaggccacacccatgccctcccggccctccacaactcctttcatagacaagaagcccacctcggccaaacccagctccaccaccccccggctcagccgcctggccaccaatacttctgctcctgatctgaagaatgtccgctccaaggttggctccacggaaaacatcaagcatcagcctggaggaggccgggccaaagtagagaaaaaaacagaggcagctgctacaacccgaaagcctgaatctaatgcagtcactaaaacagccggcccaattgcaagtgcacagaaacaacctgcggggaaagtccagatagtctccaaaaaagtgagctacagccatattcagtccaagtgtggttccaaggacaatattaagcatgtccctggaggtggtaatgttcagattcagaacaagaaagtggacatctctaaggtctcctccaagtgtgggtctaaggctaacatcaagcacaagcctggtggaggagatgtcaagattgaaagtcagaagttgaacttcaaggagaaggcccaggccaaggtgggatccctcgataatgtgggccacctacctgcaggaggtgctgtgaagattgagacctacaggctgacgttccgggcaaatgccagggcccgcaccgaccacggggccgacattgtctcccgccccccacacttccctggcggccccaactcgggctcccgggtccttggccccctttcccgggctgtccactag

SEQ ID NO: 87 - DNA, 3402 bp, Homo sapiens
atggatttcaaagctggaggcgccttatgtcacattcttggggctgcttacaagtataaaaatgaacagggatggcggaggtttgacctacagaacccatctcgaatggatcgtaatgtggaaatgtttatgaacattgaaaaaacattggtgcagaacaattgtttgaccagacccaacatctacctcattccagacattgatctgaagttggctaacaaattgaaagatatcatcaaacgacatcagggaacatttacggatgagaagtcaaaagcttcccaccacatttacccatattcttcctcacaagacgatgaagaatggttgagaccggtgatgagaaaagagaagcaagtgttagtgcattggggcttttacccagacagctatgatacttgggtccatagtaatgatgttgatgctgaaattgaagatccaccaattccagaaaaaccatggaaggttcatgtgaaatggattttggacactgatattttcaatgaatggatgaatgaggaggattatgaggtggatgaaaataggaagcctgtgagttttcgtcagcggatttcaaccaagaatgaagagccagtcagaagtccagaaagaagagatagaaaagcatcagctaatgctcgaaagaggaaacattcgccttcgcctccccctccgacaccaacagaatcacggaagaagagtgggaagaaaggccaagctagcctttatgggaagcgcagaagtcagaaagaggaagatgagcaagaagatctaaccaaggatatggaagacccaacacctgtacccaatatagaagaagtagtacttcccaaaaatgtgaacctaaagaaagatagtgaaaatacacctgttaaaggaggaactgtagcggatctagatgagcaggatgaagaaacagtcacagcaggaggaaaggaagatgaagatcctgccaaaggtgatcagagtcgatcagttgaccttggggaagataatgtgacagagcagaccaatcacattattattcctagttatgcatcatggtttgattataactgtattcatgtgattgaacggcgtgctcttcctgagttcttcaatggaaaaaacaaatccaagactccagaaatatacttggcatatcgaaattttatgattgacacgtatcgtctaaacccccaagagtatttaactagcactgcttgtcggaggaacttgactggagatgtgtgtgctgtgatgagggtccatgcctttttagagcagtggggactcgttaattaccaagttgacccggaaagtagacccatggcaatgggacctcctcctactcctcattttaatgtattagctgataccccctctgggcttgtgcctctgcatcttcgatcacctcaggttcctgctgctcaacagatgctaaattttcctgagaaaaacaaggaaaaaccagttgatttgcagaactttggtctccgtactgacatttactccaagaaaacattagcaaagagtaaaggtgctagtgctggaagagaatggactgaacaggagacccttctactcctggaggccctggagatgtacaaggatgattggaacaaagtgtcggaacatgttggaagtcgtactcaggatgaatgcatcctccactttttgagacttcccattgaggacccataccttgagaattcagatgcttcccttgggcctttggcctaccagcctgtccccttcagtcagtcaggaaatccagttatgagtactgttgcttttttggcatctgtggtggaccctcgcgtggcatctgctgcagcaaaagcggctttggaggagttttctcgggtccgggaggaggtaccactggaattggttgaagctcatgtcaagaaagtacaagaagcagcacgagcctctgggaaagtggatcccacctacggtctggagagcagctgcattgcaggcacagggcccgatgagccagagaagcttggaatagccaggccagaagaaggaaggcctgtggtgagtgggacaggaaatgacatcaccaccccaccgaacaaggagctcccaccaagcccagagaagaaaacaaagcctttggccaccactcaacctgcaaagacttcaacatcgaaagccaaaacacagcccacttctctccctaagcagccagctcccaccaccattggtgggttgaataaaaaacccatgagccttgcttcaggcttagtgccagctgccccacccaaacgccctgccgtcgcctctgccaggccttccatcttaccttcaaaagacgtgaagccaaagcccattgcagatgcaaaggctcctgagaagcgggcctcaccatccaagccagcttctgccccagcctccagatctgggtccaagagcactcagactgttgcaaaaaccacaacagctgctgctgttgcctcaactggcccaagcagtaggagcccctccacgctcctgcccaagaagcccactgccattaagactgagggaaaacctgcagaagtcaagaagatgactgcaaagtctgtaccagctgacttgagtcgcccaaagagcacctccaccagttccatgaagaaaaccaccactctcagtgggacagcccccgctgcaggggtggttcccagccgagtcaaggccacacccatgccctcccggccctccacaactcctttcatagacaagaagcccacctcggccaaacccagctccaccaccccccggctcagccgcctggccaccaatacttctgctcctgatctgaagaatgtccgctccaaggttggctccacggaaaacatcaagcatcagcctggaggaggccgggccaaagtagagaaaaaaacagaggcagctgctacaacccgaaagcctgaatctaatgcagtcactaaaacagccggcccaattgcaagtgcacagaaacaacctgcggggaaagtccagatagtctccaaaaaagtgagctacagccatattcagtccaagtgtggttccaaggacaatattaagcatgtccctggaggtggtaatgttcagattcagaacaagaaagtggacatctctaaggtctcctccaagtgtgggtctaaggctaacatcaagcacaagcctggtggaggagatgtcaagattgaaagtcagaagttgaacttcaaggagaaggcccaggccaaggtgggatccctcgataatgtgggccacctacctgcaggaggtgctgtgaagattgagacctacaggctgacgttccgggcaaatgccagggcccgcaccgaccacggggccgacattgtctcccgccccccacacttccctggcggccccaactcgggctcccgggtccttggccccctttcccgggctgtccactag

SEQ ID NO: 88 - DNA, 3072 bp, Homo sapiens
atggatttcaaagctggaggcgccttatgtcacattcttggggctgcttacaagtataaaaatgaacagggatggcggaggtttgacctacagaacccatctcgaatggatcgtaatgtggaaatgtttatgaacattgaaaaaacattggtgcagaacaattgtttgaccagacccaacatctacctcattccagacattgatctgaagttggctaacaaattgaaagatatcatcaaacgacatcagggaacatttacggatgagaagtcaaaagcttcccaccacatttacccatattcttcctcacaagacgatgaagaatggttgagaccggtgatgagaaaagagaagcaagtgttagtgcattggggcttttacccagacagctatgatacttgggtccatagtaatgatgttgatgctgaaattgaagatccaccaattccagaaaaaccatggaaggttcatgtgaaatggattttggacactgatattttcaatgaatggatgaatgaggaggattatgaggtggatgaaaataggaagcctgtgagttttcgtcagcggatttcaaccaagaatgaagagccagtcagaagtccagaaagaagagatagaaaagcatcagctaatgctcgaaagaggaaacattcgccttcgcctccccctccgacaccaacagaatcacggaagaagagtgggaagaaaggccaagctagcctttatgggaagcgcagaagtcagaaagaggaagatgagcaagaagatctaaccaaggatatggaagacccaacacctgtacccaatatagaagaagtagtacttcccaaaaatgtgaacctaaagaaagatagtgaaaatacacctgttaaaggaggaactgtagcggatctagatgagcaggatgaagaaacagtcacagcaggaggaaaggaagatgaagatcctgccaaaggtgatcagagtcgatcagttgaccttggggaagataatgtgacagagcagaccaatcacattattattcctagttatgcatcatggtttgattataactgtattcatgtgattgaacggcgtgctcttcctgagttcttcaatggaaaaaacaaatccaagactccagaaatatacttggcatatcgaaattttatgattgacacgtatcgtctaaacccccaagagtatttaactagcactgcttgtcggaggaacttgactggagatgtgtgtgctgtgatgagggtccatgcctttttagagcagtggggactcgttaattaccaagttgacccggaaagtagacccatggcaatgggacctcctcctactcctcattttaatgtattagctgataccccctctgggcttgtgcctctgcatcttcgatcacctcaggttcctgctgctcaacagatgctaaattttcctgagaaaaacaaggaaaaaccagttgatttgcagaactttggtctccgtactgacatttactccaagaaaacattagcaaagagtaaaggtgctagtgctggaagagaatggactgaacaggagacccttctactcctggaggccctggagatgtacaaggatgattggaacaaagtgtcggaacatgttggaagtcgtactcaggatgaatgcatcctccactttttgagacttcccattgaggacccataccttgagaattcagatgcttcccttgggcctttggcctaccagcctgtccccttcagtcagtcaggaaatccagttatgagtactgttgcttttttggcatctgtggtggaccctcgcgtggcatctgctgcagcaaaagcggctttggaggagttttctcgggtccgggaggaggtaccactggaattggttgaagctcatgtcaagaaagtacaagaagcagcacgagcctctgggaaagtggatcccacctacggtctggagagcagctgcattgcaggcacagggcccgatgagccagagaagcttggaatagccaggccagaagaaggaaggcctgtggtgagtgggacaggaaatgacatcaccaccccaccgaacaaggagctcccaccaagcccagagaagaaaacaaagcccattgcagatgcaaaggctcctgagaagcgggcctcaccatccaagccagcttctgccccagcctccagatctgggtccaagagcactcagactgttgcaaaaaccacaacagctgctgctgttgcctcaactggcccaagcagtaggagcccctccacgctcctgcccaagaagcccactgccattaagactgagggaaaacctgcagaagtcaagaagatgactgcaaagtctgtaccagctgacttgagtcgcccaaagagcacctccaccagttccatgaagaaaaccaccactctcagtgggacagcccccgctgcaggggtggttcccagccgagtcaaggccacacccatgccctcccggccctccacaactcctttcatagacaagaagcccacctcggccaaacccagctccaccaccccccggctcagccgcctggccaccaatacttctgctcctgatctgaagaatgtccgctccaaggttggctccacggaaaacatcaagcatcagcctggaggaggccgggtccagatagtctccaaaaaagtgagctacagccatattcagtccaagtgtggttccaaggacaatattaagcatgtccctggaggtggtaatgttcagattcagaacaagaaagtggacatctctaaggtctcctccaagtgtgggtctaaggctaacatcaagcacaagcctggtggaggagatgtcaagattgaaagtcagaagttgaacttcaaggagaaggcccaggccaaggtgggatccctcgataatgtgggccacctacctgcaggaggtgctgtgaagattgagacctacaggctgacgttccgggcaaatgccagggcccgcaccgaccacggggccgacattgtctcccgccccccacacttccctggcggccccaactcgggctcccgggtccttggccccctttcccgggctgtccactag

SEQ ID NO: 89 - DNA, 3570 bp, Homo sapiens
atggccgcagcggcgggcggcggcgggccggggacagcggtaggcgccacgggctcggggattgcggcggcagccgcaggcctagctgtttatcgacggaaggatgggggcccggccaccaagttttgggagagcccggagacggtgtcccagctggattcggtgcgggtctggctgggcaagcactacaagaagtatgttcatgcggatgctcctaccaataaaacactggctgggctggtggtgcagcttcttcagttccaggaagatgcctttgggaagcatgtcaccaacccggccttcaccaaactccctgcaaagtgtttcatggatttcaaagctggaggcgccttatgtcacattcttggggctgcttacaagtataaaaatgaacagggatggcggaggtttgacctacagaacccatctcgaatggatcgtaatgtggaaatgtttatgaacattgaaaaaacattggtgcagaacaattgtttgaccagacccaacatctacctcattccagacattgatctgaagttggctaacaaattgaaagatatcatcaaacgacatcagggaacatttacggatgagaagtcaaaagcttcccaccacatttacccatattcttcctcacaagacgatgaagaatggttgagaccggtgatgagaaaagagaagcaagtgttagtgcattggggcttttacccagacagctatgatacttgggtccatagtaatgatgttgatgctgaaattgaagatccaccaattccagaaaaaccatggaaggttcatgtgaaatggattttggacactgatattttcaatgaatggatgaatgaggaggattatgaggtggatgaaaataggaagcctgtgagttttcgtcagcggatttcaaccaagaatgaagagccagtcagaagtccagaaagaagagatagaaaagcatcagctaatgctcgaaagaggaaacattcgccttcgcctccccctccgacaccaacagaatcacggaagaagagtgggaagaaaggccaagctagcctttatgggaagcgcagaagtcagaaagaggaagatgagcaagaagatctaaccaaggatatggaagacccaacacctgtacccaatatagaagaagtagtacttcccaaaaatgtgaacctaaagaaagatagtgaaaatacacctgttaaaggaggaactgtagcggatctagatgagcaggatgaagaaacagtcacagcaggaggaaaggaagatgaagatcctgccaaaggtgatcagagtcgatcagttgaccttggggaagataatgtgacagagcagaccaatcacattattattcctagttatgcatcatggtttgattataactgtattcatgtgattgaacggcgtgctcttcctgagttcttcaatggaaaaaacaaatccaagactccagaaatatacttggcatatcgaaattttatgattgacacgtatcgtctaaacccccaagagtatttaactagcactgcttgtcggaggaacttgactggagatgtgtgtgctgtgatgagggtccatgcctttttagagcagtggggactcgttaattaccaagttgacccggaaagtagacccatggcaatgggacctcctcctactcctcattttaatgtattagctgataccccctctgggcttgtgcctctgcatcttcgatcacctcaggttcctgctgctcaacagatgctaaattttcctgagaaaaacaaggaaaaaccagttgatttgcagaactttggtctccgtactgacatttactccaagaaaacattagcaaagagtaaaggtgctagtgctggaagagaatggactgaacaggagacccttctactcctggaggccctggagatgtacaaggatgattggaacaaagtgtcggaacatgttggaagtcgtactcaggatgaatgcatcctccactttttgagacttcccattgaggacccataccttgagaattcagatgcttcccttgggcctttggcctaccagcctgtccccttcagtcagtcaggaaatccagttatgagtactgttgcttttttggcatctgtggtggaccctcgcgtggcatctgctgcagcaaaagcggctttggaggagttttctcgggtccgggaggaggtaccactggaattggttgaagctcatgtcaagaaagtacaagaagcagcacgagcctctgggaaagtggatcccacctacggtctggagagcagctgcattgcaggcacagggcccgatgagccagagaagcttggaatagccaggccagaagaaggaaggcctgtggtgagtgggacaggaaatgacatcaccaccccaccgaacaaggagctcccaccaagcccagagaagaaaacaaagcctttggccaccactcaacctgcaaagacttcaacatcgaaagccaaaacacagcccacttctctccctaagcagccagctcccaccaccattggtgggttgaataaaaaacccatgagccttgcttcaggcttagtgccagctgccccacccaaacgccctgccgtcgcctctgccaggccttccatcttaccttcaaaagacgtgaagccaaagcccattgcagatgcaaaggctcctgagaagcgggcctcaccatccaagccagcttctgccccagcctccagatctgggtccaagagcactcagactgttgcaaaaaccacaacagctgctgctgttgcctcaactggcccaagcagtaggagcccctccacgctcctgcccaagaagcccactgccattaagactgagggaaaacctgcagaagtcaagaagatgactgcaaagtctgtaccagctgacttgagtcgcccaaagagcacctccaccagttccatgaagaaaaccaccactctcagtgggacagcccccgctgcaggggtggttcccagccgagtcaaggccacacccatgccctcccggccctccacaactcctttcatagacaagaagcccacctcggccaaacccagctccaccaccccccggctcagccgcctggccaccaatacttctgctcctgatctgaagaatgtccgctccaaggttggctccacggaaaacatcaagcatcagcctggaggaggccgggttcagattcagaacaagaaagtggacatctctaaggtctcctccaagtgtgggtctaaggctaacatcaagcacaagcctggtggaggagatgtcaagattgaaagtcagaagttgaacttcaaggagaaggcccaggccaaggtgggatccctcgataatgtgggccacctacctgcaggaggtgctgtgaagactgagggcggtggcagcgaggctcctctgtgtccgggtccccctgctggggaggagccggccatctctgaggcagcgcctgaagctggcgcccccacttcagccagtggcctcaatggccaccccaccctgtcagggggtggtgaccaaagggaggcccagaccttggacagccagatccaggagacaaattga

SEQ ID NO: 90 - DNA, 2316 bp, Homo sapiens
atggatttcaaagctggaggcgccttatgtcacattcttggggctgcttacaagtataaaaatgaacagggatggcggaggtttgacctacagaacccatctcgaatggatcgtaatgtggaaatgtttatgaacattgaaaaaacattggtgcagaacaattgtttgaccagacccaacatctacctcattccagacattgatctgaagttggctaacaaattgaaagatatcatcaaacgacatcagggaacatttacggatgagaagtcaaaagcttcccaccacatttacccatattcttcctcacaagacgatgaagaatggttgagaccggtgatgagaaaagagaagcaagtgttagtgcattggggcttttacccagacagctatgatacttgggtccatagtaatgatgttgatgctgaaattgaagatccaccaattccagaaaaaccatggaaggttcatgtgaaatggattttggacactgatattttcaatgaatggatgaatgaggaggattatgaggtggatgaaaataggaagcctgtgagttttcgtcagcggatttcaaccaagaatgaagagccagtcagaagtccagaaagaagagatagaaaagcatcagctaatgctcgaaagaggaaacattcgccttcgcctccccctccgacaccaacagaatcacggaagaagagtgggaagaaaggccaagctagcctttatgggaagcgcagaagtcagaaagaggaagatgagcaagaagatctaaccaaggatatggaagacccaacacctgtacccaatatagaagaagtagtacttcccaaaaatgtgaacctaaagaaagatagtgaaaatacacctgttaaaggaggaactgtagcggatctagatgagcaggatgaagaaacagtcacagcaggaggaaaggaagatgaagatcctgccaaaggtgatcagagtcgatcagttgaccttggggaagataatgtgacagagcagaccaatcacattattattcctagttatgcatcatggtttgattataactgtattcatgtgattgaacggcgtgctcttcctgagttcttcaatggaaaaaacaaatccaagactccagaaatatacttggcatatcgaaattttatgattgacacgtatcgtctaaacccccaagagtatttaactagcactgcttgtcggaggaacttgactggagatgtgtgtgctgtgatgagggtccatgcctttttagagcagtggggactcgttaattaccaagttgacccggaaagtagacccatggcaatgggacctcctcctactcctcattttaatgtattagctgataccccctctgggcttgtgcctctgcatcttcgatcacctcaggttcctgctgctcaacagatgctaaattttcctgagaaaaacaaggaaaaaccagttgatttgcagaactttggtctccgtactgacatttactccaagaaaacattagcaaagagtaaaggtgctagtgctggaagagaatggactgaacaggagacccttctactcctggaggccctggagatgtacaaggatgattggaacaaagtgtcggaacatgttggaagtcgtactcaggatgaatgcatcctccactttttgagacttcccattgaggacccataccttgagaattcagatgcttcccttgggcctttggcctaccagcctgtccccttcagtcagtcaggaaatccagttatgagtactgttgcttttttggcatctgtggtggaccctcgcgtggcatctgctgcagcaaaagcggctttggaggagttttctcgggtccgggaggaggtaccactggaattggttgaagctcatgtcaagaaagtacaagaagcagcacgagcctctgggaaagtggatcccacctacggtctggagagcagctgcattgcaggcacagggcccgatgagccagagaagcttggaatagccaggccagaagaaggaaggcctgtggtgagtgggacaggaaatgacatcaccaccccaccgaacaaggagctcccaccaagcccagagaagaaaacaaagcctttggccaccactcaacctgcaaagacttcaacatcgaaagccaaaacacagcccacttctctccctaagcagccagctcccaccaccattggtgggttgaataaaaaacccatgagccttgcttcaggcttagtgccagctgccccacccaaacgccctgccgtcgcctctgccaggccttccatcttaccttcaaaagacgtgaagccaaag

SEQ ID NO: 91 - DNA, 4350 bp, Homo sapiens
atggccgcagcggcgggcggcggcgggccggggacagcggtaggcgccacgggctcggggattgcggcggcagccgcaggcctagctgtttatcgacggaaggatgggggcccggccaccaagttttgggagagcccggagacggtgtcccagctggattcggtgcgggtctggctgggcaagcactacaagaagtatgttcatgcggatgctcctaccaataaaacactggctgggctggtggtgcagcttcttcagttccaggaagatgcctttgggaagcatgtcaccaacccggccttcaccaaactccctgcaaagtgtttcatggatttcaaagctggaggcgccttatgtcacattcttggggctgcttacaagtataaaaatgaacagggatggcggaggtttgacctacagaacccatctcgaatggatcgtaatgtggaaatgtttatgaacattgaaaaaacattggtgcagaacaattgtttgaccagacccaacatctacctcattccagacattgatctgaagttggctaacaaattgaaagatatcatcaaacgacatcagggaacatttacggatgagaagtcaaaagcttcccaccacatttacccatattcttcctcacaagacgatgaagaatggttgagaccggtgatgagaaaagagaagcaagtgttagtgcattggggcttttacccagacagctatgatacttgggtccatagtaatgatgttgatgctgaaattgaagatccaccaattccagaaaaaccatggaaggttcatgtgaaatggattttggacactgatattttcaatgaatggatgaatgaggaggattatgaggtggatgaaaataggaagcctgtgagttttcgtcagcggatttcaaccaagaatgaagagccagtcagaagtccagaaagaagagatagaaaagcatcagctaatgctcgaaagaggaaacattcgccttcgcctccccctccgacaccaacagaatcacggaagaagagtgggaagaaaggccaagctagcctttatgggaagcgcagaagtcagaaagaggaagatgagcaagaagatctaaccaaggatatggaagacccaacacctgtacccaatatagaagaagtagtacttcccaaaaatgtgaacctaaagaaagatagtgaaaatacacctgttaaaggaggaactgtagcggatctagatgagcaggatgaagaaacagtcacagcaggaggaaaggaagatgaagatcctgccaaaggtgatcagagtcgatcagttgaccttggggaagataatgtgacagagcagaccaatcacattattattcctagttatgcatcatggtttgattataactgtattcatgtgattgaacggcgtgctcttcctgagttcttcaatggaaaaaacaaatccaagactccagaaatatacttggcatatcgaaattttatgattgacacgtatcgtctaaacccccaagagtatttaactagcactgcttgtcggaggaacttgactggagatgtgtgtgctgtgatgagggtccatgcctttttagagcagtggggactcgttaattaccaagttgacccggaaagtagacccatggcaatgggacctcctcctactcctcattttaatgtattagctgataccccctctgggcttgtgcctctgcatcttcgatcacctcaggttcctgctgctcaacagatgctaaattttcctgagaaaaacaaggaaaaaccagttgatttgcagaactttggtctccgtactgacatttactccaagaaaacattagcaaagagtaaaggtgctagtgctggaagagaatggactgaacaggagacccttctactcctggaggccctggagatgtacaaggatgattggaacaaagtgtcggaacatgttggaagtcgtactcaggatgaatgcatcctccactttttgagacttcccattgaggacccataccttgagaattcagatgcttcccttgggcctttggcctaccagcctgtccccttcagtcagtcaggaaatccagttatgagtactgttgcttttttggcatctgtggtggaccctcgcgtggcatctgctgcagcaaaagcggctttggaggagttttctcgggtccgggaggaggtaccactggaattggttgaagctcatgtcaagaaagtacaagaagcagcacgagcctctgggaaagtggatcccacctacggtctggagagcagctgcattgcaggcacagggcccgatgagccagagaagcttgggtctccaactgaattccttgaagagaaaatggcctaccaggaatacccaaatagccagaactggccagaagataccaacttttgtttccaacctgagcaagtggtcgatcctatccagactgatccctttaagatgtaccatgatgatgacctggcagatttggtctttccctccagtgcgacagctgatacttcaatatttgcaggacaaaatgatcccttgaaagacagttacggtatgtctccctgcaacacagctgttgtacctcaggggtggtctgtggaagccttaaactctccacactcagagtcctttgtttccccagaggctgttgcagaacctcctcagccaacggcagttcccttagagctagccaaggagatagaaatggcatcagaagagaggccaccagcacaagcattggaaataatgatgggactgaagactactgacatggcaccatctaaagaaacagagatggccctcgccaaggacatggcactagctacaaaaaccgaggtggcattggctaaagatatggaatcacccaccaaattagatgtgacactggccaaggacatgcagccatccatggaatcagatatggccctagtcaaggacatggaactacccacagaaaaagaagtggccctggttaaggatgtcagatggcccacagaaacagatgtatcttcagccaagaatgtggtactgcccacagaaacagaggtagccccagccaaggatgtgacactgttgaaagaaacagagagggcatctcctataaaaatggacttagccccttccaaggacatgggaccacccaaagaaaacaagaaagaaacagagagggcatctcctataaaaatggacttggctccttccaaggacatgggaccacccaaagaaaacaagatagtcccagccaaggatttggtattactctcagaaatagaggtggcacaggctaatgacattatatcatccacagaaatatcctctgctgagaaggtggctttgtcctcagaaacagaggtagccctggccagggacatgacactgcccccggaaaccaacgtgatcttgaccaaggataaagcactacctttagaagcagaggtggccccagtcaaggacatggctcaactcccagaaacagaaatagccccggccaaggatgtggctccgtccacagtaaaagaagtgggcttgttgaaggacatgtctccactatcagaaacagaaatggctctgggcaaggatgtgactccacctccagaaacagaagtagttctcatcaagaacgtatgtctgcctccagaaatggaggtggccctgactgaggatcaggtcccagccctcaaaacagaagcacccctggctaaggatggggttctgaccctggccaacaatgtgactccagccaaagatgttccaccactctcagaaacagaggcaacaccagttccaattaaagacatggaaattgcacaaacacaaaaaggaataagtgaggattcccatttagaatctctgcaggatgtggggcagtcagctgcacctactttcatgatttcaccagaaaccgtcacaggaacggggaaaaagtgcagcttgccggccgaggaggattctgtgttagaaaaactaggggaaaggaaaccatgcaacagtcaaccttctgagctttcttcagagacctcaggaatagccaggccagaagaaggaaggcctgtggtgagtgggacaggaaatgacatcaccaccccaccgaacaaggagctcccaccaagcccagagaagaaaacaaagcctttggccaccactcaacctgcaaagacttcaacatcgaaagccaaaacacagcccacttctctccctaagcagccagctcccaccaccattggtgggttgaataaaaaacccatgagccttgcttcaggcttagtgccagctgccccacccaaacgccctgccgtcgcctctgccaggccttccatcttaccttcaaaagacgtgaagccaaag

SEQ ID NO: 92 - DNA, 3399 bp, Homo sapiens
atggccgcagcggcgggcggcggcgggccggggacagcggtaggcgccacgggctcggggattgcggcggcagccgcaggcctagctgtttatcgacggaaggatgggggcccggccaccaagttttgggagagcccggagacggtgtcccagctggattcggtgcgggtctggctgggcaagcactacaagaagtatgttcatgcggatgctcctaccaataaaacactggctgggctggtggtgcagcttcttcagttccaggaagatgcctttgggaagcatgtcaccaacccggccttcaccaaactccctgcaaagtgtttcatggatttcaaagctggaggcgccttatgtcacattcttggggctgcttacaagtataaaaatgaacagggatggcggaggtttgacctacagaacccatctcgaatggatcgtaatgtggaaatgtttatgaacattgaaaaaacattggtgcagaacaattgtttgaccagacccaacatctacctcattccagacattgatctgaagttggctaacaaattgaaagatatcatcaaacgacatcagggaacatttacggatgagaagtcaaaagcttcccaccacatttacccatattcttcctcacaagacgatgaagaatggttgagaccggtgatgagaaaagagaagcaagtgttagtgcattggggcttttacccagacagctatgatacttgggtccatagtaatgatgttgatgctgaaattgaagatccaccaattccagaaaaaccatggaaggttcatgtgaaatggattttggacactgatattttcaatgaatggatgaatgaggaggattatgaggtggatgaaaataggaagcctgtgagttttcgtcagcggatttcaaccaagaatgaagagccagtcagaagtccagaaagaagagatagaaaagcatcagctaatgctcgaaagaggaaacattcgccttcgcctccccctccgacaccaacagaatcacggaagaagagtgggaagaaaggccaagctagcctttatgggaagcgcagaagtcagaaagaggaagatgagcaagaagatctaaccaaggatatggaagacccaacacctgtacccaatatagaagaagtagtacttcccaaaaatgtgaacctaaagaaagatagtgaaaatacacctgttaaaggaggaactgtagcggatctagatgagcaggatgaagaaacagtcacagcaggaggaaaggaagatgaagatcctgccaaaggtgatcagagtcgatcagttgaccttggggaagataatgtgacagagcagaccaatcacattattattcctagttatgcatcatggtttgattataactgtattcatgtgattgaacggcgtgctcttcctgagttcttcaatggaaaaaacaaatccaagactccagaaatatacttggcatatcgaaattttatgattgacacgtatcgtctaaacccccaagagtatttaactagcactgcttgtcggaggaacttgactggagatgtgtgtgctgtgatgagggtccatgcctttttagagcagtggggactcgttaattaccaagttgacccggaaagtagacccatggcaatgggacctcctcctactcctcattttaatgtattagctgataccccctctgggcttgtgcctctgcatcttcgatcacctcaggttcctgctgctcaacagatgctaaattttcctgagaaaaacaaggaaaaaccagttgatttgcagaactttggtctccgtactgacatttactccaagaaaacattagcaaagagtaaaggtgctagtgctggaagagaatggactgaacaggagacccttctactcctggaggccctggagatgtacaaggatgattggaacaaagtgtcggaacatgttggaagtcgtactcaggatgaatgcatcctccactttttgagacttcccattgaggacccataccttgagaattcagatgcttcccttgggcctttggcctaccagcctgtccccttcagtcagtcaggaaatccagttatgagtactgttgcttttttggcatctgtggtggaccctcgcgtggcatctgctgcagcaaaagcggctttggaggagttttctcgggtccgggaggaggtaccactggaattggttgaagctcatgtcaagaaagtacaagaagcagcacgagcctctgggaaagtggatcccacctacggtctggagagcagctgcattgcaggcacagggcccgatgagccagagaagcttggaatagccaggccagaagaaggaaggcctgtggtgagtgggacaggaaatgacatcaccaccccaccgaacaaggagctcccaccaagcccagagaagaaaacaaagcccattgcagatgcaaaggctcctgagaagcgggcctcaccatccaagccagcttctgccccagcctccagatctgggtccaagagcactcagactgttgcaaaaaccacaacagctgctgctgttgcctcaactggcccaagcagtaggagcccctccacgctcctgcccaagaagcccactgccattaagactgagggaaaacctgcagaagtcaagaagatgactgcaaagtctgtaccagctgacttgagtcgcccaaagagcacctccaccagttccatgaagaaaaccaccactctcagtgggacagcccccgctgcaggggtggttcccagccgagtcaaggccacacccatgccctcccggccctccacaactcctttcatagacaagaagcccacctcggccaaacccagctccaccaccccccggctcagccgcctggccaccaatacttctgctcctgatctgaagaatgtccgctccaaggttggctccacggaaaacatcaagcatcagcctggaggaggccgggtccagatagtctccaaaaaagtgagctacagccatattcagtccaagtgtggttccaaggacaatattaagcatgtccctggaggtggtaatgttcagattcagaacaagaaagtggacatctctaaggtctcctccaagtgtgggtctaaggctaacatcaagcacaagcctggtggaggagatgtcaagattgaaagtcagaagttgaacttcaaggagaaggcccaggccaaggtgggatccctcgataatgtgggccacctacctgcaggaggtgctgtgaagattgagacctacaggctgacgttccgggcaaatgccagggcccgcaccgaccacggggccgacattgtctcccgccccccacacttccctggcggccccaactcgggctcccgggtccttggccccctttcccgggctgtccactag

SEQ ID NO: 93 - DNA, 4986 bp, Homo sapiens
atggatttcaaagctggaggcgccttatgtcacattcttggggctgcttacaagtataaaaatgaacagggatggcggaggtttgacctacagaacccatctcgaatggatcgtaatgtggaaatgtttatgaacattgaaaaaacattggtgcagaacaattgtttgaccagacccaacatctacctcattccagacattgatctgaagttggctaacaaattgaaagatatcatcaaacgacatcagggaacatttacggatgagaagtcaaaagcttcccaccacatttacccatattcttcctcacaagacgatgaagaatggttgagaccggtgatgagaaaagagaagcaagtgttagtgcattggggcttttacccagacagctatgatacttgggtccatagtaatgatgttgatgctgaaattgaagatccaccaattccagaaaaaccatggaaggttcatgtgaaatggattttggacactgatattttcaatgaatggatgaatgaggaggattatgaggtggatgaaaataggaagcctgtgagttttcgtcagcggatttcaaccaagaatgaagagccagtcagaagtccagaaagaagagatagaaaagcatcagctaatgctcgaaagaggaaacattcgccttcgcctccccctccgacaccaacagaatcacggaagaagagtgggaagaaaggccaagctagcctttatgggaagcgcagaagtcagaaagaggaagatgagcaagaagatctaaccaaggatatggaagacccaacacctgtacccaatatagaagaagtagtacttcccaaaaatgtgaacctaaagaaagatagtgaaaatacacctgttaaaggaggaactgtagcggatctagatgagcaggatgaagaaacagtcacagcaggaggaaaggaagatgaagatcctgccaaaggtgatcagagtcgatcagttgaccttggggaagataatgtgacagagcagaccaatcacattattattcctagttatgcatcatggtttgattataactgtattcatgtgattgaacggcgtgctcttcctgagttcttcaatggaaaaaacaaatccaagactccagaaatatacttggcatatcgaaattttatgattgacacgtatcgtctaaacccccaagagtatttaactagcactgcttgtcggaggaacttgactggagatgtgtgtgctgtgatgagggtccatgcctttttagagcagtggggactcgttaattaccaagttgacccggaaagtagacccatggcaatgggacctcctcctactcctcattttaatgtattagctgataccccctctgggcttgtgcctctgcatcttcgatcacctcaggttcctgctgctcaacagatgctaaattttcctgagaaaaacaaggaaaaaccagttgatttgcagaactttggtctccgtactgacatttactccaagaaaacattagcaaagagtaaaggtgctagtgctggaagagaatggactgaacaggagacccttctactcctggaggccctggagatgtacaaggatgattggaacaaagtgtcggaacatgttggaagtcgtactcaggatgaatgcatcctccactttttgagacttcccattgaggacccataccttgagaattcagatgcttcccttgggcctttggcctaccagcctgtccccttcagtcagtcaggaaatccagttatgagtactgttgcttttttggcatctgtggtggaccctcgcgtggcatctgctgcagcaaaagcggctttggaggagttttctcgggtccgggaggaggtaccactggaattggttgaagctcatgtcaagaaagtacaagaagcagcacgagcctctgggaaagtggatcccacctacggtctggagagcagctgcattgcaggcacagggcccgatgagccagagaagcttgatccctttaagatgtaccatgatgatgacctggcagatttggtctttccctccagtgcgacagctgatacttcaatatttgcaggacaaaatgatcccttgaaagacagttacggtatgtctccctgcaacacagctgttgtacctcaggggtggtctgtggaagccttaaactctccacactcagagtcctttgtttccccagaggctgttgcagaacctcctcagccaacggcagttcccttagagctagccaaggagatagaaatggcatcagaagagaggccaccagcacaagcattggaaataatgatgggactgaagactactgacatggcaccatctaaagaaacagagatggccctcgccaaggacatggcactagctacaaaaaccgaggtggcattggctaaagatatggaatcacccaccaaattagatgtgacactggccaaggacatgcagccatccatggaatcagatatggccctagtcaaggacatggaactacccacagaaaaagaagtggccctggttaaggatgtcagatggcccacagaaacagatgtatcttcagccaagaatgtggtactgcccacagaaacagaggtagccccagccaaggatgtgacactgttgaaagaaacagagagggcatctcctataaaaatggacttagccccttccaaggacatgggaccacccaaagaaaacaagaaagaaacagagagggcatctcctataaaaatggacttggctccttccaaggacatgggaccacccaaagaaaacaagatagtcccagccaaggatttggtattactctcagaaatagaggtggcacaggctaatgacattatatcatccacagaaatatcctctgctgagaaggtggctttgtcctcagaaacagaggtagccctggccagggacatgacactgcccccggaaaccaacgtgatcttgaccaaggataaagcactacctttagaagcagaggtggccccagtcaaggacatggctcaactcccagaaacagaaatagccccggccaaggatgtggctccgtccacagtaaaagaagtgggcttgttgaaggacatgtctccactatcagaaacagaaatggctctgggcaaggatgtgactccacctccagaaacagaagtagttctcatcaagaacgtatgtctgcctccagaaatggaggtggccctgactgaggatcaggtcccagccctcaaaacagaagcacccctggctaaggatggggttctgaccctggccaacaatgtgactccagccaaagatgttccaccactctcagaaacagaggcaacaccagttccaattaaagacatggaaattgcacaaacacaaaaaggaataagtgaggattcccatttagaatctctgcaggatgtggggcagtcagctgcacctactttcatgatttcaccagaaaccgtcacaggaacggggaaaaagtgcagcttgccggccgaggaggattctgtgttagaaaaactaggggaaaggaaaccatgcaacagtcaaccttctgagctttcttcagagacctcaggaatagccaggccagaagaaggaaggcctgtggtgagtgggacaggaaatgacatcaccaccccaccgaacaaggagctcccaccaagcccagagaagaaaacaaagcctttggccaccactcaacctgcaaagacttcaacatcgaaagccaaaacacagcccacttctctccctaagcagccagctcccaccaccattggtgggttgaataaaaaacccatgagccttgcttcaggcttagtgccagctgccccacccaaacgccctgccgtcgcctctgccaggccttccatcttaccttcaaaagacgtgaagccaaagcccattgcagatgcaaaggctcctgagaagcgggcctcaccatccaagccagcttctgccccagcctccagatctgggtccaagagcactcagactgttgcaaaaaccacaacagctgctgctgttgcctcaactggcccaagcagtaggagcccctccacgctcctgcccaagaagcccactgccattaagactgagggaaaacctgcagaagtcaagaagatgactgcaaagtctgtaccagctgacttgagtcgcccaaagagcacctccaccagttccatgaagaaaaccaccactctcagtgggacagcccccgctgcaggggtggttcccagccgagtcaaggccacacccatgccctcccggccctccacaactcctttcatagacaagaagcccacctcggccaaacccagctccaccaccccccggctcagccgcctggccaccaatacttctgctcctgatctgaagaatgtccgctccaaggttggctccacggaaaacatcaagcatcagcctggaggaggccgggccaaagtagagaaaaaaacagaggcagctgctacaacccgaaagcctgaatctaatgcagtcactaaaacagccggcccaattgcaagtgcacagaaacaacctgcggggaaagtccagatagtctccaaaaaagtgagctacagccatattcagtccaagtgtggttccaaggacaatattaagcatgtccctggaggtggtaatgttcagattcagaacaagaaagtggacatctctaaggtctcctccaagtgtgggtctaaggctaacatcaagcacaagcctggtggaggagatgtcaagattgaaagtcagaagttgaacttcaaggagaaggcccaggccaaggtgggatccctcgataatgtgggccacctacctgcaggaggtgctgtgaagattgagacctacaggctgacgttccgggcaaatgccagggcccgcaccgaccacggggccgacattgtctcccgccccccacacttccctggcggccccaactcgggctcccgggtccttggccccctttcccgggctgtccactag

SEQ ID NO: 94 - DNA, 3900 bp, Homo sapiens
atggatttcaaagctggaggcgccttatgtcacattcttggggctgcttacaagtataaaaatgaacagggatggcggaggtttgacctacagaacccatctcgaatggatcgtaatgtggaaatgtttatgaacattgaaaaaacattggtgcagaacaattgtttgaccagacccaacatctacctcattccagacattgatctgaagttggctaacaaattgaaagatatcatcaaacgacatcagggaacatttacggatgagaagtcaaaagcttcccaccacatttacccatattcttcctcacaagacgatgaagaatggttgagaccggtgatgagaaaagagaagcaagtgttagtgcattggggcttttacccagacagctatgatacttgggtccatagtaatgatgttgatgctgaaattgaagatccaccaattccagaaaaaccatggaaggttcatgtgaaatggattttggacactgatattttcaatgaatggatgaatgaggaggattatgaggtggatgaaaataggaagcctgtgagttttcgtcagcggatttcaaccaagaatgaagagccagtcagaagtccagaaagaagagatagaaaagcatcagctaatgctcgaaagaggaaacattcgccttcgcctccccctccgacaccaacagaatcacggaagaagagtgggaagaaaggccaagctagcctttatgggaagcgcagaagtcagaaagaggaagatgagcaagaagatctaaccaaggatatggaagacccaacacctgtacccaatatagaagaagtagtacttcccaaaaatgtgaacctaaagaaagatagtgaaaatacacctgttaaaggaggaactgtagcggatctagatgagcaggatgaagaaacagtcacagcaggaggaaaggaagatgaagatcctgccaaaggtgatcagagtcgatcagttgaccttggggaagataatgtgacagagcagaccaatcacattattattcctagttatgcatcatggtttgattataactgtattcatgtgattgaacggcgtgctcttcctgagttcttcaatggaaaaaacaaatccaagactccagaaatatacttggcatatcgaaattttatgattgacacgtatcgtctaaacccccaagagtatttaactagcactgcttgtcggaggaacttgactggagatgtgtgtgctgtgatgagggtccatgcctttttagagcagtggggactcgttaattaccaagttgacccggaaagtagacccatggcaatgggacctcctcctactcctcattttaatgtattagctgataccccctctgggcttgtgcctctgcatcttcgatcacctcaggttcctgctgctcaacagatgctaaattttcctgagaaaaacaaggaaaaaccagttgatttgcagaactttggtctccgtactgacatttactccaagaaaacattagcaaagagtaaaggtgctagtgctggaagagaatggactgaacaggagacccttctactcctggaggccctggagatgtacaaggatgattggaacaaagtgtcggaacatgttggaagtcgtactcaggatgaatgcatcctccactttttgagacttcccattgaggacccataccttgagaattcagatgcttcccttgggcctttggcctaccagcctgtccccttcagtcagtcaggaaatccagttatgagtactgttgcttttttggcatctgtggtggaccctcgcgtggcatctgctgcagcaaaagcggctttggaggagttttctcgggtccgggaggaggtaccactggaattggttgaagctcatgtcaagaaagtacaagaagcagcacgagcctctgggaaagtggatcccacctacggtctggagagcagctgcattgcaggcacagggcccgatgagccagagaagcttgatccctttaagatgtaccatgatgatgacctggcagatttggtctttccctccagtgcgacagctgatacttcaatatttgcaggacaaaatgatcccttgaaagacagttacggtatgtctccctgcaacacagctgttgtacctcaggggtggtctgtggaagccttaaactctccacactcagagtcctttgtttccccagaggctgttgcagaacctcctcagccaacggcagttcccttagagctagccaaggagatagaaatggcatcagaagagaggccaccagcacaagcattggaaataatgatgggactgaagactactgacatggcaccatctaaagaaacagagatggccctcgccaaggacatggcactagctacaaaaaccgaggtggcattggctaaagatatggaatcacccaccaaattagatgtgacactggccaaggacatgcagccatccatggaatcagatatggccctagtcaaggacatggaactacccacagaaaaagaagtggccctggttaaggatgtcagatggcccacagaaacagatgtatcttcagccaagaatgtggtactgcccacagaaacagaggtagccccagccaaggatgtgacactgttgaaagaaacagagagggcatctcctataaaaatggacttagccccttccaaggacatgggaccacccaaagaaaacaagaaagaaacagagagggcatctcctataaaaatggacttggctccttccaaggacatgggaccacccaaagaaaacaagatagtcccagccaaggatttggtattactctcagaaatagaggtggcacaggctaatgacattatatcatccacagaaatatcctctgctgagaaggtggctttgtcctcagaaacagaggtagccctggccagggacatgacactgcccccggaaaccaacgtgatcttgaccaaggataaagcactacctttagaagcagaggtggccccagtcaaggacatggctcaactcccagaaacagaaatagccccggccaaggatgtggctccgtccacagtaaaagaagtgggcttgttgaaggacatgtctccactatcagaaacagaaatggctctgggcaaggatgtgactccacctccagaaacagaagtagttctcatcaagaacgtatgtctgcctccagaaatggaggtggccctgactgaggatcaggtcccagccctcaaaacagaagcacccctggctaaggatggggttctgaccctggccaacaatgtgactccagccaaagatgttccaccactctcagaaacagaggcaacaccagttccaattaaagacatggaaattgcacaaacacaaaaaggaataagtgaggattcccatttagaatctctgcaggatgtggggcagtcagctgcacctactttcatgatttcaccagaaaccgtcacaggaacggggaaaaagtgcagcttgccggccgaggaggattctgtgttagaaaaactaggggaaaggaaaccatgcaacagtcaaccttctgagctttcttcagagacctcaggaatagccaggccagaagaaggaaggcctgtggtgagtgggacaggaaatgacatcaccaccccaccgaacaaggagctcccaccaagcccagagaagaaaacaaagcctttggccaccactcaacctgcaaagacttcaacatcgaaagccaaaacacagcccacttctctccctaagcagccagctcccaccaccattggtgggttgaataaaaaacccatgagccttgcttcaggcttagtgccagctgccccacccaaacgccctgccgtcgcctctgccaggccttccatcttaccttcaaaagacgtgaagccaaag

SEQ ID NO: 95 - DNA, 2643 bp, Homo sapiens
atggccgcagcggcgggcggcggcgggccggggacagcggtaggcgccacgggctcggggattgcggcggcagccgcaggcctagctgtttatcgacggaaggatgggggcccggccaccaagttttgggagagcccggagacggtgtcccagctggattcggtgcgggtctggctgggcaagcactacaagaagtatgttcatgcggatgctcctaccaataaaacactggctgggctggtggtgcagcttcttcagttccaggaagatgcctttgggaagcatgtcaccaacccggccttcaccaaactccctgcaaagtgtttcatggatttcaaagctggaggcgccttatgtcacattcttggggctgcttacaagtataaaaatgaacagggatggcggaggtttgacctacagaacccatctcgaatggatcgtaatgtggaaatgtttatgaacattgaaaaaacattggtgcagaacaattgtttgaccagacccaacatctacctcattccagacattgatctgaagttggctaacaaattgaaagatatcatcaaacgacatcagggaacatttacggatgagaagtcaaaagcttcccaccacatttacccatattcttcctcacaagacgatgaagaatggttgagaccggtgatgagaaaagagaagcaagtgttagtgcattggggcttttacccagacagctatgatacttgggtccatagtaatgatgttgatgctgaaattgaagatccaccaattccagaaaaaccatggaaggttcatgtgaaatggattttggacactgatattttcaatgaatggatgaatgaggaggattatgaggtggatgaaaataggaagcctgtgagttttcgtcagcggatttcaaccaagaatgaagagccagtcagaagtccagaaagaagagatagaaaagcatcagctaatgctcgaaagaggaaacattcgccttcgcctccccctccgacaccaacagaatcacggaagaagagtgggaagaaaggccaagctagcctttatgggaagcgcagaagtcagaaagaggaagatgagcaagaagatctaaccaaggatatggaagacccaacacctgtacccaatatagaagaagtagtacttcccaaaaatgtgaacctaaagaaagatagtgaaaatacacctgttaaaggaggaactgtagcggatctagatgagcaggatgaagaaacagtcacagcaggaggaaaggaagatgaagatcctgccaaaggtgatcagagtcgatcagttgaccttggggaagataatgtgacagagcagaccaatcacattattattcctagttatgcatcatggtttgattataactgtattcatgtgattgaacggcgtgctcttcctgagttcttcaatggaaaaaacaaatccaagactccagaaatatacttggcatatcgaaattttatgattgacacgtatcgtctaaacccccaagagtatttaactagcactgcttgtcggaggaacttgactggagatgtgtgtgctgtgatgagggtccatgcctttttagagcagtggggactcgttaattaccaagttgacccggaaagtagacccatggcaatgggacctcctcctactcctcattttaatgtattagctgataccccctctgggcttgtgcctctgcatcttcgatcacctcaggttcctgctgctcaacagatgctaaattttcctgagaaaaacaaggaaaaaccagttgatttgcagaactttggtctccgtactgacatttactccaagaaaacattagcaaagagtaaaggtgctagtgctggaagagaatggactgaacaggagacccttctactcctggaggccctggagatgtacaaggatgattggaacaaagtgtcggaacatgttggaagtcgtactcaggatgaatgcatcctccactttttgagacttcccattgaggacccataccttgagaattcagatgcttcccttgggcctttggcctaccagcctgtccccttcagtcagtcaggaaatccagttatgagtactgttgcttttttggcatctgtggtggaccctcgcgtggcatctgctgcagcaaaagcggctttggaggagttttctcgggtccgggaggaggtaccactggaattggttgaagctcatgtcaagaaagtacaagaagcagcacgagcctctgggaaagtggatcccacctacggtctggagagcagctgcattgcaggcacagggcccgatgagccagagaagcttggaatagccaggccagaagaaggaaggcctgtggtgagtgggacaggaaatgacatcaccaccccaccgaacaaggagctcccaccaagcccagagaagaaaacaaagcctttggccaccactcaacctgcaaagacttcaacatcgaaagccaaaacacagcccacttctctccctaagcagccagctcccaccaccattggtgggttgaataaaaaacccatgagccttgcttcaggcttagtgccagctgccccacccaaacgccctgccgtcgcctctgccaggccttccatcttaccttcaaaagacgtgaagccaaag

SEQ ID NO: 96 - DNA, 4023 bp, Homo sapiens
atggatttcaaagctggaggcgccttatgtcacattcttggggctgcttacaagtataaaaatgaacagggatggcggaggtttgacctacagaacccatctcgaatggatcgtaatgtggaaatgtttatgaacattgaaaaaacattggtgcagaacaattgtttgaccagacccaacatctacctcattccagacattgatctgaagttggctaacaaattgaaagatatcatcaaacgacatcagggaacatttacggatgagaagtcaaaagcttcccaccacatttacccatattcttcctcacaagacgatgaagaatggttgagaccggtgatgagaaaagagaagcaagtgttagtgcattggggcttttacccagacagctatgatacttgggtccatagtaatgatgttgatgctgaaattgaagatccaccaattccagaaaaaccatggaaggttcatgtgaaatggattttggacactgatattttcaatgaatggatgaatgaggaggattatgaggtggatgaaaataggaagcctgtgagttttcgtcagcggatttcaaccaagaatgaagagccagtcagaagtccagaaagaagagatagaaaagcatcagctaatgctcgaaagaggaaacattcgccttcgcctccccctccgacaccaacagaatcacggaagaagagtgggaagaaaggccaagctagcctttatgggaagcgcagaagtcagaaagaggaagatgagcaagaagatctaaccaaggatatggaagacccaacacctgtacccaatatagaagaagtagtacttcccaaaaatgtgaacctaaagaaagatagtgaaaatacacctgttaaaggaggaactgtagcggatctagatgagcaggatgaagaaacagtcacagcaggaggaaaggaagatgaagatcctgccaaaggtgatcagagtcgatcagttgaccttggggaagataatgtgacagagcagaccaatcacattattattcctagttatgcatcatggtttgattataactgtattcatgtgattgaacggcgtgctcttcctgagttcttcaatggaaaaaacaaatccaagactccagaaatatacttggcatatcgaaattttatgattgacacgtatcgtctaaacccccaagagtatttaactagcactgcttgtcggaggaacttgactggagatgtgtgtgctgtgatgagggtccatgcctttttagagcagtggggactcgttaattaccaagttgacccggaaagtagacccatggcaatgggacctcctcctactcctcattttaatgtattagctgataccccctctgggcttgtgcctctgcatcttcgatcacctcaggttcctgctgctcaacagatgctaaattttcctgagaaaaacaaggaaaaaccagttgatttgcagaactttggtctccgtactgacatttactccaagaaaacattagcaaagagtaaaggtgctagtgctggaagagaatggactgaacaggagacccttctactcctggaggccctggagatgtacaaggatgattggaacaaagtgtcggaacatgttggaagtcgtactcaggatgaatgcatcctccactttttgagacttcccattgaggacccataccttgagaattcagatgcttcccttgggcctttggcctaccagcctgtccccttcagtcagtcaggaaatccagttatgagtactgttgcttttttggcatctgtggtggaccctcgcgtggcatctgctgcagcaaaagcggctttggaggagttttctcgggtccgggaggaggtaccactggaattggttgaagctcatgtcaagaaagtacaagaagcagcacgagcctctgggaaagtggatcccacctacggtctggagagcagctgcattgcaggcacagggcccgatgagccagagaagcttgggtctccaactgaattccttgaagagaaaatggcctaccaggaatacccaaatagccagaactggccagaagataccaacttttgtttccaacctgagcaagtggtcgatcctatccagactgatccctttaagatgtaccatgatgatgacctggcagatttggtctttccctccagtgcgacagctgatacttcaatatttgcaggacaaaatgatcccttgaaagacagttacggtatgtctccctgcaacacagctgttgtacctcaggggtggtctgtggaagccttaaactctccacactcagagtcctttgtttccccagaggctgttgcagaacctcctcagccaacggcagttcccttagagctagccaaggagatagaaatggcatcagaagagaggccaccagcacaagcattggaaataatgatgggactgaagactactgacatggcaccatctaaagaaacagagatggccctcgccaaggacatggcactagctacaaaaaccgaggtggcattggctaaagatatggaatcacccaccaaattagatgtgacactggccaaggacatgcagccatccatggaatcagatatggccctagtcaaggacatggaactacccacagaaaaagaagtggccctggttaaggatgtcagatggcccacagaaacagatgtatcttcagccaagaatgtggtactgcccacagaaacagaggtagccccagccaaggatgtgacactgttgaaagaaacagagagggcatctcctataaaaatggacttagccccttccaaggacatgggaccacccaaagaaaacaagaaagaaacagagagggcatctcctataaaaatggacttggctccttccaaggacatgggaccacccaaagaaaacaagatagtcccagccaaggatttggtattactctcagaaatagaggtggcacaggctaatgacattatatcatccacagaaatatcctctgctgagaaggtggctttgtcctcagaaacagaggtagccctggccagggacatgacactgcccccggaaaccaacgtgatcttgaccaaggataaagcactacctttagaagcagaggtggccccagtcaaggacatggctcaactcccagaaacagaaatagccccggccaaggatgtggctccgtccacagtaaaagaagtgggcttgttgaaggacatgtctccactatcagaaacagaaatggctctgggcaaggatgtgactccacctccagaaacagaagtagttctcatcaagaacgtatgtctgcctccagaaatggaggtggccctgactgaggatcaggtcccagccctcaaaacagaagcacccctggctaaggatggggttctgaccctggccaacaatgtgactccagccaaagatgttccaccactctcagaaacagaggcaacaccagttccaattaaagacatggaaattgcacaaacacaaaaaggaataagtgaggattcccatttagaatctctgcaggatgtggggcagtcagctgcacctactttcatgatttcaccagaaaccgtcacaggaacggggaaaaagtgcagcttgccggccgaggaggattctgtgttagaaaaactaggggaaaggaaaccatgcaacagtcaaccttctgagctttcttcagagacctcaggaatagccaggccagaagaaggaaggcctgtggtgagtgggacaggaaatgacatcaccaccccaccgaacaaggagctcccaccaagcccagagaagaaaacaaagcctttggccaccactcaacctgcaaagacttcaacatcgaaagccaaaacacagcccacttctctccctaagcagccagctcccaccaccattggtgggttgaataaaaaacccatgagccttgcttcaggcttagtgccagctgccccacccaaacgccctgccgtcgcctctgccaggccttccatcttaccttcaaaagacgtgaagccaaag

SEQ ID NO: 97 - DNA, 3780 bp, Homo sapiens
atggccgcagcggcgggcggcggcgggccggggacagcggtaggcgccacgggctcggggattgcggcggcagccgcaggcctagctgtttatcgacggaaggatgggggcccggccaccaagttttgggagagcccggagacggtgtcccagctggattcggtgcgggtctggctgggcaagcactacaagaagtatgttcatgcggatgctcctaccaataaaacactggctgggctggtggtgcagcttcttcagttccaggaagatgcctttgggaagcatgtcaccaacccggccttcaccaaactccctgcaaagtgtttcatggatttcaaagctggaggcgccttatgtcacattcttggggctgcttacaagtataaaaatgaacagggatggcggaggtttgacctacagaacccatctcgaatggatcgtaatgtggaaatgtttatgaacattgaaaaaacattggtgcagaacaattgtttgaccagacccaacatctacctcattccagacattgatctgaagttggctaacaaattgaaagatatcatcaaacgacatcagggaacatttacggatgagaagtcaaaagcttcccaccacatttacccatattcttcctcacaagacgatgaagaatggttgagaccggtgatgagaaaagagaagcaagtgttagtgcattggggcttttacccagacagctatgatacttgggtccatagtaatgatgttgatgctgaaattgaagatccaccaattccagaaaaaccatggaaggttcatgtgaaatggattttggacactgatattttcaatgaatggatgaatgaggaggattatgaggtggatgaaaataggaagcctgtgagttttcgtcagcggatttcaaccaagaatgaagagccagtcagaagtccagaaagaagagatagaaaagcatcagctaatgctcgaaagaggaaacattcgccttcgcctccccctccgacaccaacagaatcacggaagaagagtgggaagaaaggccaagctagcctttatgggaagcgcagaagtcagaaagaggaagatgagcaagaagatctaaccaaggatatggaagacccaacacctgtacccaatatagaagaagtagtacttcccaaaaatgtgaacctaaagaaagatagtgaaaatacacctgttaaaggaggaactgtagcggatctagatgagcaggatgaagaaacagtcacagcaggaggaaaggaagatgaagatcctgccaaaggtgatcagagtcgatcagttgaccttggggaagataatgtgacagagcagaccaatcacattattattcctagttatgcatcatggtttgattataactgtattcatgtgattgaacggcgtgctcttcctgagttcttcaatggaaaaaacaaatccaagactccagaaatatacttggcatatcgaaattttatgattgacacgtatcgtctaaacccccaagagtatttaactagcactgcttgtcggaggaacttgactggagatgtgtgtgctgtgatgagggtccatgcctttttagagcagtggggactcgttaattaccaagttgacccggaaagtagacccatggcaatgggacctcctcctactcctcattttaatgtattagctgataccccctctgggcttgtgcctctgcatcttcgatcacctcaggttcctgctgctcaacagatgctaaattttcctgagaaaaacaaggaaaaaccagttgatttgcagaactttggtctccgtactgacatttactccaagaaaacattagcaaagagtaaaggtgctagtgctggaagagaatggactgaacaggagacccttctactcctggaggccctggagatgtacaaggatgattggaacaaagtgtcggaacatgttggaagtcgtactcaggatgaatgcatcctccactttttgagacttcccattgaggacccataccttgagaattcagatgcttcccttgggcctttggcctaccagcctgtccccttcagtcagtcaggaaatccagttatgagtactgttgcttttttggcatctgtggtggaccctcgcgtggcatctgctgcagcaaaagcggctttggaggagttttctcgggtccgggaggaggtaccactggaattggttgaagctcatgtcaagaaagtacaagaagcagcacgagcctctgggaaagtggatcccacctacggtctggagagcagctgcattgcaggcacagggcccgatgagccagagaagcttggaatagccaggccagaagaaggaaggcctgtggtgagtgggacaggaaatgacatcaccaccccaccgaacaaggagctcccaccaagcccagagaagaaaacaaagcctttggccaccactcaacctgcaaagacttcaacatcgaaagccaaaacacagcccacttctctccctaagcagccagctcccaccaccattggtgggttgaataaaaaacccatgagccttgcttcaggcttagtgccagctgccccacccaaacgccctgccgtcgcctctgccaggccttccatcttaccttcaaaagacgtgaagccaaagcccattgcagatgcaaaggctcctgagaagcgggcctcaccatccaagccagcttctgccccagcctccagatctgggtccaagagcactcagactgttgcaaaaaccacaacagctgctgctgttgcctcaactggcccaagcagtaggagcccctccacgctcctgcccaagaagcccactgccattaagactgagggaaaacctgcagaagtcaagaagatgactgcaaagtctgtaccagctgacttgagtcgcccaaagagcacctccaccagttccatgaagaaaaccaccactctcagtgggacagcccccgctgcaggggtggttcccagccgagtcaaggccacacccatgccctcccggccctccacaactcctttcatagacaagaagcccacctcggccaaacccagctccaccaccccccggctcagccgcctggccaccaatacttctgctcctgatctgaagaatgtccgctccaaggttggctccacggaaaacatcaagcatcagcctggaggaggccgggccaaagtagagaaaaaaacagaggcagctgctacaacccgaaagcctgaatctaatgcagtcactaaaacagccggcccaattgcaagtgcacagaaacaacctgcggggaaagtccagatagtctccaaaaaagtgagctacagccatattcagtccaagtgtggttccaaggacaatattaagcatgtccctggaggtggtaatgttcagattcagaacaagaaagtggacatctctaaggtctcctccaagtgtgggtctaaggctaacatcaagcacaagcctggtggaggagatgtcaagattgaaagtcagaagttgaacttcaaggagaaggcccaggccaaggtgggatccctcgataatgtgggccacctacctgcaggaggtgctgtgaagactgagggcggtggcagcgaggctcctctgtgtccgggtccccctgctggggaggagccggccatctctgaggcagcgcctgaagctggcgcccccacttcagccagtggcctcaatggccaccccaccctgtcagggggtggtgaccaaagggaggcccagaccttggacagccagatccaggagacaagcatctaa

SEQ ID NO: 98 - DNA, 657 bp, Homo sapiens
atggccgcagcggcgggcggcggcgggccggggacagcggtaggcgccacgggctcggggattgcggcggcagccgcaggcctagctgtttatcgacggaaggatgggggcccggccaccaagttttgggagagcccggagacggtgtcccagctggattcggtgcgggtctggctgggcaagcactacaagaagtatgttcatgcggatgctcctaccaataaaacactggctgggctggtggtgcagcttcttcagttccaggaagatgcctttgggaagcatgtcaccaacccggccttcaccaaactccctgttcagattcagaacaagaaagtggacatctctaaggtctcctccaagtgtgggtctaaggctaacatcaagcacaagcctggtggaggagatgtcaagattgaaagtcagaagttgaacttcaaggagaaggcccaggccaaggtgggatccctcgataatgtgggccacctacctgcaggaggtgctgtgaagattgagacctacaggctgacgttccgggcaaatgccagggcccgcaccgaccacggggccgacattgtctcccgccccccacacttccctggcggccccaactcgggctcccgggtccttggccccctttcccgggctgtccactag

SEQ ID NO: 99 - DNA, 705 bp, Homo sapiens
atggccgcagcggcgggcggcggcgggccggggacagcggtaggcgccacgggctcggggattgcggcggcagccgcaggcctagctgtttatcgacggaaggatgggggcccggccaccaagttttgggagagcccggagacggtgtcccagctggattcggtgcgggtctggctgggcaagcactacaagaagtatgttcatgcggatgctcctaccaataaaacactggctgggctggtggtgcagcttcttcagttccaggaagatgcctttgggaagcatgtcaccaacccggccttcaccaaactccctgttcagattcagaacaagaaagtggacatctctaaggtctcctccaagtgtgggtctaaggctaacatcaagcacaagcctggtggaggagatgtcaagattgaaagtcagaagttgaacttcaaggagaaggcccaggccaaggtgggatccctcgataatgtgggccacctacctgcaggaggtgctgtgaagactgagggcggtggcagcgaggctcctctgtgtccgggtccccctgctggggaggagccggccatctctgaggcagcgcctgaagctggcgcccccacttcagccagtggcctcaatggccaccccaccctgtcagggggtggtgaccaaagggaggcccagaccttggacagccagatccaggagacaaattga

SEQ ID NO: 100 - DNA, 327 bp, Homo sapiens
atgcccgttacagctacaggcaagatcctcttccgcagaagccacatccgggacgtagctgtgaagagactgaagcccatcgatgaatactgccgggtaaccagagaagacaaagacctgcacagaaagatccaccggatcattcagcaggactgccagaaaccaaatcacatggagaagggctgtcacttcctgcacatcttggcctgtgctcgcctgagcatccgcccgggcctgagcgaggctgtgctgcagcaagttctggagctcctggaggaccagagtgacattgtcagcacaatggagcactactacacagcgttctga

SEQ ID NO: 101 - DNA, 426 bp, Homo sapiens
atgctcgcctactgcgtgcaggatgccaccgtggtggacgtggagaagcggaggaacccctccaagcactacgtgaattttaagaaggacaccacttccaaggcaattcatagtatatttaagaatgctatacaactgctgcaggaaaaaggacttgttttccagaaagatgatggttttgataacctatactatgtaaccagagaagacaaagacctgcacagaaagatccaccggatcattcagcaggactgccagaaaccaaatcacatggagaagggctgtcacttcctgcacatcttggcctgtgctcgcctgagcatccgcccgggcctgagcgaggctgtgctgcagcaagttctggagctcctggaggaccagagtgacattgtcagcacaatggagcactactacacagcgttctga

SEQ ID NO: 102 - DNA, 537 bp, Homo sapiens
atgctcgcctactgcgtgcaggatgccaccgtggtggacgtggagaagcggaggaacccctccaagcactacgtatacataatcaatgtgacctggtctgactccacctcccagactatctaccggaggtacagcaagttctttgacctgcagatgcagcttttggataagtttcccattgaaggtggccagaaggaccccaagcaaaggatcatccccttcctcccaggcaagatcctcttccgcagaagccacatccgggacgtagctgtgaagagactgaagcccatcgatgaatactgccgggtaaccagagaagacaaagacctgcacagaaagatccaccggatcattcagcaggactgccagaaaccaaatcacatggagaagggctgtcacttcctgcacatcttggcctgtgctcgcctgagcatccgcccgggcctgagcgaggctgtgctgcagcaagttctggagctcctggaggaccagagtgacattgtcagcacaatggagcactactacacagcgttctga

SEQ ID NO: 103 - DNA, 1707 bp, Homo sapiens
atgttaggagcgcagtggcggcgcaaccagccttctagggcggcggaggctggacgtaaagaaagaagtgatgcactcaattctgcaatagataaaatgaccaagaagaccagggacttgcgtagacagctccgcaaagctgtcatggaccacgtttcagattctttcctggaaaccaatgttccacttttggtattgattgaagctgcaaagaatggaaatgagaaagaagttaaggagtatgcccaagttttccgtgaacatgccaacaaattgattgaggttgccaacttggcctgttccatctcaaataatgaagaaggtgtaaagcttgttcgaatgtctgcaagccagttagaagccctctgtcctcaggttattaatgctgcactggctttagcagcaaaaccacagagtaaactggcccaagagaacatggatctttttaaagaacaatgggaaaaacaagtccgtgttctcacagatgctgtcgatgacattacttccattgatgacttcttggctgtctcagagaatcacattttggaagatgtgaacaaatgtgtcattgctctccaagagaaggatgtggatggcctggaccgcacagctggtgcaattcgaggccgggcagcccgggtcattcacgtagtcacctcagagatggacaactatgagccaggagtctacacagagaaggttctggaagccactaagctgctctccaacacagtcatgccacgttttactgagcaagtagaagcagccgtggaagccctcagctcggaccctgcccagcccatggatgagaatgagtttatcgatgcttcccgcctggtatatgatggcatccgggacatcaggaaagcagtgctgatgataaggacccctgaggagttggatgactctgactttgagacagaagattttgatgtcagaagcaggacgagcgtccagacagaagacgatcagctgatagctggccagagtgcccgggcgatcatggctcagcttccccaggagcaaaaagcgaagattgcggaacaggtggccagcttccaggaagaaaagagcaagctggatgctgaagtgtccaaatgggacgacagtggcaatgacatcattgtgctggccaagcagatgtgcatgattatgatggagatgacagactttacccgaggtaaaggaccactcaaaaatacatcggatgtcatcagtgctgccaagaaaattgctgaggcaggatccaggatggacaagcttggccgcaccattgcagaccattgccccgactcggcttgcaagcaggacctgctggcctacctgcaacgcatcgccctctactgccaccagctgaacatctgcagcaaggtcaaggccgaggtgcagaatctcggcggggagcttgttgtctctggggtggacagcgccatgtccctgatccaggcagccaagaacttgatgaatgctgtggtgcagacagtgaaggcatcctacgtcgcctctaccaaataccaaaagtcacagggtatggcttccctcaaccttcctgctgtgtcatggaagatgaaggcaccagagaaaaagccattggtgaagagagagaaacaggatgagacacagaccaagattaaacgggcatctcagaagaagcacgtgaacccggtgcaggccctcagcgagttcaaagctatggacagcatctaa

SEQ ID NO: 104 - DNA, 1512 bp, Homo sapiens
atgttaggagcgcagtggcggcgcaaccagccttctagggcggcggaggctggacgtaaagaaagaagtgatgcactcaattctgcaatagataaaatgaccaagaagaccagggacttgcgtagacagctccgcaaagctgtcatggaccacgtttcagattctttcctggaaaccaatgttccacttttggtattgattgaagctgcaaagaatggaaatgagaaagaagttaaggagtatgcccaagttttccgtgaacatgccaacaaattgattgaggttgccaacttggcctgttccatctcaaataatgaagaaggtgtaaagcttgttcgaatgtctgcaagccagttagaagccctctgtcctcaggttattaatgctgcactggctttagcagcaaaaccacagagtaaactggcccaagagaacatggatctttttaaagaacaatgggaaaaacaagtccgtgttctcacagatgctgtcgatgacattacttccattgatgacttcttggctgtctcagagaatcacattttggaagatgtgaacaaatgtgtcattgctctccaagagaaggatgtggatggcctggaccgcacagctggtgcaattcgaggccgggcagcccgggtcattcacgtagtcacctcagagatggacaactatgagccaggagtctacacagagaaggttctggaagccactaagctgctctccaacacagtcatgccacgttttactgagcaagtagaagcagccgtggaagccctcagctcggaccctgcccagcccatggatgagaatgagtttatcgatgcttcccgcctggtatatgatggcatccgggacatcaggaaagcagtgctgatgataaggacccctgaggagttggatgactctgactttgagacagaagattttgatgtcagaagcaggacgagcgtccagacagaagacgatcagctgatagctggccagagtgcccgggcgatcatggctcagcttccccaggagcaaaaagcgaagattgcggaacaggtggccagcttccaggaagaaaagagcaagctggatgctgaagtgtccaaatgggacgacagtggcaatgacatcattgtgctggccaagcagatgtgcatgattatgatggagatgacagactttacccgaggtaaaggaccactcaaaaatacatcggatgtcatcagtgctgccaagaaaattgctgaggcaggatccaggatggacaagcttggccgcaccattgcagaccattgccccgactcggcttgcaagcaggacctgctggcctacctgcaacgcatcgccctctactgccaccagctgaacatctgcagcaaggtcaaggccgaggtgcagaatctcggcggggagcttgttgtctctgggaactgtgacacctgcggggcactgcaagggctgaaaggctggcctcctcccctttgctggccactcactgggtggacagcgccatgtccctga

SEQ ID NO: 105 - DNA, 1611 bp, Homo sapiens
atgaccaagaagaccagggacttgcgtagacagctccgcaaagctgtcatggaccacgtttcagattctttcctggaaaccaatgttccacttttggtattgattgaagctgcaaagaatggaaatgagaaagaagttaaggagtatgcccaagttttccgtgaacatgccaacaaattgattgaggttgccaacttggcctgttccatctcaaataatgaagaaggtgtaaagcttgttcgaatgtctgcaagccagttagaagccctctgtcctcaggttattaatgctgcactggctttagcagcaaaaccacagagtaaactggcccaagagaacatggatctttttaaagaacaatgggaaaaacaagtccgtgttctcacagatgctgtcgatgacattacttccattgatgacttcttggctgtctcagagaatcacattttggaagatgtgaacaaatgtgtcattgctctccaagagaaggatgtggatggcctggaccgcacagctggtgcaattcgaggccgggcagcccgggtcattcacgtagtcacctcagagatggacaactatgagccaggagtctacacagagaaggttctggaagccactaagctgctctccaacacagtcatgccacgttttactgagcaagtagaagcagccgtggaagccctcagctcggaccctgcccagcccatggatgagaatgagtttatcgatgcttcccgcctggtatatgatggcatccgggacatcaggaaagcagtgctgatgataaggacccctgaggagttggatgactctgactttgagacagaagattttgatgtcagaagcaggacgagcgtccagacagaagacgatcagctgatagctggccagagtgcccgggcgatcatggctcagcttccccaggagcaaaaagcgaagattgcggaacaggtggccagcttccaggaagaaaagagcaagctggatgctgaagtgtccaaatgggacgacagtggcaatgacatcattgtgctggccaagcagatgtgcatgattatgatggagatgacagactttacccgaggtaaaggaccactcaaaaatacatcggatgtcatcagtgctgccaagaaaattgctgaggcaggatccaggatggacaagcttggccgcaccattgcagaccattgccccgactcggcttgcaagcaggacctgctggcctacctgcaacgcatcgccctctactgccaccagctgaacatctgcagcaaggtcaaggccgaggtgcagaatctcggcggggagcttgttgtctctggggtggacagcgccatgtccctgatccaggcagccaagaacttgatgaatgctgtggtgcagacagtgaaggcatcctacgtcgcctctaccaaataccaaaagtcacagggtatggcttccctcaaccttcctgctgtgtcatggaagatgaaggcaccagagaaaaagccattggtgaagagagagaaacaggatgagacacagaccaagattaaacgggcatctcagaagaagcacgtgaacccggtgcaggccctcagcgagttcaaagctatggacagcatctaa

SEQ ID NO: 106 - DNA, 2412 bp, Homo sapiens
atgaaggctgctgcaggagagttcgcagatgatccctgctcttctgtgaagcgaggcaacatggttcgggcagctcgagctttgctctctgctgttacccggttgctgattttggctgacatggcagatgtctacaaattacttgttcagctgaaagttgtggaagatggtatcttgaagttgaggaatgctggcaatgaacaagacttaggaatccagtataaagccctaaaacctgaagtggataagctgaacattatggcagccaaaagacaacaggaattgaaagatgttggccatcgtgatcagatggctgcagctagaggaatcctgcagaagaacgttccgatcctctatactgcatcccaggcatgcctacagcaccctgatgtcgcagcctataaggccaacagggacctgatatacaagcagctgcagcaggcggtcacaggcatttccaatgcagcccaggccactgcctcagacgatgcctcacagcaccagggtggaggaggaggagaactggcatatgcactcaataactttgacaaacaaatcattgtggaccccttgagcttcagcgaggagcgctttaggccttccctggaggagcgtctggaaagcatcattagtggggctgccttgatggccgactcgtcctgcacgcgtgatgaccgtcgtgagcgaattgtggcagagtgtaatgctgtccgccaggccctgcaggacctgctttcggagtacatgggcaatgctggacgtaaagaaagaagtgatgcactcaattctgcaatagataaaatgaccaagaagaccagggacttgcgtagacagctccgcaaagctgtcatggaccacgtttcagattctttcctggaaaccaatgttccacttttggtattgattgaagctgcaaagaatggaaatgagaaagaagttaaggagtatgcccaagttttccgtgaacatgccaacaaattgattgaggttgccaacttggcctgttccatctcaaataatgaagaaggtgtaaagcttgttcgaatgtctgcaagccagttagaagccctctgtcctcaggttattaatgctgcactggctttagcagcaaaaccacagagtaaactggcccaagagaacatggatctttttaaagaacaatgggaaaaacaagtccgtgttctcacagatgctgtcgatgacattacttccattgatgacttcttggctgtctcagagaatcacattttggaagatgtgaacaaatgtgtcattgctctccaagagaaggatgtggatggcctggaccgcacagctggtgcaattcgaggccgggcagcccgggtcattcacgtagtcacctcagagatggacaactatgagccaggagtctacacagagaaggttctggaagccactaagctgctctccaacacagtcatgccacgttttactgagcaagtagaagcagccgtggaagccctcagctcggaccctgcccagcccatggatgagaatgagtttatcgatgcttcccgcctggtatatgatggcatccgggacatcaggaaagcagtgctgatgataaggacccctgaggagttggatgactctgactttgagacagaagattttgatgtcagaagcaggacgagcgtccagacagaagacgatcagctgatagctggccagagtgcccgggcgatcatggctcagcttccccaggagcaaaaagcgaagattgcggaacaggtggccagcttccaggaagaaaagagcaagctggatgctgaagtgtccaaatgggacgacagtggcaatgacatcattgtgctggccaagcagatgtgcatgattatgatggagatgacagactttacccgaggtaaaggaccactcaaaaatacatcggatgtcatcagtgctgccaagaaaattgctgaggcaggatccaggatggacaagcttggccgcaccattgcagaccattgccccgactcggcttgcaagcaggacctgctggcctacctgcaacgcatcgccctctactgccaccagctgaacatctgcagcaaggtcaaggccgaggtgcagaatctcggcggggagcttgttgtctctggggtggacagcgccatgtccctgatccaggcagccaagaacttgatgaatgctgtggtgcagacagtgaaggcatcctacgtcgcctctaccaaataccaaaagtcacagggtatggcttccctcaaccttcctgctgtgtcatggaagatgaaggcaccagagaaaaagccattggtgaagagagagaaacaggatgagacacagaccaagattaaacgggcatctcagaagaagcacgtgaacccggtgcaggccctcagcgagttcaaagctatggacagcatctaa

SEQ ID NO: 107 - DNA, 135 bp, Homo sapiens
atggagcggaagagggtcccgacggcctacacatggggcgctgtgggcgccgtggggctggtgtgggccaccgattggcggctgatcctggactgggtaccttacatcaatggcaagtttaagaaggataattaa

SEQ ID NO: 108 - DNA, 990 bp, Homo sapiens
atgtcggagcgggccgcggatgacgtcaggggggagccgcgccgcgcggcggcggcggcgggcggagcagcggccgcggccgcccggcagcagcagcagcagcagcagcagcagcagccgccgcctccgcagccccagcggcagcagcacccgccaccgccgccacggcgcacacggccggaggacggcgggcccggcgccgcctccacctcggccgccgcaatggcgacggtcggggagcgcaggcctctgcccagtcctgaagtgatgctgggacagtcgtggaatctgtgggttgaggcttccaaacttcctgggaaggacgggacagaattggacgaaagtttcaaggagtttgggaaaaaccgcgaagtcatggggctctgtcgggaagacgaagttatacggaagcgtctcctcattgatggagatggtgctggagatgatcggagaattaatctgctagtgaagagtttcattaaatggtgcaactctgggtcccaggaagagggatatagccagtaccaacgtatgctgagcacgctgtctcaatgtgaattttcaatgggcaaaactttactagtatatgatatgaatctcagagaaatggaaaattatgaaaaaatttacaaggaaatagaatgtagcatagctggagcacatgaaaaaattgctgagtgcaaaaagcaaattcttcaagcaaaacgaatacgaaaaaatcgccaagaatatgatgctttggcaaaagtgattcagcaccatccagacaggcatgagacattaaaggaactagaggctctgggaaaagaattagagcatctttcacacattaaagaaagtgttgaagataagctggaattgagacggaaacagtttcatgttcttcttagtaccatccatgaacttcagcaaacattggaaaatgatgaaaaactctcagaggtagaagaagctcaggaagcaagcatggaaacagatcctaagccatag

SEQ ID NO: 109 - DNA, 369 bp, Homo sapiens
atgttttcagtaaggatagtgactgcagactactacatggccagcccgctgcaggggctggatacctgccaatcccccctcacccaggcccctgtcaagaaggtgccggtggtgcgagtcttcggagcgaccccggcaggaagtttactggatttcttaaaagatggagaaggaagagctctgaaattaccaaatcttgtggacatggcagcacaggtggctgcaggaatggcttacatcgagcgcatgaattatatccatagagatctgcgatcagcaaacattctagtggggaatggactcatatgcaagattgctgacttcggattggcccgattgatagaagacaatgagtacacagcaagacaa

SEQ ID NO: 110 - DNA, 480 bp, Homo sapiens
atgttttcagtaaggatagtgactgcagactactacatggccagcccgctgcaggggctggatacctgccaatcccccctcacccaggcccctgtcaagaaggtgccggtggtgcgagtcttcggagcgaccccggcaggtgcaaagttccccatcaagtggacggcccccgaggcagccctgtacgggaggttcacaatcaagtctgacgtgtggtcttttggaatcttactcacagagctggtcaccaaaggaagagtgccatacccaggcatgaacaaccgggaggtgctggagcaggtggagcgaggctacaggatgccctgcccgcaggactgccccatctctctgcatgagctcatgatccactgctggaaaaaggaccctgaagaacgccccacttttgagtacttgcagagcttcctggaagactactttaccgcgacagagccccagtaccaacctggtgaaaacctgtaa

SEQ ID NO: 111 - DNA, 348 bp, Homo sapiens
atgttttcagtaaggatagtgactgcagactactacatggccagcccgctgcaggggctggatacctgccaatcccccctcacccaggcccctgtcaagaaggtgccggtggtgcgagtcttcggagcgaccccggcaggcatgaacaaccgggaggtgctggagcaggtggagcgaggctacaggatgccctgcccgcaggactgccccatctctctgcatgagctcatgatccactgctggaaaaaggaccctgaagaacgccccacttttgagtacttgcagagcttcctggaagactactttaccgcgacagagccccagtaccaacctggtgaaaacctgtaa

SEQ ID NO: 112 - DNA, 1614 bp, Homo sapiens
atgggctgtgtgcaatgtaaggataaagaagcaacaaaactgacggaggagagggacggcagcctgaaccagagctctgggtaccgctatggcacagaccccacccctcagcactaccccagcttcggtgtgacctccatccccaactacaacaacttccacgcagccgggggccaaggactcaccgtctttggaggtgtgaactcttcgtctcatacggggaccttgcgtacgagaggaggaacaggagtgacactctttgtggccctttatgactatgaagcacggacagaagatgacctgagttttcacaaaggagaaaaatttcaaatattgaacagctcggaaggagattggtgggaagcccgctccttgacaactggagagacaggttacattcccagcaattatgtggctccagttgactctatccaggcagaagagtggtactttggaaaacttggccgaaaagatgctgagcgacagctattgtcctttggaaacccaagaggtacctttcttatccgcgagagtgaaaccaccaaaggtgcctattcactttctatccgtgattgggatgatatgaaaggagaccatgtcaaacattataaaattcgcaaacttgacaatggtggatactacattaccacccgggcccagtttgaaacacttcagcagcttgtacaacattactcagagagagctgcaggtctctgctgccgcctagtagttccctgtcacaaagggatgccaaggcttaccgatctgtctgtcaaaaccaaagatgtctgggaaatccctcgagaatccctgcagttgatcaagagactgggaaatgggcagtttggggaagtatggatgggtacctggaatggaaacacaaaagtagccataaagactcttaaaccaggcacaatgtcccccgaatcattccttgaggaagcgcagatcatgaagaagctgaagcacgacaagctggtccagctctatgcagtggtgtctgaggagcccatctacatcgtcaccgagtatatgaacaaaggaagtttactggatttcttaaaagatggagaaggaagagctctgaaattaccaaatcttgtggacatggcagcacaggtggctgcaggaatggcttacatcgagcgcatgaattatatccatagagatctgcgatcagcaaacattctagtggggaatggactcatatgcaagattgctgacttcggattggcccgattgatagaagacaatgagtacacagcaagacaaggtgcaaagttccccatcaagtggacggcccccgaggcagccctgtacgggaggttcacaatcaagtctgacgtgtggtcttttggaatcttactcacagagctggtcaccaaaggaagagtgccatacccaggcatgaacaaccgggaggtgctggagcaggtggagcgaggctacaggatgccctgcccgcaggactgccccatctctctgcatgagctcatgatccactgctggaaaaaggaccctgaagaacgccccacttttgagtacttgcagagcttcctggaagactactttaccgcgacagagccccagtaccaacctggtgaaaacctgtaa

SEQ ID NO: 113 - DNA, 1449 bp, Homo sapiens
atgggctgtgtgcaatgtaaggataaagaagcaacaaaactgacggaggagagggacggcagcctgaaccagagctctgggtaccgctatggcacagaccccacccctcagcactaccccagcttcggtgtgacctccatccccaactacaacaacttccacgcagccgggggccaaggactcaccgtctttggaggtgtgaactcttcgtctcatacggggaccttgcgtacgagaggaggaacaggagtgacactctttgtggccctttatgactatgaagcacggacagaagatgacctgagttttcacaaaggagaaaaatttcaaatattgaacagctcggaaggagattggtgggaagcccgctccttgacaactggagagacaggttacattcccagcaattatgtggctccagttgactctatccaggcagaagagtggtactttggaaaacttggccgaaaagatgctgagcgacagctattgtcctttggaaacccaagaggtacctttcttatccgcgagagtgaaaccaccaaaggtgcctattcactttctatccgtgattgggatgatatgaaaggagaccatgtcaaacattataaaattcgcaaacttgacaatggtggatactacattaccacccgggcccagtttgaaacacttcagcagcttgtacaacattactcaggtacctggaatggaaacacaaaagtagccataaagactcttaaaccaggcacaatgtcccccgaatcattccttgaggaagcgcagatcatgaagaagctgaagcacgacaagctggtccagctctatgcagtggtgtctgaggagcccatctacatcgtcaccgagtatatgaacaaaggaagtttactggatttcttaaaagatggagaaggaagagctctgaaattaccaaatcttgtggacatggcagcacaggtggctgcaggaatggcttacatcgagcgcatgaattatatccatagagatctgcgatcagcaaacattctagtggggaatggactcatatgcaagattgctgacttcggattggcccgattgatagaagacaatgagtacacagcaagacaaggtgcaaagttccccatcaagtggacggcccccgaggcagccctgtacgggaggttcacaatcaagtctgacgtgtggtcttttggaatcttactcacagagctggtcaccaaaggaagagtgccatacccaggcatgaacaaccgggaggtgctggagcaggtggagcgaggctacaggatgccctgcccgcaggactgccccatctctctgcatgagctcatgatccactgctggaaaaaggaccctgaagaacgccccacttttgagtacttgcagagcttcctggaagactactttaccgcgacagagccccagtaccaacctggtgaaaacctgtaa

SEQ ID NO: 114 - DNA, 711 bp, Homo sapiens
atgttttcagtaaggatagtgactgcagactactacatggccagcccgctgcaggggctggatacctgccaatcccccctcacccaggcccctgtcaagaaggtgccggtggtgcgagtcttcggagcgaccccggcaggaagtttactggatttcttaaaagatggagaaggaagagctctgaaattaccaaatcttgtggacatggcagcacaggtggctgcaggaatggcttacatcgagcgcatgaattatatccatagagatctgcgatcagcaaacattctagtggggaatggactcatatgcaagattgctgacttcggattggcccgattgatagaagacaatgagtacacagcaagacaaggtgcaaagttccccatcaagtggacggcccccgaggcagccctgtacgggaggttcacaatcaagtctgacgtgtggtcttttggaatcttactcacagagctggtcaccaaaggaagagtgccatacccaggcatgaacaaccgggaggtgctggagcaggtggagcgaggctacaggatgccctgcccgcaggactgccccatctctctgcatgagctcatgatccactgctggaaaaaggaccctgaagaacgccccacttttgagtacttgcagagcttcctggaagactactttaccgcgacagagccccagtaccaacctggtgaaaacctgtaa

SEQ ID NO: 115 - DNA, 1605 bp, Homo sapiens
atgggctgtgtgcaatgtaaggataaagaagcaacaaaactgacggaggagagggacggcagcctgaaccagagctctgggtaccgctatggcacagaccccacccctcagcactaccccagcttcggtgtgacctccatccccaactacaacaacttccacgcagccgggggccaaggactcaccgtctttggaggtgtgaactcttcgtctcatacggggaccttgcgtacgagaggaggaacaggagtgacactctttgtggccctttatgactatgaagcacggacagaagatgacctgagttttcacaaaggagaaaaatttcaaatattgaacagctcggaaggagattggtgggaagcccgctccttgacaactggagagacaggttacattcccagcaattatgtggctccagttgactctatccaggcagaagagtggtactttggaaaacttggccgaaaagatgctgagcgacagctattgtcctttggaaacccaagaggtacctttcttatccgcgagagtgaaaccaccaaaggtgcctattcactttctatccgtgattgggatgatatgaaaggagaccatgtcaaacattataaaattcgcaaacttgacaatggtggatactacattaccacccgggcccagtttgaaacacttcagcagcttgtacaacattactcagagaaagctgatggtttgtgttttaacttaactgtgattgcatcgagttgtaccccacaaacttctggattggctaaagatgcttgggaagttgcacgtcgttcgttgtgtctggagaagaagctgggtcaggggtgtttcgctgaagtgtggcttggtacctggaatggaaacacaaaagtagccataaagactcttaaaccaggcacaatgtcccccgaatcattccttgaggaagcgcagatcatgaagaagctgaagcacgacaagctggtccagctctatgcagtggtgtctgaggagcccatctacatcgtcaccgagtatatgaacaaaggaagtttactggatttcttaaaagatggagaaggaagagctctgaaattaccaaatcttgtggacatggcagcacaggtggctgcaggaatggcttacatcgagcgcatgaattatatccatagagatctgcgatcagcaaacattctagtggggaatggactcatatgcaagattgctgacttcggattggcccgattgatagaagacaatgagtacacagcaagacaaggtgcaaagttccccatcaagtggacggcccccgaggcagccctgtacgggaggttcacaatcaagtctgacgtgtggtcttttggaatcttactcacagagctggtcaccaaaggaagagtgccatacccaggcatgaacaaccgggaggtgctggagcaggtggagcgaggctacaggatgccctgcccgcaggactgccccatctctctgcatgagctcatgatccactgctggaaaaaggaccctgaagaacgccccacttttgagtacttgcagagcttcctggaagactactttaccgcgacagagccccagtaccaacctggtgaaaacctgtaa

SEQ ID NO: 116 - DNA, 2136 bp, Homo sapiens
atgacgatcagtgacgagtgggatattccagagaaacagcctttcaaagacctggggaacttacgttactggcttgaagaggcagaatgcagagatcagtacagtgtgatttttgagagtggagaccgcacttccatattctggaatgacgtaaaagaccctgtctcaattgaagaaagagcgagatggacagagacgtatgtgcgttggtctcctaagggcacctacctggctacctttcatcaaagaggcattgctctatgggggggagagaaattcaagcaaattcagagattcagccaccaaggggttcagcttattgacttctcaccttgtgaaaggtacctggtgacctttagccccctgatggacacgcaggatgaccctcaggccataatcatctgggacatccttacggggcacaagaagaggggttttcactgtgagagctcagcccattggcctatttttaagtggagccatgatggcaaattctttgccagaatgaccctggatacgcttagcatctatgaaactccttctatgggtcttttggacaagaagagtttgaagatctctgggataaaagacttttcttggtctcctggtggtaacataatcgccttctgggtgcctgaagacaaagatattccagccagggtaaccctgatgcagctccctaccaggcaagagatccgagtgaggaacctgttcaatgtggtggactgcaagctccattggcagaagaacggagactacttgtgtgtgaaagtagataggactccgaaaggcacccagggtgttgtcacaaattttgaaattttccgaatgagggagaaacaggtacctgtggatgtggtcgagatgaaagaaaccatcatagcctttgcctgggaaccaaatggaagtaagtttgctgtgctgcacggagaggctccgcggatatctgtgtctttctaccacgtcaaaaacaacgggaagattgaactcatcaagatgttcgacaagcagcaggcgaacaccatcttctggagcccccaaggacagttcgtggtgttggcgggcctgaggagtatgaacggtgccttagcgtttgtggacacttcggactgcacggtcatgaacatcgcagagcactacatggcttccgacgtcgaatgggatcctactgggcgctacgtcgtcacctctgtgtcctggtggagccataaggtggacaacgcgtactggctgtggactttccagggacgcctcctgcagaagaacaacaaggaccgcttctgccagctgctgtggcggccccggcctcccacactcctgagccaggaacagatcaaggctcagctgtcgcaggccctggaggagctgggaggccagaaacaaagagcagacatgctggagatggagctgaagatgctgaagtctcagtccagctctgccgaacagagcttcctgttctccagggaggaggcggacacgctcaggttgaaggtcgaggagctggaaggcgagcggagtcggctggaggaggaaaagaggatgctggaggcacagctggagcggcgagctctgcagggtgactatgaccagagcaggaccaaagtgctgcacatgagcctgaaccccaccagtgtggccaggcagcgcctgcgcgaggaccacagccagctgcaggcggagtgcgagcgactgcgcgggctcctgcgcgccatggagagaggaggcaccgtcccagccgaccttgaggctgccgccgcgagtctgccatcgtccaaggaggtggcagagctgaagaagcaggtggagagtgccgagctgaagaaccagcggctcaaggaggttttccagaccaagatccaggagttccgcaaggcctgctacacgctcaccggctaccagatcgacatcaccacggagaaccagtaccggctgacctcgctgtacgccgagcacccaggcgactgcctcatcttcaaggccaccagcccctcgggttccaagatgcagctactggagacagagttctcacacaccgtgggcgagctcatcgaggtgcacctgcggcgccaggacagcatccctgccttcctcagctcgctcaccctcgagctcttcagccgccagaccgtggcgtag

SEQ ID NO: 117 - DNA, 2016 bp, Homo sapiens
atgacgatcagtgacgagtgggatattccagagaaacagcctttcaaagacctggggaacttacgttactggcttgaagaggcagaatgcagagatcagtacagtgtgatttttgagagtggagaccgcacttccatattctggaatgacgtaaaagaccctgtctcaattgaagaaagagcgagatggacagagacgtatgtgcgttggtctcctaagggcacctacctggctacctttcatcaaagaggcattgctctatgggggggagagaaattcaagcaaattcagagattcagccaccaaggggttcagcttattgacttctcaccttgtgaaaggtacctggtgacctttagccccctgatggacacgcaggatgaccctcaggccataatcatctgggacatccttacggggcacaagaagaggggttttcactgtgagagctcagcccattggcctatttttaagtggagccatgatggcaaattctttgccagaatgaccctggatacgcttagcatctatgaaactccttctatgggtcttttggacaagaagagtttgaagatctctgggataaaagacttttcttggtctcctggtggtaacataatcgccttctgggtgcctgaagacaaagatattccagccagggtaaccctgatgcagctccctaccaggcaagagatccgagtgaggaacctgttcaatgtggtggactgcaagctccattggcagaagaacggagactacttgtgtgtgaaagtagataggactccgaaaggcacccagggtgttgtcacaaattttgaaattttccgaatgagggagaaacaggtacctgtggatgtggtcgagatgaaagaaaccatcatagcctttgcctgggaaccaaatggaagtaagtttgctgtgctgcacggagaggctccgcggatatctgtgtctttctaccacgtcaaaaacaacgggaagattgaactcatcaagatgttcgacaagcagcaggcgaacaccatcttctggagcccccaaggacagttcgtggtgttggcgggcctgaggagtatgaacggtgccttagcgtttgtggacacttcggactgcacggtcatgaacatcgcagagcactacatggcttccgacgtcgaatgggatcctactgggcgctacgtcgtcacctctgtgtcctggtggagccataaggtggacaacgcgtactggctgtggactttccagggacgcctcctgcagaagaacaacaaggaccgcttctgccagctgctgtggcggccccggcctcccacactcctgagccaggaacagatcaaggctcagctgtcgcaggccctggaggagctgggaggccagaaacaaagagcagacatgctggagatggagctgaagatgctgaagtctcagtccagctctgccgaacagagcttcctgttctccagggaggaggcggacacgctcaggttgaaggtcgaggagctggaaggcgagcggagtcggctggaggaggaaaagaggatgctggaggcacagctggagcggcgagctctgcagggtgactatgaccagagcaggaccaaagtgctgcacatgagcctgaaccccaccagtgtggccaggcagcgcctgcgcgaggaccacagccagctgcaggcggagtgcgagcgactgcgcgggctcctgcgcgccatggagagaggaggcaccgtcccagccgaccttgaggctgccgccgcgagtctgccatcgtccaaggaggtggcagagctgaagaagcaggtggagagtgccgagctgaagaaccagcggctcaaggaggttttccagaccaagatccaggagttccgcaaggcctgctacacgctcaccggctaccagatcgacatcaccacggagaaccagtaccggctgacctcgctgtacgccgagcacccaggcgactgcctcatcttcaaggaagccgcactcagccacaagctgtgcggaaagctatag

SEQ ID NO: 118 - DNA, 1788 bp, Homo sapiens
atgacgatcagtgacgagtgggatattccagagaaacagcctttcaaagacctggggaacttacgttactggcttgaagaggcagaatgcagagatcagtacagtgtgatttttgagagtggagaccgcacttccatattctggaatgacgtaaaagaccctgtctcaattgaagaaagagcgagatggacagagacgtatgtgcgttggtctcctaagggcacctacctggctacctttcatcaaagaggcattgctctatgggggggagagaaattcaagcaaattcagagattcagccaccaaggggttcagcttattgacttctcaccttgtgaaaggtacctggtgacctttagccccctgatggacacgcaggatgaccctcaggccataatcatctgggacatccttacggggcacaagaagaggggttttcactgtgagagctcagcccattggcctatttttaagtggagccatgatggcaaattctttgccagaatgaccctggatacgcttagcatctatgaaactccttctatgggtcttttggacaagaagagtttgaagatctctgggataaaagacttttcttggtctcctggtggtaacataatcgccttctgggtgcctgaagacaaagatattccagccagggtaaccctgatgcagctccctaccaggcaagagatccgagtgaggaacctgttcaatgtggtggactgcaagctccattggcagaagaacggagactacttgtgtgtgaaagtagataggactccgaaaggcacccagggtgttgtcacaaattttgaaattttccgaatgagggagaaacaggtacctgtggatgtggtcgagatgaaagaaaccatcatagcctttgcctgggaaccaaatggaagtaagtttgctgtgctgcacggagaggctccgcggatatctgtgtctttctaccacgtcaaaaacaacgggaagattgaactcatcaagatgttcgacaagcagcaggcgaacaccatcttctggagcccccaaggacagttcgtggtgttggcgggcctgaggagtatgaacggtgccttagcgtttgtggacacttcggactgcacggtcatgaacatcgcagagcactacatggcttccgacgtcgaatgggatcctactgggcgctacgtcgtcacctctgtgtcctggtggagccataaggtggacaacgcgtactggctgtggactttccagggacgcctcctgcagaagaacaacaaggaccgcttctgccagctgctgtggcggccccggcctcccacactcctgagccaggaacagatcaagcaaattaaaaaggatctgaagaaatactctaagatctttgaacagaaggatcgtttgagtcagtccaaagcctcaaaggaattggtggagagaaggcgcaccatgatggaagatttccggaagtaccggaaaatggcccaggagctctatatggagcagaaaaacgagcgcctggagttgcgaggaggggtggacactgacgagctggacagcaacgtggacgactgggaagaggagaccattgagttcttcgtcactgaagaaatcattcccctcgggaatcaggagtgagccaccagcccctcgggttccaagatgcagctactggagacagagttctcacacaccgtgggcgagctcatcgaggtgcacctgcggcgccaggacagcatccctgccttcctcagctcgctcaccctcgagctcttcagccgccagaccgtggcgtag

SEQ ID NO: 119 - DNA, 1779 bp, Homo sapiens
atgacgatcagtgacgagtgggatattccagagaaacagcctttcaaagacctggggaacttacgttactggcttgaagaggcagaatgcagagatcagtacagtgtgatttttgagagtggagaccgcacttccatattctggaatgacgtaaaagaccctgtctcaattgaagaaagagcgagatggacagagacgtatgtgcgttggtctcctaagggcacctacctggctacctttcatcaaagaggcattgctctatgggggggagagaaattcaagcaaattcagagattcagccaccaaggggttcagcttattgacttctcaccttgtgaaaggtacctggtgacctttagccccctgatggacacgcaggatgaccctcaggccataatcatctgggacatccttacggggcacaagaagaggggttttcactgtgagagctcagcccattggcctatttttaagtggagccatgatggcaaattctttgccagaatgaccctggatacgcttagcatctatgaaactccttctatgggtcttttggacaagaagagtttgaagatctctgggataaaagacttttcttggtctcctggtggtaacataatcgccttctgggtgcctgaagacaaagatattccagccagggtaaccctgatgcagctccctaccaggcaagagatccgagtgaggaacctgttcaatgtggtggactgcaagctccattggcagaagaacggagactacttgtgtgtgaaagtagataggactccgaaaggcacccagggtgttgtcacaaattttgaaattttccgaatgagggagaaacaggtacctgtggatgtggtcgagatgaaagaaaccatcatagcctttgcctgggaaccaaatggaagtaagtttgctgtgctgcacggagaggctccgcggatatctgtgtctttctaccacgtcaaaaacaacgggaagattgaactcatcaagatgttcgacaagcagcaggcgaacaccatcttctggagcccccaaggacagttcgtggtgttggcgggcctgaggagtatgaacggtgccttagcgtttgtggacacttcggactgcacggtcatgaacatcgcagagcactacatggcttccgacgtcgaatgggatcctactgggcgctacgtcgtcacctctgtgtcctggtggagccataaggtggacaacgcgtactggctgtggactttccagggacgcctcctgcagaagaacaacaaggaccgcttctgccagctgctgtggcggccccggcctcccacactcctgagccaggaacagatcaagggtgactatgaccagagcaggaccaaagtgctgcacatgagcctgaaccccaccagtgtggccaggcagcgcctgcgcgaggaccacagccagctgcaggcggagtgcgagcgactgcgcgggctcctgcgcgccatggagagaggaggcaccgtcccagccgaccttgaggctgccgccgcgagtctgccatcgtccaaggaggtggcagagctgaagaagcaggtggagagtgccgagctgaagaaccagcggctcaaggaggttttccagaccaagatccaggagttccgcaaggcctgctacacgctcaccggctaccagatcgacatcaccacggagaaccagtaccggctgacctcgctgtacgccgagcacccaggcgactgcctcatcttcaaggaagccgcactcagccacaagctgtgcggaaagctatag

SEQ ID NO: 120 - DNA, 2604 bp, Homo sapiens
atgcaggacgcggagaacgtggcggtgcccgaggcggccgaggagcgcgccgagcccggccagcagcagccggccgccgagccgccgccagccgaggggctgctgcggcccgcggggcccggcgctccggaggccgcggggaccgaggcctccagtgaggaggtggggatcgcggaggccgggccggagtccgaggtgaggaccgagccggcggccgaggcagaggcggcctccggcccgtccgagtcgccctcgccgccggccgccgaggagctgcccgggtcgcatgctgagccccctgtcccggcacagggcgaggccccaggagagcaggctcgggacgagcgctccgacagccgggcccaggcggtgtccgaggacgcgggaggaaacgagggcagagcggccgaggccgaaccccgggcgctggagaacggcgacgcggacgagccctccttcagcgaccccgaggacttcgtggacgacgtgagcgaggaagaattactgggagatgtactcaaagatcggccccaggaagcagatggaatcgattcggtgattgtagtggacaatgtccctcaggtgggacccgaccgacttgagaaactcaaaaatgtcatccacaagatcttttccaagtttgggaaaatcacaaatgatttttatcctgaagaggatgggaagacaaaagggtatattttcctggagtacgcgtcccctgcccacgctgtggatgctgtgaagaacgccgacggctacaagcttgacaagcagcacacattccgggtcaacctctttacggattttgacaagtatatgacgatcagtgacgagtgggatattccagagaaacagcctttcaaagacctggggaacttacgttactggcttgaagaggcagaatgcagagatcagtacagtgtgatttttgagagtggagaccgcacttccatattctggaatgacgtaaaagaccctgtctcaattgaagaaagagcgagatggacagagacgtatgtgcgttggtctcctaagggcacctacctggctacctttcatcaaagaggcattgctctatgggggggagagaaattcaagcaaattcagagattcagccaccaaggggttcagcttattgacttctcaccttgtgaaaggtacctggtgacctttagccccctgatggacacgcaggatgaccctcaggccataatcatctgggacatccttacggggcacaagaagaggggttttcactgtgagagctcagcccattggcctatttttaagtggagccatgatggcaaattctttgccagaatgaccctggatacgcttagcatctatgaaactccttctatgggtcttttggacaagaagagtttgaagatctctgggataaaagacttttcttggtctcctggtggtaacataatcgccttctgggtgcctgaagacaaagatattccagccagggtaaccctgatgcagctccctaccaggcaagagatccgagtgaggaacctgttcaatgtggtggactgcaagctccattggcagaagaacggagactacttgtgtgtgaaagtagataggactccgaaaggcacccagggtgttgtcacaaattttgaaattttccgaatgagggagaaacaggtacctgtggatgtggtcgagatgaaagaaaccatcatagcctttgcctgggaaccaaatggaagtaagtttgctgtgctgcacggagaggctccgcggatatctgtgtctttctaccacgtcaaaaacaacgggaagattgaactcatcaagatgttcgacaagcagcaggcgaacaccatcttctggagcccccaaggacagttcgtggtgttggcgggcctgaggagtatgaacggtgccttagcgtttgtggacacttcggactgcacggtcatgaacatcgcagagcactacatggcttccgacgtcgaatgggatcctactgggcgctacgtcgtcacctctgtgtcctggtggagccataaggtggacaacgcgtactggctgtggactttccagggacgcctcctgcagaagaacaacaaggaccgcttctgccagctgctgtggcggccccggcctcccacactcctgagccaggaacagatcaagcaaattaaaaaggatctgaagaaatactctaagatctttgaacagaaggatcgtttgagtcagtccaaagcctcaaaggaattggtggagagaaggcgcaccatgatggaagatttccggaagtaccggaaaatggcccaggagctctatatggagcagaaaaacgagcgcctggagttgcgaggaggggtggacactgacgagctggacagcaacgtggacgactgggaagaggagaccattgagttcttcgtcactgaagaaatcattcccctcgggaatcaggagtgagccaccagcccctcgggttccaagatgcagctactggagacagagttctcacacaccgtgggcgagctcatcgaggtgcacctgcggcgccaggacagcatccctgccttcctcagctcgctcaccctcgagctcttcagccgccagaccgtggcgtag

SEQ ID NO: 121 - DNA, 2865 bp, Homo sapiens
atgcaggacgcggagaacgtggcggtgcccgaggcggccgaggagcgcgccgagcccggccagcagcagccggccgccgagccgccgccagccgaggggctgctgcggcccgcggggcccggcgctccggaggccgcggggaccgaggcctccagtgaggaggtggggatcgcggaggccgggccggagtccgaggtgaggaccgagccggcggccgaggcagaggcggcctccggcccgtccgagtcgccctcgccgccggccgccgaggagctgcccgggtcgcatgctgagccccctgtcccggcacagggcgaggccccaggagagcaggctcgggacgagcgctccgacagccgggcccaggcggtgtccgaggacgcgggaggaaacgagggcagagcggccgaggccgaaccccgggcgctggagaacggcgacgcggacgagccctccttcagcgaccccgaggacttcgtggacgacgtgagcgaggaagaattactgggagatgtactcaaagatcggccccaggaagcagatggaatcgattcggtgattgtagtggacaatgtccctcaggtgggacccgaccgacttgagaaactcaaaaatgtcatccacaagatcttttccaagtttgggaaaatcacaaatgatttttatcctgaagaggatgggaagacaaaagggtatattttcctggagtacgcgtcccctgcccacgctgtggatgctgtgaagaacgccgacggctacaagcttgacaagcagcacacattccgggtcaacctctttacggattttgacaagtatatgacgatcagtgacgagtgggatattccagagaaacagcctttcaaagacctggggaacttacgttactggcttgaagaggcagaatgcagagatcagtacagtgtgatttttgagagtggagaccgcacttccatattctggaatgacgtaaaagaccctgtctcaattgaagaaagagcgagatggacagagacgtatgtgcgttggtctcctaagggcacctacctggctacctttcatcaaagaggcattgctctatgggggggagagaaattcaagcaaattcagagattcagccaccaaggggttcagcttattgacttctcaccttgtgaaaggtacctggtgacctttagccccctgatggacacgcaggatgaccctcaggccataatcatctgggacatccttacggggcacaagaagaggggttttcactgtgagagctcagcccattggcctatttttaagtggagccatgatggcaaattctttgccagaatgaccctggatacgcttagcatctatgaaactccttctatgggtcttttggacaagaagagtttgaagatctctgggataaaagacttttcttggtctcctggtggtaacataatcgccttctgggtgcctgaagacaaagatattccagccagggtaaccctgatgcagctccctaccaggcaagagatccgagtgaggaacctgttcaatgtggtggactgcaagctccattggcagaagaacggagactacttgtgtgtgaaagtagataggactccgaaaggcacccagggtgttgtcacaaattttgaaattttccgaatgagggagaaacaggtacctgtggatgtggtcgagatgaaagaaaccatcatagcctttgcctgggaaccaaatggaagtaagtttgctgtgctgcacggagaggctccgcggatatctgtgtctttctaccacgtcaaaaacaacgggaagattgaactcatcaagatgttcgacaagcagcaggcgaacaccatcttctggagcccccaaggacagttcgtggtgttggcgggcctgaggagtatgaacggtgccttagcgtttgtggacacttcggactgcacggtcatgaacatcgcagagcactacatggcttccgacgtcgaatgggatcctactgggcgctacgtcgtcacctctgtgtcctggtggagccataaggtggacaacgcgtactggctgtggactttccagggacgcctcctgcagaagaacaacaaggaccgcttctgccagctgctgtggcggccccggcctcccacactcctgagccaggaacagatcaaggctcagctgtcgcaggccctggaggagctgggaggccagaaacaaagagcagacatgctggagatggagctgaagatgctgaagtctcagtccagctctgccgaacagagcttcctgttctccagggaggaggcggacacgctcaggttgaaggtcgaggagctggaaggcgagcggagtcggctggaggaggaaaagaggatgctggaggcacagctggagcggcgagctctgcagggtgactatgaccagagcaggaccaaagtgctgcacatgagcctgaaccccaccagtgtggccaggcagcgcctgcgcgaggaccacagccagctgcaggcggagtgcgagcgactgcgcgggctcctgcgcgccatggagagaggaggcaccgtcccagccgaccttgaggctgccgccgcgagtctgccatcgtccaaggaggtggcagagctgaagaagcaggtggagagtgccgagctgaagaaccagcggctcaaggaggttttccagaccaagatccaggagttccgcaaggcctgctacacgctcaccggctaccagatcgacatcaccacggagaaccagtaccggctgacctcgctgtacgccgagcacccaggcgactgcctcatcttcaaggtgggtcctgcgtgtgacggctctccggctgtctcgctctctgtctcctcctgtggggagatccgaccgtag

SEQ ID NO: 122 - DNA, 2952 bp, Homo sapiens
atgcaggacgcggagaacgtggcggtgcccgaggcggccgaggagcgcgccgagcccggccagcagcagccggccgccgagccgccgccagccgaggggctgctgcggcccgcggggcccggcgctccggaggccgcggggaccgaggcctccagtgaggaggtggggatcgcggaggccgggccggagtccgaggtgaggaccgagccggcggccgaggcagaggcggcctccggcccgtccgagtcgccctcgccgccggccgccgaggagctgcccgggtcgcatgctgagccccctgtcccggcacagggcgaggccccaggagagcaggctcgggacgagcgctccgacagccgggcccaggcggtgtccgaggacgcgggaggaaacgagggcagagcggccgaggccgaaccccgggcgctggagaacggcgacgcggacgagccctccttcagcgaccccgaggacttcgtggacgacgtgagcgaggaagaattactgggagatgtactcaaagatcggccccaggaagcagatggaatcgattcggtgattgtagtggacaatgtccctcaggtgggacccgaccgacttgagaaactcaaaaatgtcatccacaagatcttttccaagtttgggaaaatcacaaatgatttttatcctgaagaggatgggaagacaaaagggtatattttcctggagtacgcgtcccctgcccacgctgtggatgctgtgaagaacgccgacggctacaagcttgacaagcagcacacattccgggtcaacctctttacggattttgacaagtatatgacgatcagtgacgagtgggatattccagagaaacagcctttcaaagacctggggaacttacgttactggcttgaagaggcagaatgcagagatcagtacagtgtgatttttgagagtggagaccgcacttccatattctggaatgacgtaaaagaccctgtctcaattgaagaaagagcgagatggacagagacgtatgtgcgttggtctcctaagggcacctacctggctacctttcatcaaagaggcattgctctatgggggggagagaaattcaagcaaattcagagattcagccaccaaggggttcagcttattgacttctcaccttgtgaaaggtacctggtgacctttagccccctgatggacacgcaggatgaccctcaggccataatcatctgggacatccttacggggcacaagaagaggggttttcactgtgagagctcagcccattggcctatttttaagtggagccatgatggcaaattctttgccagaatgaccctggatacgcttagcatctatgaaactccttctatgggtcttttggacaagaagagtttgaagatctctgggataaaagacttttcttggtctcctggtggtaacataatcgccttctgggtgcctgaagacaaagatattccagccagggtaaccctgatgcagctccctaccaggcaagagatccgagtgaggaacctgttcaatgtggtggactgcaagctccattggcagaagaacggagactacttgtgtgtgaaagtagataggactccgaaaggcacccagggtgttgtcacaaattttgaaattttccgaatgagggagaaacaggtacctgtggatgtggtcgagatgaaagaaaccatcatagcctttgcctgggaaccaaatggaagtaagtttgctgtgctgcacggagaggctccgcggatatctgtgtctttctaccacgtcaaaaacaacgggaagattgaactcatcaagatgttcgacaagcagcaggcgaacaccatcttctggagcccccaaggacagttcgtggtgttggcgggcctgaggagtatgaacggtgccttagcgtttgtggacacttcggactgcacggtcatgaacatcgcagagcactacatggcttccgacgtcgaatgggatcctactgggcgctacgtcgtcacctctgtgtcctggtggagccataaggtggacaacgcgtactggctgtggactttccagggacgcctcctgcagaagaacaacaaggaccgcttctgccagctgctgtggcggccccggcctcccacactcctgagccaggaacagatcaaggctcagctgtcgcaggccctggaggagctgggaggccagaaacaaagagcagacatgctggagatggagctgaagatgctgaagtctcagtccagctctgccgaacagagcttcctgttctccagggaggaggcggacacgctcaggttgaaggtcgaggagctggaaggcgagcggagtcggctggaggaggaaaagaggatgctggaggcacagctggagcggcgagctctgcagggtgactatgaccagagcaggaccaaagtgctgcacatgagcctgaaccccaccagtgtggccaggcagcgcctgcgcgaggaccacagccagctgcaggcggagtgcgagcgactgcgcgggctcctgcgcgccatggagagaggaggcaccgtcccagccgaccttgaggctgccgccgcgagtctgccatcgtccaaggaggtggcagagctgaagaagcaggtggagagtgccgagctgaagaaccagcggctcaaggaggttttccagaccaagatccaggagttccgcaaggcctgctacacgctcaccggctaccagatcgacatcaccacggagaaccagtaccggctgacctcgctgtacgccgagcacccaggcgactgcctcatcttcaaggccaccagcccctcgggttccaagatgcagctactggagacagagttctcacacaccgtgggcgagctcatcgaggtgcacctgcggcgccaggacagcatccctgccttcctcagctcgctcaccctcgagctcttcagccgccagaccgtggcgtag

SEQ ID NO: 123 - DNA, 2832 bp, Homo sapiens
atgcaggacgcggagaacgtggcggtgcccgaggcggccgaggagcgcgccgagcccggccagcagcagccggccgccgagccgccgccagccgaggggctgctgcggcccgcggggcccggcgctccggaggccgcggggaccgaggcctccagtgaggaggtggggatcgcggaggccgggccggagtccgaggtgaggaccgagccggcggccgaggcagaggcggcctccggcccgtccgagtcgccctcgccgccggccgccgaggagctgcccgggtcgcatgctgagccccctgtcccggcacagggcgaggccccaggagagcaggctcgggacgagcgctccgacagccgggcccaggcggtgtccgaggacgcgggaggaaacgagggcagagcggccgaggccgaaccccgggcgctggagaacggcgacgcggacgagccctccttcagcgaccccgaggacttcgtggacgacgtgagcgaggaagaattactgggagatgtactcaaagatcggccccaggaagcagatggaatcgattcggtgattgtagtggacaatgtccctcaggtgggacccgaccgacttgagaaactcaaaaatgtcatccacaagatcttttccaagtttgggaaaatcacaaatgatttttatcctgaagaggatgggaagacaaaagggtatattttcctggagtacgcgtcccctgcccacgctgtggatgctgtgaagaacgccgacggctacaagcttgacaagcagcacacattccgggtcaacctctttacggattttgacaagtatatgacgatcagtgacgagtgggatattccagagaaacagcctttcaaagacctggggaacttacgttactggcttgaagaggcagaatgcagagatcagtacagtgtgatttttgagagtggagaccgcacttccatattctggaatgacgtaaaagaccctgtctcaattgaagaaagagcgagatggacagagacgtatgtgcgttggtctcctaagggcacctacctggctacctttcatcaaagaggcattgctctatgggggggagagaaattcaagcaaattcagagattcagccaccaaggggttcagcttattgacttctcaccttgtgaaaggtacctggtgacctttagccccctgatggacacgcaggatgaccctcaggccataatcatctgggacatccttacggggcacaagaagaggggttttcactgtgagagctcagcccattggcctatttttaagtggagccatgatggcaaattctttgccagaatgaccctggatacgcttagcatctatgaaactccttctatgggtcttttggacaagaagagtttgaagatctctgggataaaagacttttcttggtctcctggtggtaacataatcgccttctgggtgcctgaagacaaagatattccagccagggtaaccctgatgcagctccctaccaggcaagagatccgagtgaggaacctgttcaatgtggtggactgcaagctccattggcagaagaacggagactacttgtgtgtgaaagtagataggactccgaaaggcacccagggtgttgtcacaaattttgaaattttccgaatgagggagaaacaggtacctgtggatgtggtcgagatgaaagaaaccatcatagcctttgcctgggaaccaaatggaagtaagtttgctgtgctgcacggagaggctccgcggatatctgtgtctttctaccacgtcaaaaacaacgggaagattgaactcatcaagatgttcgacaagcagcaggcgaacaccatcttctggagcccccaaggacagttcgtggtgttggcgggcctgaggagtatgaacggtgccttagcgtttgtggacacttcggactgcacggtcatgaacatcgcagagcactacatggcttccgacgtcgaatgggatcctactgggcgctacgtcgtcacctctgtgtcctggtggagccataaggtggacaacgcgtactggctgtggactttccagggacgcctcctgcagaagaacaacaaggaccgcttctgccagctgctgtggcggccccggcctcccacactcctgagccaggaacagatcaaggctcagctgtcgcaggccctggaggagctgggaggccagaaacaaagagcagacatgctggagatggagctgaagatgctgaagtctcagtccagctctgccgaacagagcttcctgttctccagggaggaggcggacacgctcaggttgaaggtcgaggagctggaaggcgagcggagtcggctggaggaggaaaagaggatgctggaggcacagctggagcggcgagctctgcagggtgactatgaccagagcaggaccaaagtgctgcacatgagcctgaaccccaccagtgtggccaggcagcgcctgcgcgaggaccacagccagctgcaggcggagtgcgagcgactgcgcgggctcctgcgcgccatggagagaggaggcaccgtcccagccgaccttgaggctgccgccgcgagtctgccatcgtccaaggaggtggcagagctgaagaagcaggtggagagtgccgagctgaagaaccagcggctcaaggaggttttccagaccaagatccaggagttccgcaaggcctgctacacgctcaccggctaccagatcgacatcaccacggagaaccagtaccggctgacctcgctgtacgccgagcacccaggcgactgcctcatcttcaaggaagccgcactcagccacaagctgtgcggaaagctatag

SEQ ID NO: 124 - DNA, 2595 bp, Homo sapiens
atgcaggacgcggagaacgtggcggtgcccgaggcggccgaggagcgcgccgagcccggccagcagcagccggccgccgagccgccgccagccgaggggctgctgcggcccgcggggcccggcgctccggaggccgcggggaccgaggcctccagtgaggaggtggggatcgcggaggccgggccggagtccgaggtgaggaccgagccggcggccgaggcagaggcggcctccggcccgtccgagtcgccctcgccgccggccgccgaggagctgcccgggtcgcatgctgagccccctgtcccggcacagggcgaggccccaggagagcaggctcgggacgagcgctccgacagccgggcccaggcggtgtccgaggacgcgggaggaaacgagggcagagcggccgaggccgaaccccgggcgctggagaacggcgacgcggacgagccctccttcagcgaccccgaggacttcgtggacgacgtgagcgaggaagaattactgggagatgtactcaaagatcggccccaggaagcagatggaatcgattcggtgattgtagtggacaatgtccctcaggtgggacccgaccgacttgagaaactcaaaaatgtcatccacaagatcttttccaagtttgggaaaatcacaaatgatttttatcctgaagaggatgggaagacaaaagggtatattttcctggagtacgcgtcccctgcccacgctgtggatgctgtgaagaacgccgacggctacaagcttgacaagcagcacacattccgggtcaacctctttacggattttgacaagtatatgacgatcagtgacgagtgggatattccagagaaacagcctttcaaagacctggggaacttacgttactggcttgaagaggcagaatgcagagatcagtacagtgtgatttttgagagtggagaccgcacttccatattctggaatgacgtaaaagaccctgtctcaattgaagaaagagcgagatggacagagacgtatgtgcgttggtctcctaagggcacctacctggctacctttcatcaaagaggcattgctctatgggggggagagaaattcaagcaaattcagagattcagccaccaaggggttcagcttattgacttctcaccttgtgaaaggtacctggtgacctttagccccctgatggacacgcaggatgaccctcaggccataatcatctgggacatccttacggggcacaagaagaggggttttcactgtgagagctcagcccattggcctatttttaagtggagccatgatggcaaattctttgccagaatgaccctggatacgcttagcatctatgaaactccttctatgggtcttttggacaagaagagtttgaagatctctgggataaaagacttttcttggtctcctggtggtaacataatcgccttctgggtgcctgaagacaaagatattccagccagggtaaccctgatgcagctccctaccaggcaagagatccgagtgaggaacctgttcaatgtggtggactgcaagctccattggcagaagaacggagactacttgtgtgtgaaagtagataggactccgaaaggcacccagggtgttgtcacaaattttgaaattttccgaatgagggagaaacaggtacctgtggatgtggtcgagatgaaagaaaccatcatagcctttgcctgggaaccaaatggaagtaagtttgctgtgctgcacggagaggctccgcggatatctgtgtctttctaccacgtcaaaaacaacgggaagattgaactcatcaagatgttcgacaagcagcaggcgaacaccatcttctggagcccccaaggacagttcgtggtgttggcgggcctgaggagtatgaacggtgccttagcgtttgtggacacttcggactgcacggtcatgaacatcgcagagcactacatggcttccgacgtcgaatgggatcctactgggcgctacgtcgtcacctctgtgtcctggtggagccataaggtggacaacgcgtactggctgtggactttccagggacgcctcctgcagaagaacaacaaggaccgcttctgccagctgctgtggcggccccggcctcccacactcctgagccaggaacagatcaagggtgactatgaccagagcaggaccaaagtgctgcacatgagcctgaaccccaccagtgtggccaggcagcgcctgcgcgaggaccacagccagctgcaggcggagtgcgagcgactgcgcgggctcctgcgcgccatggagagaggaggcaccgtcccagccgaccttgaggctgccgccgcgagtctgccatcgtccaaggaggtggcagagctgaagaagcaggtggagagtgccgagctgaagaaccagcggctcaaggaggttttccagaccaagatccaggagttccgcaaggcctgctacacgctcaccggctaccagatcgacatcaccacggagaaccagtaccggctgacctcgctgtacgccgagcacccaggcgactgcctcatcttcaaggaagccgcactcagccacaagctgtgcggaaagctatag

SEQ ID NO: 125 - DNA, 525 bp, Homo sapiens
atgagcctgaaccccaccagtgtggccaggcagcgcctgcgcgaggaccacagccagctgcaggcggagtgcgagcgactgcgcgggctcctgcgcgccatggagagaggaggcaccgtcccagccgaccttgaggctgccgccgcgagtctgccatcgtccaaggaggtggcagagctgaagaagcaggtggagagtgccgagctgaagaaccagcggctcaaggaggttttccagaccaagatccaggagttccgcaaggcctgctacacgctcaccggctaccagatcgacatcaccacggagaaccagtaccggctgacctcgctgtacgccgagcacccaggcgactgcctcatcttcaaggccaccagcccctcgggttccaagatgcagctactggagacagagttctcacacaccgtgggcgagctcatcgaggtgcacctgcggcgccaggacagcatccctgccttcctcagctcgctcaccctcgagctcttcagccgccagaccgtggcgtag

SEQ ID NO: 126 - DNA, 1497 bp, Homo sapiens
atgacgatcagtgacgagtgggatattccagagaaacagcctttcaaagacctggggaacttacgttactggcttgaagaggcagaatgcagagatcagtacagtgtgatttttgagagtggagaccgcacttccatattctggaatgacgtaaaagaccctgtctcaattgaagaaagagcgagatggacagagacgtatgtgcgttggtctcctaagggcacctacctggctacctttcatcaaagaggcattgctctatgggggggagagaaattcaagcaaattcagagattcagccaccaaggggttcagcttattgacttctcaccttgtgaaaggtacctggtgacctttagccccctgatggacacgcaggatgaccctcaggccataatcatctgggacatccttacggggcacaagaagaggggttttcactgtgagagctcagcccattggcctatttttaagtggagccatgatggcaaattctttgccagaatgaccctggatacgcttagcatctatgaaactccttctatgggtcttttggacaagaagagtttgaagatctctgggataaaagacttttcttggtctcctggtggtaacataatcgccttctgggtgcctgaagacaaagatattccagccagggtaaccctgatgcagctccctaccaggcaagagatccgagtgaggaacctgttcaatgtggtggactgcaagctccattggcagaagaacggagactacttgtgtgtgaaagtagataggactccgaaaggcacccagggtgttgtcacaaattttgaaattttccgaatgagggagaaacaggtacctgtggatgtggtcgagatgaaagaaaccatcatagcctttgcctgggaaccaaatggaagtaagtttgctgtgctgcacggagaggctccgcggatatctgtgtctttctaccacgtcaaaaacaacgggaagattgaactcatcaagatgttcgacaagcagcaggcgaacaccatcttctggagcccccaaggacagttcgtggtgttggcgggcctgaggagtatgaacggtgccttagcgtttgtggacacttcggactgcacggtcatgaacatcgcagagcactacatggcttccgacgtcgaatgggatcctactgggcgctacgtcgtcacctctgtgtcctggtggagccataaggtggacaacgcgtactggctgtggactttccagggacgcctcctgcagaagaacaacaaggaccgcttctgccagctgctgtggcggccccggcctcccacactcctgagccaggaacagatcaaggccaccagcccctcgggttccaagatgcagctactggagacagagttctcacacaccgtgggcgagctcatcgaggtgcacctgcggcgccaggacagcatccctgccttcctcagctcgctcaccctcgagctcttcagccgccagaccgtggcgtag

SEQ ID NO: 127 - DNA, 2313 bp, Homo sapiens
atgcaggacgcggagaacgtggcggtgcccgaggcggccgaggagcgcgccgagcccggccagcagcagccggccgccgagccgccgccagccgaggggctgctgcggcccgcggggcccggcgctccggaggccgcggggaccgaggcctccagtgaggaggtggggatcgcggaggccgggccggagtccgaggtgaggaccgagccggcggccgaggcagaggcggcctccggcccgtccgagtcgccctcgccgccggccgccgaggagctgcccgggtcgcatgctgagccccctgtcccggcacagggcgaggccccaggagagcaggctcgggacgagcgctccgacagccgggcccaggcggtgtccgaggacgcgggaggaaacgagggcagagcggccgaggccgaaccccgggcgctggagaacggcgacgcggacgagccctccttcagcgaccccgaggacttcgtggacgacgtgagcgaggaagaattactgggagatgtactcaaagatcggccccaggaagcagatggaatcgattcggtgattgtagtggacaatgtccctcaggtgggacccgaccgacttgagaaactcaaaaatgtcatccacaagatcttttccaagtttgggaaaatcacaaatgatttttatcctgaagaggatgggaagacaaaagggtatattttcctggagtacgcgtcccctgcccacgctgtggatgctgtgaagaacgccgacggctacaagcttgacaagcagcacacattccgggtcaacctctttacggattttgacaagtatatgacgatcagtgacgagtgggatattccagagaaacagcctttcaaagacctggggaacttacgttactggcttgaagaggcagaatgcagagatcagtacagtgtgatttttgagagtggagaccgcacttccatattctggaatgacgtaaaagaccctgtctcaattgaagaaagagcgagatggacagagacgtatgtgcgttggtctcctaagggcacctacctggctacctttcatcaaagaggcattgctctatgggggggagagaaattcaagcaaattcagagattcagccaccaaggggttcagcttattgacttctcaccttgtgaaaggtacctggtgacctttagccccctgatggacacgcaggatgaccctcaggccataatcatctgggacatccttacggggcacaagaagaggggttttcactgtgagagctcagcccattggcctatttttaagtggagccatgatggcaaattctttgccagaatgaccctggatacgcttagcatctatgaaactccttctatgggtcttttggacaagaagagtttgaagatctctgggataaaagacttttcttggtctcctggtggtaacataatcgccttctgggtgcctgaagacaaagatattccagccagggtaaccctgatgcagctccctaccaggcaagagatccgagtgaggaacctgttcaatgtggtggactgcaagctccattggcagaagaacggagactacttgtgtgtgaaagtagataggactccgaaaggcacccagggtgttgtcacaaattttgaaattttccgaatgagggagaaacaggtacctgtggatgtggtcgagatgaaagaaaccatcatagcctttgcctgggaaccaaatggaagtaagtttgctgtgctgcacggagaggctccgcggatatctgtgtctttctaccacgtcaaaaacaacgggaagattgaactcatcaagatgttcgacaagcagcaggcgaacaccatcttctggagcccccaaggacagttcgtggtgttggcgggcctgaggagtatgaacggtgccttagcgtttgtggacacttcggactgcacggtcatgaacatcgcagagcactacatggcttccgacgtcgaatgggatcctactgggcgctacgtcgtcacctctgtgtcctggtggagccataaggtggacaacgcgtactggctgtggactttccagggacgcctcctgcagaagaacaacaaggaccgcttctgccagctgctgtggcggccccggcctcccacactcctgagccaggaacagatcaaggccaccagcccctcgggttccaagatgcagctactggagacagagttctcacacaccgtgggcgagctcatcgaggtgcacctgcggcgccaggacagcatccctgccttcctcagctcgctcaccctcgagctcttcagccgccagaccgtggcgtag

SEQ ID NO: 128 - DNA, 1899 bp, Homo sapiens
atgacgatcagtgacgagtgggatattccagagaaacagcctttcaaagacctggggaacttacgttactggcttgaagaggcagaatgcagagatcagtacagtgtgatttttgagagtggagaccgcacttccatattctggaatgacgtaaaagaccctgtctcaattgaagaaagagcgagatggacagagacgtatgtgcgttggtctcctaagggcacctacctggctacctttcatcaaagaggcattgctctatgggggggagagaaattcaagcaaattcagagattcagccaccaaggggttcagcttattgacttctcaccttgtgaaaggtacctggtgacctttagccccctgatggacacgcaggatgaccctcaggccataatcatctgggacatccttacggggcacaagaagaggggttttcactgtgagagctcagcccattggcctatttttaagtggagccatgatggcaaattctttgccagaatgaccctggatacgcttagcatctatgaaactccttctatgggtcttttggacaagaagagtttgaagatctctgggataaaagacttttcttggtctcctggtggtaacataatcgccttctgggtgcctgaagacaaagatattccagccagggtaaccctgatgcagctccctaccaggcaagagatccgagtgaggaacctgttcaatgtggtggactgcaagctccattggcagaagaacggagactacttgtgtgtgaaagtagataggactccgaaaggcacccagggtgttgtcacaaattttgaaattttccgaatgagggagaaacaggtacctgtggatgtggtcgagatgaaagaaaccatcatagcctttgcctgggaaccaaatggaagtaagtttgctgtgctgcacggagaggctccgcggatatctgtgtctttctaccacgtcaaaaacaacgggaagattgaactcatcaagatgttcgacaagcagcaggcgaacaccatcttctggagcccccaaggacagttcgtggtgttggcgggcctgaggagtatgaacggtgccttagcgtttgtggacacttcggactgcacggtcatgaacatcgcagagcactacatggcttccgacgtcgaatgggatcctactgggcgctacgtcgtcacctctgtgtcctggtggagccataaggtggacaacgcgtactggctgtggactttccagggacgcctcctgcagaagaacaacaaggaccgcttctgccagctgctgtggcggccccggcctcccacactcctgagccaggaacagatcaagggtgactatgaccagagcaggaccaaagtgctgcacatgagcctgaaccccaccagtgtggccaggcagcgcctgcgcgaggaccacagccagctgcaggcggagtgcgagcgactgcgcgggctcctgcgcgccatggagagaggaggcaccgtcccagccgaccttgaggctgccgccgcgagtctgccatcgtccaaggaggtggcagagctgaagaagcaggtggagagtgccgagctgaagaaccagcggctcaaggaggttttccagaccaagatccaggagttccgcaaggcctgctacacgctcaccggctaccagatcgacatcaccacggagaaccagtaccggctgacctcgctgtacgccgagcacccaggcgactgcctcatcttcaaggccaccagcccctcgggttccaagatgcagctactggagacagagttctcacacaccgtgggcgagctcatcgaggtgcacctgcggcgccaggacagcatccctgccttcctcagctcgctcaccctcgagctcttcagccgccagaccgtggcgtag

SEQ ID NO: 129 - DNA, 2628 bp, Homo sapiens
atgcaggacgcggagaacgtggcggtgcccgaggcggccgaggagcgcgccgagcccggccagcagcagccggccgccgagccgccgccagccgaggggctgctgcggcccgcggggcccggcgctccggaggccgcggggaccgaggcctccagtgaggaggtggggatcgcggaggccgggccggagtccgaggtgaggaccgagccggcggccgaggcagaggcggcctccggcccgtccgagtcgccctcgccgccggccgccgaggagctgcccgggtcgcatgctgagccccctgtcccggcacagggcgaggccccaggagagcaggctcgggacgagcgctccgacagccgggcccaggcggtgtccgaggacgcgggaggaaacgagggcagagcggccgaggccgaaccccgggcgctggagaacggcgacgcggacgagccctccttcagcgaccccgaggacttcgtggacgacgtgagcgaggaagaattactgggagatgtactcaaagatcggccccaggaagcagatggaatcgattcggtgattgtagtggacaatgtccctcaggtgggacccgaccgacttgagaaactcaaaaatgtcatccacaagatcttttccaagtttgggaaaatcacaaatgatttttatcctgaagaggatgggaagacaaaagggtatattttcctggagtacgcgtcccctgcccacgctgtggatgctgtgaagaacgccgacggctacaagcttgacaagcagcacacattccgggtcaacctctttacggattttgacaagtatatgacgatcagtgacgagtgggatattccagagaaacagcctttcaaagacctggggaacttacgttactggcttgaagaggcagaatgcagagatcagtacagtgtgatttttgagagtggagaccgcacttccatattctggaatgacgtaaaagaccctgtctcaattgaagaaagagcgagatggacagagacgtatgtgcgttggtctcctaagggcacctacctggctacctttcatcaaagaggcattgctctatgggggggagagaaattcaagcaaattcagagattcagccaccaaggggttcagcttattgacttctcaccttgtgaaaggtacctggtgacctttagccccctgatggacacgcaggatgaccctcaggccataatcatctgggacatccttacggggcacaagaagaggggttttcactgtgagagctcagcccattggcctatttttaagtggagccatgatggcaaattctttgccagaatgaccctggatacgcttagcatctatgaaactccttctatgggtcttttggacaagaagagtttgaagatctctgggataaaagacttttcttggtctcctggtggtaacataatcgccttctgggtgcctgaagacaaagatattccagccagggtaaccctgatgcagctccctaccaggcaagagatccgagtgaggaacctgttcaatgtggtggactgcaagctccattggcagaagaacggagactacttgtgtgtgaaagtagataggactccgaaaggcacccagggtgttgtcacaaattttgaaattttccgaatgagggagaaacaggtacctgtggatgtggtcgagatgaaagaaaccatcatagcctttgcctgggaaccaaatggaagtaagtttgctgtgctgcacggagaggctccgcggatatctgtgtctttctaccacgtcaaaaacaacgggaagattgaactcatcaagatgttcgacaagcagcaggcgaacaccatcttctggagcccccaaggacagttcgtggtgttggcgggcctgaggagtatgaacggtgccttagcgtttgtggacacttcggactgcacggtcatgaacatcgcagagcactacatggcttccgacgtcgaatgggatcctactgggcgctacgtcgtcacctctgtgtcctggtggagccataaggtggacaacgcgtactggctgtggactttccagggacgcctcctgcagaagaacaacaaggaccgcttctgccagctgctgtggcggccccggcctcccacactcctgagccaggaacagatcaagggtgactatgaccagagcaggaccaaagtgctgcacatgagcctgaaccccaccagtgtggccaggcagcgcctgcgcgaggaccacagccagctgcaggcggagtgcgagcgactgcgcgggctcctgcgcgccatggagagaggaggcaccgtcccagccgaccttgaggctgccgccgcgagtctgccatcgtccaaggaggtggcagagctgaagaagcaggtggagagtgccgagctgaagaaccagcggctcaaggaggttttccagaccaagatccaggagttccgcaaggcctgctacacgctcaccggctaccagatcgacatcaccacggagaaccagtaccggctgacctcgctgtacgccgagcacccaggcgactgcctcatcttcaaggtgggtcctgcgtgtgacggctctccggctgtctcgctctctgtctcctcctgtggggagatccgaccgtag

SEQ ID NO: 130 - DNA, 1812 bp, Homo sapiens
atgacgatcagtgacgagtgggatattccagagaaacagcctttcaaagacctggggaacttacgttactggcttgaagaggcagaatgcagagatcagtacagtgtgatttttgagagtggagaccgcacttccatattctggaatgacgtaaaagaccctgtctcaattgaagaaagagcgagatggacagagacgtatgtgcgttggtctcctaagggcacctacctggctacctttcatcaaagaggcattgctctatgggggggagagaaattcaagcaaattcagagattcagccaccaaggggttcagcttattgacttctcaccttgtgaaaggtacctggtgacctttagccccctgatggacacgcaggatgaccctcaggccataatcatctgggacatccttacggggcacaagaagaggggttttcactgtgagagctcagcccattggcctatttttaagtggagccatgatggcaaattctttgccagaatgaccctggatacgcttagcatctatgaaactccttctatgggtcttttggacaagaagagtttgaagatctctgggataaaagacttttcttggtctcctggtggtaacataatcgccttctgggtgcctgaagacaaagatattccagccagggtaaccctgatgcagctccctaccaggcaagagatccgagtgaggaacctgttcaatgtggtggactgcaagctccattggcagaagaacggagactacttgtgtgtgaaagtagataggactccgaaaggcacccagggtgttgtcacaaattttgaaattttccgaatgagggagaaacaggtacctgtggatgtggtcgagatgaaagaaaccatcatagcctttgcctgggaaccaaatggaagtaagtttgctgtgctgcacggagaggctccgcggatatctgtgtctttctaccacgtcaaaaacaacgggaagattgaactcatcaagatgttcgacaagcagcaggcgaacaccatcttctggagcccccaaggacagttcgtggtgttggcgggcctgaggagtatgaacggtgccttagcgtttgtggacacttcggactgcacggtcatgaacatcgcagagcactacatggcttccgacgtcgaatgggatcctactgggcgctacgtcgtcacctctgtgtcctggtggagccataaggtggacaacgcgtactggctgtggactttccagggacgcctcctgcagaagaacaacaaggaccgcttctgccagctgctgtggcggccccggcctcccacactcctgagccaggaacagatcaagggtgactatgaccagagcaggaccaaagtgctgcacatgagcctgaaccccaccagtgtggccaggcagcgcctgcgcgaggaccacagccagctgcaggcggagtgcgagcgactgcgcgggctcctgcgcgccatggagagaggaggcaccgtcccagccgaccttgaggctgccgccgcgagtctgccatcgtccaaggaggtggcagagctgaagaagcaggtggagagtgccgagctgaagaaccagcggctcaaggaggttttccagaccaagatccaggagttccgcaaggcctgctacacgctcaccggctaccagatcgacatcaccacggagaaccagtaccggctgacctcgctgtacgccgagcacccaggcgactgcctcatcttcaaggtgggtcctgcgtgtgacggctctccggctgtctcgctctctgtctcctcctgtggggagatccgaccgtag

SEQ ID NO: 131 - DNA, 2049 bp, Homo sapiens
atgacgatcagtgacgagtgggatattccagagaaacagcctttcaaagacctggggaacttacgttactggcttgaagaggcagaatgcagagatcagtacagtgtgatttttgagagtggagaccgcacttccatattctggaatgacgtaaaagaccctgtctcaattgaagaaagagcgagatggacagagacgtatgtgcgttggtctcctaagggcacctacctggctacctttcatcaaagaggcattgctctatgggggggagagaaattcaagcaaattcagagattcagccaccaaggggttcagcttattgacttctcaccttgtgaaaggtacctggtgacctttagccccctgatggacacgcaggatgaccctcaggccataatcatctgggacatccttacggggcacaagaagaggggttttcactgtgagagctcagcccattggcctatttttaagtggagccatgatggcaaattctttgccagaatgaccctggatacgcttagcatctatgaaactccttctatgggtcttttggacaagaagagtttgaagatctctgggataaaagacttttcttggtctcctggtggtaacataatcgccttctgggtgcctgaagacaaagatattccagccagggtaaccctgatgcagctccctaccaggcaagagatccgagtgaggaacctgttcaatgtggtggactgcaagctccattggcagaagaacggagactacttgtgtgtgaaagtagataggactccgaaaggcacccagggtgttgtcacaaattttgaaattttccgaatgagggagaaacaggtacctgtggatgtggtcgagatgaaagaaaccatcatagcctttgcctgggaaccaaatggaagtaagtttgctgtgctgcacggagaggctccgcggatatctgtgtctttctaccacgtcaaaaacaacgggaagattgaactcatcaagatgttcgacaagcagcaggcgaacaccatcttctggagcccccaaggacagttcgtggtgttggcgggcctgaggagtatgaacggtgccttagcgtttgtggacacttcggactgcacggtcatgaacatcgcagagcactacatggcttccgacgtcgaatgggatcctactgggcgctacgtcgtcacctctgtgtcctggtggagccataaggtggacaacgcgtactggctgtggactttccagggacgcctcctgcagaagaacaacaaggaccgcttctgccagctgctgtggcggccccggcctcccacactcctgagccaggaacagatcaaggctcagctgtcgcaggccctggaggagctgggaggccagaaacaaagagcagacatgctggagatggagctgaagatgctgaagtctcagtccagctctgccgaacagagcttcctgttctccagggaggaggcggacacgctcaggttgaaggtcgaggagctggaaggcgagcggagtcggctggaggaggaaaagaggatgctggaggcacagctggagcggcgagctctgcagggtgactatgaccagagcaggaccaaagtgctgcacatgagcctgaaccccaccagtgtggccaggcagcgcctgcgcgaggaccacagccagctgcaggcggagtgcgagcgactgcgcgggctcctgcgcgccatggagagaggaggcaccgtcccagccgaccttgaggctgccgccgcgagtctgccatcgtccaaggaggtggcagagctgaagaagcaggtggagagtgccgagctgaagaaccagcggctcaaggaggttttccagaccaagatccaggagttccgcaaggcctgctacacgctcaccggctaccagatcgacatcaccacggagaaccagtaccggctgacctcgctgtacgccgagcacccaggcgactgcctcatcttcaaggtgggtcctgcgtgtgacggctctccggctgtctcgctctctgtctcctcctgtggggagatccgaccgtag

SEQ ID NO: 132 - DNA, 2715 bp, Homo sapiens
atgcaggacgcggagaacgtggcggtgcccgaggcggccgaggagcgcgccgagcccggccagcagcagccggccgccgagccgccgccagccgaggggctgctgcggcccgcggggcccggcgctccggaggccgcggggaccgaggcctccagtgaggaggtggggatcgcggaggccgggccggagtccgaggtgaggaccgagccggcggccgaggcagaggcggcctccggcccgtccgagtcgccctcgccgccggccgccgaggagctgcccgggtcgcatgctgagccccctgtcccggcacagggcgaggccccaggagagcaggctcgggacgagcgctccgacagccgggcccaggcggtgtccgaggacgcgggaggaaacgagggcagagcggccgaggccgaaccccgggcgctggagaacggcgacgcggacgagccctccttcagcgaccccgaggacttcgtggacgacgtgagcgaggaagaattactgggagatgtactcaaagatcggccccaggaagcagatggaatcgattcggtgattgtagtggacaatgtccctcaggtgggacccgaccgacttgagaaactcaaaaatgtcatccacaagatcttttccaagtttgggaaaatcacaaatgatttttatcctgaagaggatgggaagacaaaagggtatattttcctggagtacgcgtcccctgcccacgctgtggatgctgtgaagaacgccgacggctacaagcttgacaagcagcacacattccgggtcaacctctttacggattttgacaagtatatgacgatcagtgacgagtgggatattccagagaaacagcctttcaaagacctggggaacttacgttactggcttgaagaggcagaatgcagagatcagtacagtgtgatttttgagagtggagaccgcacttccatattctggaatgacgtaaaagaccctgtctcaattgaagaaagagcgagatggacagagacgtatgtgcgttggtctcctaagggcacctacctggctacctttcatcaaagaggcattgctctatgggggggagagaaattcaagcaaattcagagattcagccaccaaggggttcagcttattgacttctcaccttgtgaaaggtacctggtgacctttagccccctgatggacacgcaggatgaccctcaggccataatcatctgggacatccttacggggcacaagaagaggggttttcactgtgagagctcagcccattggcctatttttaagtggagccatgatggcaaattctttgccagaatgaccctggatacgcttagcatctatgaaactccttctatgggtcttttggacaagaagagtttgaagatctctgggataaaagacttttcttggtctcctggtggtaacataatcgccttctgggtgcctgaagacaaagatattccagccagggtaaccctgatgcagctccctaccaggcaagagatccgagtgaggaacctgttcaatgtggtggactgcaagctccattggcagaagaacggagactacttgtgtgtgaaagtagataggactccgaaaggcacccagggtgttgtcacaaattttgaaattttccgaatgagggagaaacaggtacctgtggatgtggtcgagatgaaagaaaccatcatagcctttgcctgggaaccaaatggaagtaagtttgctgtgctgcacggagaggctccgcggatatctgtgtctttctaccacgtcaaaaacaacgggaagattgaactcatcaagatgttcgacaagcagcaggcgaacaccatcttctggagcccccaaggacagttcgtggtgttggcgggcctgaggagtatgaacggtgccttagcgtttgtggacacttcggactgcacggtcatgaacatcgcagagcactacatggcttccgacgtcgaatgggatcctactgggcgctacgtcgtcacctctgtgtcctggtggagccataaggtggacaacgcgtactggctgtggactttccagggacgcctcctgcagaagaacaacaaggaccgcttctgccagctgctgtggcggccccggcctcccacactcctgagccaggaacagatcaagggtgactatgaccagagcaggaccaaagtgctgcacatgagcctgaaccccaccagtgtggccaggcagcgcctgcgcgaggaccacagccagctgcaggcggagtgcgagcgactgcgcgggctcctgcgcgccatggagagaggaggcaccgtcccagccgaccttgaggctgccgccgcgagtctgccatcgtccaaggaggtggcagagctgaagaagcaggtggagagtgccgagctgaagaaccagcggctcaaggaggttttccagaccaagatccaggagttccgcaaggcctgctacacgctcaccggctaccagatcgacatcaccacggagaaccagtaccggctgacctcgctgtacgccgagcacccaggcgactgcctcatcttcaaggccaccagcccctcgggttccaagatgcagctactggagacagagttctcacacaccgtgggcgagctcatcgaggtgcacctgcggcgccaggacagcatccctgccttcctcagctcgctcaccctcgagctcttcagccgccagaccgtggcgtag

SEQ ID NO: 133 - DNA, 756 bp, Homo sapiens
atggagtttgtgaatgggggtgacttgatgttccacattcagaagtctcgtcgttttgatgaagcacgagctcgcttctatgctgcagaaatcatttcggctctcatgttcctccatgataaaggaatcatctatagagatctgaaactggacaatgtcctgttggaccacgagggtcactgtaaactggcagacttcggaatgtgcaaggaggggatttgcaatggtgtcaccacggccacattctgtggcacgccagactatatcgctccagagatcctccaggaaatgctgtacgggcctgcagtagactggtgggcaatgggcgtgttgctctatgagatgctctgtggtcacgcgccttttgaggcagagaacgaagatgacctctttgaggccatactgaatgatgaggtggtctaccctacctggctccatgaagatgccacagggatcctaaaatctttcatgaccaagaaccccaccatgcgcttgggcagcctgactcagggaggcgagcacgccatcttgagacatcctttttttaaggaaatcgactgggcccagctgaaccatcgccaaatagaaccgcctttcagacccagaatcaaatcccgagaagatgtcagtaattttgaccctgacttcataaaggaagagccagttttaactccaattgatgagggacatcttccaatgattaaccaggatgagtttagaaacttttcctatgtgtctccagaattgcaaccatag

SEQ ID NO: 134 - DNA, 1569 bp, Homo sapiens
atgcgaaggcgagtccaccagatcaatggacacaagttcatggccacgtatctgaggcagcccacctactgctctcactgcagggagtttatctggggagtgtttgggaaacagggttatcagtgccaagtgtgcacctgtgtcgtccataaacgctgccatcatctaattgttacagcctgtacttgccaaaacaatattaacaaagtggattcaaagattgcagaacagaggttcgggatcaacatcccacacaagttcagcatccacaactacaaagtgccaacattctgcgatcactgtggctcactgctctggggaataatgcgacaaggacttcagtgtaaaatatgtaaaatgaatgtgcatattcgatgtcaagcgaacgtggcccctaactgtggggtaaatgcggtggaacttgccaagaccctggcagggatgggtctccaacccggaaatatttctccaacctcgaaactcgtttccagatcgaccctaagacgacagggaaaggagagcagcaaagaaggaaatgggattggggttaattcttccaaccgacttggtatcgacaactttgagttcatccgagtgttggggaaggggagttttgggaaggtgatgcttgcaagagtaaaagaaacaggagacctctatgctgtgaaggtgctgaagaaggacgtgattctgcaggatgatgatgtggaatgcaccatgaccgagaaaaggatcctgtctctggcccgcaatcaccccttcctcactcagttgttctgctgctttcagacccccgatcgtctgttttttgtgatggagtttgtgaatgggggtgacttgatgttccacattcagaagtctcgtcgttttgatgaagcacgagctcgcttctatgctgcagaaatcatttcggctctcatgttcctccatgataaaggaatcatctatagagatctgaaactggacaatgtcctgttggaccacgagggtcactgtaaactggcagacttcggaatgtgcaaggaggggatttgcaatggtgtcaccacggccacattctgtggcacgccagactatatcgctccagagatcctccaggaaatgctgtacgggcctgcagtagactggtgggcaatgggcgtgttgctctatgagatgctctgtggtcacgcgccttttgaggcagagaacgaagatgacctctttgaggccatactgaatgatgaggtggtctaccctacctggctccatgaagatgccacagggatcctaaaatctttcatgaccaagaaccccaccatgcgcttgggcagcctgactcagggaggcgagcacgccatcttgagacatcctttttttaaggaaatcgactgggcccagctgaaccatcgccaaatagaaccgcctttcagacccagaatcaaatcccgagaagatgtcagtaattttgaccctgacttcataaaggaagagccagttttaactccaattgatgagggacatcttccaatgattaaccaggatgagtttagaaacttttcctatgtgtctccagaattgcaaccatag

SEQ ID NO: 135 - DNA, 156 bp, Homo sapiens
atgtcttctcacaagactttcaccattaagcgattcctggccaagaaacaaaagcaaaatcgtcccatcccccagtggattcagatgaaacctggtagtaaaatcaggtacaactccaaaaggaggcattggagaagaaccaagctgggtctataa

SEQ ID NO: 136 - DNA, 276 bp, Homo sapiens
atgaattcatcggggggtcctgatgacaacttaattgaaggtggaggaacaaaatttgtctgcaaacctggagccagaaacattaccgtcatattccacccattactaagactaaagcaagccaaagagctggaccgagagagggctgctgccaatgagcagttaaccagagccatccttcgggagaggatatgtagcgaggaggaacgcgctaaggcaaagcacctgataaaagtggagctgctctgggtgaaacctggagtgttgactgcttag

SEQ ID NO: 137 - DNA, 1962 bp, Homo sapiens
atggcggcagaagcagctggtgggaaatacagaagcacagtcagcaaaagcaaagacccctcggggctgctcatctctgtgatcaggactctgtctactagtgacgatgtcgaagacagggaaaatgaaaagggtcgccttgaagaagcctacgagaaatgtgaccgtgacctggatgaattgattgtacagcactacacagaattgacgacagccattcgcacataccagagcatcacagagcgcatcactaactcccgaaataaaataaagcaggtaaaagagaacctgctttcatgcaagatgctgctgcactgcaaacgggatgagcttcggaaactgtggattgaaggaattgagcataagcatgtcctgaacttgttggatgaaattgagaatatcaagcaagtgcctcaaaagctggaacagtgcatggccagcaagcactatctcagtgccactgacatgttggtgtcagcagttgagtctttggagggccccctgctccaggtggaaggactgagtgaccttcgactagagcttcacagcaagaagatgaaccttcacttggttctcatagatgaactacaccggcacctgtacatcaaatcgactagccgagttgtgcagcgtaacaaggaaaaagggaaaatcagctccctcgtgaaagatgcttctgttcctctgattgatgttacaaacctccctactcctcgaaaattccttgatacctctcactattctactgctggaagctcaagtgtgagggagataaatctgcaggacatcaaggaagatttagaattggatccagaggaaaacagcaccctgtttatgggtatcctcattaagggcttggcgaaactgaagaagatcccagaaacagttaaggcaatcatagagcgcttggagcaggagttgaagcaaattgtgaagaggtctacaacccaggtggcagacagtggctatcagcggggggagaacgttactgtggagaaccaaccaaggttgcttctagaactgctggagttactgtttgacaagtttaatgctgtagccgctgcacactctgtggtcctgggatacctgcaggacactgtagtgactccactgactcagcaggaagatatcaaactgtatgatatggcagatgtatgggtgaagatccaagatgttctacagatgctattaactgagtacttggatatgaaaaatactcgtacggcctctgaaccatcagctcaactaagctatgccagcactggacgagagtttgcagccttttttgccaagaagaaacctcaaaggccaaaaaattctcttttcaagttcgaatcgtcctcccatgccatcagtatgagcgcctatctgcgagaacagagaagggagctctatagtcggagtggagaactgcaagggggtcctgatgacaacttaattgaaggtggaggaacaaaatttgtctgcaaacctggagccagaaacattaccgtcatattccacccattactaagactaaagcaagccaaagagctggaccgagagagggctgctgccaatgagcagttaaccagagccatccttcgggagaggatatgtagcgaggaggaacgcgctaaggcaaagcacctggatattgaagacaaagctaggcagctggaagagaaagaccgagtgctaaagaagcaggatgcattctacaaagaacagctggctagactggaggagaggagctcagagttctacagagtcaccactgaacaatatcagaaagctgctgaagaggtggaagcaaagttcaagcgatatgagtctcatccagtctgtgctgatctgcaggccaaaattcttcagtgttaccgtgagaacacccaccagaccctcaaatgctccgctctggccacccagtatatgcactgtgtcaatcatgccaaacagagcatgcttgagaagggaggataa

SEQ ID NO: 138 - DNA, 1674 bp, Homo sapiens
atggcggcagaagcagctggtgggaaatacagaagcacagtcagcaaaagcaaagacccctcggggctgctcatctctgtgatcaggactctgtctactagtgacgatgtcgaagacagggaaaatgaaaagggtcgccttgaagaagcctacgagaaatgtgaccgtgacctggatgaattgattgtacagcactacacagaattgacgacagccattcgcacataccagagcatcacagagcgcatcactaactcccgaaataaaataaagcaggtaaaagagaacctgctttcatgcaagatgctgctgcactgcaaacgggatgagcttcggaaactgtggattgaaggaattgagcataagcatgtcctgaacttgttggatgaaattgagaatatcaagcaagtgcctcaaaagctggaacagtgcatggccagcaagcactatctcagtgccactgacatgttggtgtcagcagttgagtctttggagggccccctgctccaggtggaaggactgagtgaccttcgactagagcttcacagcaagaagatgaaccttcacttggttctcatagatgaactacaccggcacctgtacatcaaatcgactagccgagttgtgcagcgtaacaaggaaaaagggaaaatcagctccctcgtgaaagatgcttctgttcctctgattgatgttacaaacctccctactcctcgaaaattccttgatacctctcactattctactgctggaagctcaagtgtgagggagataaatctgcaggacatcaaggaagatttagaattggatccagaggaaaacagcaccctgtttatgggtatcctcattaagggcttggcgaaactgaagaagatcccagaaacagttaaggcaatcatagagcgcttggagcaggagttgaagcaaattgtgaagaggtctacaacccaggtggcagacagtggctatcagcggggggagaacgttactgtggagaaccaaccaaggttgcttctagaactgctggagttactgtttgacaagtttaatgctgtagccgctgcacactctgtggtcctgggatacctgcaggacactgtagtgactccactgactcagcaggaagatatcaaactgtatgatatggcagatgtatgggtgaagatccaagatgttctacagatgctattaactgagtacttggatatgaaaaatactcgtacggcctctgaaccatcagctcaactaagctatgccagcactggacgagagtttgcagccttttttgccaagaagaaacctcaaaggccaaaaaattctcttttcaagttcgaatcgtcctcccatgccatcagtatgagcgcctatctgcgagaacagagaagggagctctatagtcggagtggagaactgcaagggggtcctgatgacaacttaattgaaggtggaggaacaaaatttgtctgcaaacctggagccagaaacattaccgtcatattccacccattactaaggcgatatgagtctcatccagtctgtgctgatctgcaggccaaaattcttcagtgttaccgtgagaacacccaccagaccctcaaatgctccgctctggccacccagtatatgcactgtgtcaatcatgccaaacagagcatgcttgagaagggaggataa

SEQ ID NO: 139 - DNA, 543 bp, Homo sapiens
atgaattcatcggggggtcctgatgacaacttaattgaaggtggaggaacaaaatttgtctgcaaacctggagccagaaacattaccgtcatattccacccattactaagactaaagcaagccaaagagctggaccgagagagggctgctgccaatgagcagttaaccagagccatccttcgggagaggatatgtagcgaggaggaacgcgctaaggcaaagcacctggctaggcagctggaagagaaagaccgagtgctaaagaagcaggatgcattctacaaagaacagctggctagactggaggagaggagctcagagttctacagagtcaccactgaacaatatcagaaagctgctgaagaggtggaagcaaagttcaagcgatatgagtctcatccagtctgtgctgatctgcaggccaaaattcttcagtgttaccgtgagaacacccaccagaccctcaaatgctccgctctggccacccagtatatgcactgtgtcaatcatgccaaacagagcatgcttgagaagggaggataa

SEQ ID NO: 140 - DNA, 777 bp, Homo sapiens
atggccaatttagtaacagcaagcaaaaccaaaatgagcaaaggagaggatcccaataatcccagatctataaagcggatttctcaagggggtagagataaccacctagctattgctaaatgtgatctcactcagttgaaaaagaaacaatcagaagtgagcaatgggagccgtgaaaccatctcaatgaagacttgttgccaacatggagatagaggatattggtctacagggtactattggagagggggtcctgatgacaacttaattgaaggtggaggaacaaaatttgtctgcaaacctggagccagaaacattaccgtcatattccacccattactaagactaaagcaagccaaagagctggaccgagagagggctgctgccaatgagcagttaaccagagccatccttcgggagaggatatgtagcgaggaggaacgcgctaaggcaaagcacctggctaggcagctggaagagaaagaccgagtgctaaagaagcaggatgcattctacaaagaacagctggctagactggaggagaggagctcagagttctacagagtcaccactgaacaatatcagaaagctgctgaagaggtggaagcaaagttcaagcgatatgagtctcatccagtctgtgctgatctgcaggccaaaattcttcagtgttaccgtgagaacacccaccagaccctcaaatgctccgctctggccacccagtatatgcactgtgtcaatcatgccaaacagagcatgcttgagaagggaggataa

SEQ ID NO: 141 - DNA, 1371 bp, Homo sapiens
atgctgctgcactgcaaacgggatgagcttcggaaactgtggattgaaggaattgagcataagcatgtcctgaacttgttggatgaaattgagaatatcaagcaagtgcctcaaaagctggaacagtgcatggccagcaagcactatctcagtgccactgacatgttggtgtcagcagttgagtctttggagggccccctgctccaggtggaaggactgagtgaccttcgactagagcttcacagcaagaagatgaaccttcacttggttctcatagatgaactacaccggcacctgtacatcaaatcgactagccgagttgtgcagcgtaacaaggaaaaagggaaaatcagctccctcgtgaaagatgcttctgttcctctgattgatgttacaaacctccctactcctcgaaaattccttgatacctctcactattctactgctggaagctcaagtgtgagggagataaatctgcaggacatcaaggaagatttagaattggatccagaggaaaacagcaccctgtttatgggtatcctcattaagggcttggcgaaactgaagaagatcccagaaacagttaaggcaatcatagagcgcttggagcaggagttgaagcaaattgtgaagaggtctacaacccaggtggcagacagtggctatcagcggggggagaacgttactgtggagaaccaaccaaggttgcttctagaactgctggagttactgtttgacaagtttaatgctgtagccgctgcacactctgtggtcctgggatacctgcaggacactgtagtgactccactgactcagcaggaagatatcaaactgtatgatatggcagatgtatgggtgaagatccaagatgttctacagatgctattaactgagtacttggatatgaaaaatactcgtacggcctctgaaccatcagctcaactaagctatgccagcactggacgagagtttgcagccttttttgccaagaagaaacctcaaaggccaaaaaattctcttttcaagttcgaatcgtcctcccatgccatcagtatgagcgcctatctgcgagaacagagaagggagctctatagtcggagtggagaactgcaagggggtcctgatgacaacttaattgaaggtggaggaacaaaatttgtctgcaaacctggagccagaaacattaccgtcatattccacccattactaaggcgatatgagtctcatccagtctgtgctgatctgcaggccaaaattcttcagtgttaccgtgagaacacccaccagaccctcaaatgctccgctctggccacccagtatatgcactgtgtcaatcatgccaaacagagcatgcttgagaagggaggataa

SEQ ID NO: 142 - DNA, 1659 bp, Homo sapiens
atgctgctgcactgcaaacgggatgagcttcggaaactgtggattgaaggaattgagcataagcatgtcctgaacttgttggatgaaattgagaatatcaagcaagtgcctcaaaagctggaacagtgcatggccagcaagcactatctcagtgccactgacatgttggtgtcagcagttgagtctttggagggccccctgctccaggtggaaggactgagtgaccttcgactagagcttcacagcaagaagatgaaccttcacttggttctcatagatgaactacaccggcacctgtacatcaaatcgactagccgagttgtgcagcgtaacaaggaaaaagggaaaatcagctccctcgtgaaagatgcttctgttcctctgattgatgttacaaacctccctactcctcgaaaattccttgatacctctcactattctactgctggaagctcaagtgtgagggagataaatctgcaggacatcaaggaagatttagaattggatccagaggaaaacagcaccctgtttatgggtatcctcattaagggcttggcgaaactgaagaagatcccagaaacagttaaggcaatcatagagcgcttggagcaggagttgaagcaaattgtgaagaggtctacaacccaggtggcagacagtggctatcagcggggggagaacgttactgtggagaaccaaccaaggttgcttctagaactgctggagttactgtttgacaagtttaatgctgtagccgctgcacactctgtggtcctgggatacctgcaggacactgtagtgactccactgactcagcaggaagatatcaaactgtatgatatggcagatgtatgggtgaagatccaagatgttctacagatgctattaactgagtacttggatatgaaaaatactcgtacggcctctgaaccatcagctcaactaagctatgccagcactggacgagagtttgcagccttttttgccaagaagaaacctcaaaggccaaaaaattctcttttcaagttcgaatcgtcctcccatgccatcagtatgagcgcctatctgcgagaacagagaagggagctctatagtcggagtggagaactgcaagggggtcctgatgacaacttaattgaaggtggaggaacaaaatttgtctgcaaacctggagccagaaacattaccgtcatattccacccattactaagactaaagcaagccaaagagctggaccgagagagggctgctgccaatgagcagttaaccagagccatccttcgggagaggatatgtagcgaggaggaacgcgctaaggcaaagcacctggatattgaagacaaagctaggcagctggaagagaaagaccgagtgctaaagaagcaggatgcattctacaaagaacagctggctagactggaggagaggagctcagagttctacagagtcaccactgaacaatatcagaaagctgctgaagaggtggaagcaaagttcaagcgatatgagtctcatccagtctgtgctgatctgcaggccaaaattcttcagtgttaccgtgagaacacccaccagaccctcaaatgctccgctctggccacccagtatatgcactgtgtcaatcatgccaaacagagcatgcttgagaagggaggataa

SEQ ID NO: 143 - DNA, 1482 bp, Homo sapiens
atgctgctgcactgcaaacgggatgagcttcggaaactgtggattgaaggaattgagcataagcatgtcctgaacttgttggatgaaattgagaatatcaagcaagtgcctcaaaagctggaacagtgcatggccagcaagcactatctcagtgccactgacatgttggtgtcagcagttgagtctttggagggccccctgctccaggtggaaggactgagtgaccttcgactagagcttcacagcaagaagatgaaccttcacttggttctcatagatgaactacaccggcacctgtacatcaaatcgactagccgagttgtgcagcgtaacaaggaaaaagggaaaatcagctccctcgtgaaagatgcttctgttcctctgattgatgttacaaacctccctactcctcgaaaattccttgatacctctcactattctactgctggaagctcaagtgtgagggagataaatctgcaggacatcaaggaagatttagaattggatccagaggaaaacagcaccctgtttatgggtatcctcattaagggcttggcgaaactgaagaagatcccagaaacagttaaggcaatcatagagcgcttggagcaggagttgaagcaaattgtgaagaggtctacaacccaggtggcagacagtggctatcagcggggggagaacgttactgtggagaaccaaccaaggttgcttctagaactgctggagttactgtttgacaagtttaatgctgtagccgctgcacactctgtggtcctgggatacctgcaggacactgtagtgactccactgactcagcaggaagatatcaaactgtatgatatggcagatgtatgggtgaagatccaagatgttctacagctttcggaaaatgtgattgatcgaatgaaggaatcctctccatctggttcgaagtctcagcggtattctggtgcttatggtgcctcagtttctgatgaagaattgaaaagaagagtagctgaggagctggcattggagcaagccaagaaagaatccgaagatcagaaacgactaaagcaagccaaagagctggaccgagagagggctgctgccaatgagcagttaaccagagccatccttcgggagaggatatgtagcgaggaggaacgcgctaaggcaaagcacctggctaggcagctggaagagaaagaccgagtgctaaagaagcaggatgcattctacaaagaacagctggctagactggaggagaggagctcagagttctacagagtcaccactgaacaatatcagaaagctgctgaagaggtggaagcaaagttcaagcgatatgagtctcatccagtctgtgctgatctgcaggccaaaattcttcagtgttaccgtgagaacacccaccagaccctcaaatgctccgctctggccacccagtatatgcactgtgtcaatcatgccaaacagagcatgcttgagaagggaggataa

SEQ ID NO: 144 - DNA, 1947 bp, Homo sapiens
atggcggcagaagcagctggtgggaaatacagaagcacagtcagcaaaagcaaagacccctcggggctgctcatctctgtgatcaggactctgtctactagtgacgatgtcgaagacagggaaaatgaaaagggtcgccttgaagaagcctacgagaaatgtgaccgtgacctggatgaattgattgtacagcactacacagaattgacgacagccattcgcacataccagagcatcacagagcgcatcactaactcccgaaataaaataaagcaggtaaaagagaacctgctttcatgcaagatgctgctgcactgcaaacgggatgagcttcggaaactgtggattgaaggaattgagcataagcatgtcctgaacttgttggatgaaattgagaatatcaagcaagtgcctcaaaagctggaacagtgcatggccagcaagcactatctcagtgccactgacatgttggtgtcagcagttgagtctttggagggccccctgctccaggtggaaggactgagtgaccttcgactagagcttcacagcaagaagatgaaccttcacttggttctcatagatgaactacaccggcacctgtacatcaaatcgactagccgagttgtgcagcgtaacaaggaaaaagggaaaatcagctccctcgtgaaagatgcttctgttcctctgattgatgttacaaacctccctactcctcgaaaattccttgatacctctcactattctactgctggaagctcaagtgtgagggagataaatctgcaggacatcaaggaagatttagaattggatccagaggaaaacagcaccctgtttatgggtatcctcattaagggcttggcgaaactgaagaagatcccagaaacagttaaggcaatcatagagcgcttggagcaggagttgaagcaaattgtgaagaggtctacaacccaggtggcagacagtggctatcagcggggggagaacgttactgtggagaaccaaccaaggttgcttctagaactgctggagttactgtttgacaagtttaatgctgtagccgctgcacactctgtggtcctgggatacctgcaggacactgtagtgactccactgactcagcaggaagatatcaaactgtatgatatggcagatgtatgggtgaagatccaagatgttctacagatgctattaactgagtacttggatatgaaaaatactcgtacggcctctgaaccatcagctcaactaagctatgccagcactggacgagagtttgcagccttttttgccaagaagaaacctcaaaggccaaaaaattctcttttcaagttcgaatcgtcctcccatgccatcagtatgagcgcctatctgcgagaacagagaagggagctctatagtcggagtggagaactgcaagggggtcctgatgacaacttaattgaaggtggaggaacaaaatttgtctgcaaacctggagccagaaacattaccgtcatattccacccattactaagactaaagcaagccaaagagctggaccgagagagggctgctgccaatgagcagttaaccagagccatccttcgggagaggatatgtagcgaggaggaacgcgctaaggcaaagcacctggctaggcagctggaagagaaagaccgagtgctaaagaagcaggatgcattctacaaagaacagctggctagactggaggagaggagctcagagttctacagagtcaccactgaacaatatcagaaagctgctgaagaggtggaagcaaagttcaagcgatatgagtctcatccagtctgtgctgatctgcaggccaaaattcttcagtgttaccgtgagaacacccaccagaccctcaaatgctccgctctggccacccagtatatgcactgtgtcaatcatgccaaacagagcatgcttgagaagggaggataa

SEQ ID NO: 145 - DNA, 1110 bp, Homo sapiens
atgctgctgcactgcaaacgggatgagcttcggaaactgtggattgaaggaattgagcataagcatgtcctgaacttgttggatgaaattgagaatatcaagcaagtgcctcaaaagctggaacagtgcatggccagcaagcactatctcagtgccactgacatgttggtgtcagcagttgagtctttggagggccccctgctccaggtggaaggactgagtgaccttcgactagagcttcacagcaagaagatgaaccttcacttggttctcatagatgaactacaccggcacctgtacatcaaatcgactagccgagttgtgcagcgtaacaaggaaaaagggaaaatcagctccctcgtgaaagatgcttctgttcctctgattgatgttacaaacctccctactcctcgaaaattccttgatacctctcactattctactgctggaagctcaagtgtgagggagataaatctgcaggacatcaaggaagatttagaattggatccagaggaaaacagcaccctgtttatgggtatcctcattaagggcttggcgaaactgaagaagatcccagaaacagttaaggcaatcatagagcgcttggagcaggagttgaagcaaattgtgaagaggtctacaacccaggtggcagacagtggctatcagcggggggagaacgttactgtggagaaccaaccaaggttgcttctagaactgctggagttactgtttgacaagtttaatgctgtagccgctgcacactctgtggtcctgggatacctgcaggacactgtagtgactccactgactcagcaggaagatatcaaactgtatgatatggcagatgtatgggtgaagatccaagatgttctacagagctcagagttctacagagtcaccactgaacaatatcagaaagctgctgaagaggtggaagcaaagttcaagcgatatgagtctcatccagtctgtgctgatctgcaggccaaaattcttcagtgttaccgtgagaacacccaccagaccctcaaatgctccgctctggccacccagtatatgcactgtgtcaatcatgccaaacagagcatgcttgagaagggaggataa

SEQ ID NO: 146 - DNA, 1215 bp, Homo sapiens
atgctgctgcactgcaaacgggatgagcttcggaaactgtggattgaaggaattgagcataagcatgtcctgaacttgttggatgaaattgagaatatcaagcaagtgcctcaaaagctggaacagtgcatggccagcaagcactatctcagtgccactgacatgttggtgtcagcagttgagtctttggagggccccctgctccaggtggaaggactgagtgaccttcgactagagcttcacagcaagaagatgaaccttcacttggttctcatagatgaactacaccggcacctgtacatcaaatcgactagccgagttgtgcagcgtaacaaggaaaaagggaaaatcagctccctcgtgaaagatgcttctgttcctctgattgatgttacaaacctccctactcctcgaaaattccttgatacctctcactattctactgctggaagctcaagtgtgagggagataaatctgcaggacatcaaggaagatttagaattggatccagaggaaaacagcaccctgtttatgggtatcctcattaagggcttggcgaaactgaagaagatcccagaaacagttaaggcaatcatagagcgcttggagcaggagttgaagcaaattgtgaagaggtctacaacccaggtggcagacagtggctatcagcggggggagaacgttactgtggagaaccaaccaaggttgcttctagaactgctggagttactgtttgacaagtttaatgctgtagccgctgcacactctgtggtcctgggatacctgcaggacactgtagtgactccactgactcagcaggaagatatcaaactgtatgatatggcagatgtatgggtgaagatccaagatgttctacagctttcggaaaatgtgattgatcgaatgaaggaatcctctccatctggttcgaagtctcagcggtattctggtgcttatggtgcctcagtttctgatgaagaattgaaaagaagagtagctgaggagctggcattggagcaagccaagaaagaatccgaagatcagaaacgactaaagcaagccaaagagctggaccgagagagggctgctgccaatgagcagttaaccagagccatccttcgggagaggatatgtagcgaggaggaacgcgctaaggcaaagcacctgataaaagtggagctgctctgggtgaaacctggagtgttgactgcttag

SEQ ID NO: 147 - DNA, 1377 bp, Homo sapiens
atgctgctgcactgcaaacgggatgagcttcggaaactgtggattgaaggaattgagcataagcatgtcctgaacttgttggatgaaattgagaatatcaagcaagtgcctcaaaagctggaacagtgcatggccagcaagcactatctcagtgccactgacatgttggtgtcagcagttgagtctttggagggccccctgctccaggtggaaggactgagtgaccttcgactagagcttcacagcaagaagatgaaccttcacttggttctcatagatgaactacaccggcacctgtacatcaaatcgactagccgagttgtgcagcgtaacaaggaaaaagggaaaatcagctccctcgtgaaagatgcttctgttcctctgattgatgttacaaacctccctactcctcgaaaattccttgatacctctcactattctactgctggaagctcaagtgtgagggagataaatctgcaggacatcaaggaagatttagaattggatccagaggaaaacagcaccctgtttatgggtatcctcattaagggcttggcgaaactgaagaagatcccagaaacagttaaggcaatcatagagcgcttggagcaggagttgaagcaaattgtgaagaggtctacaacccaggtggcagacagtggctatcagcggggggagaacgttactgtggagaaccaaccaaggttgcttctagaactgctggagttactgtttgacaagtttaatgctgtagccgctgcacactctgtggtcctgggatacctgcaggacactgtagtgactccactgactcagcaggaagatatcaaactgtatgatatggcagatgtatgggtgaagatccaagatgttctacagatgctattaactgagtacttggatatgaaaaatactcgtacggcctctgaaccatcagctcaactaagctatgccagcactggacgagagtttgcagccttttttgccaagaagaaacctcaaaggccaaaaaattctcttttcaagttcgaatcgtcctcccatgccatcagtatgagcgcctatctgcgagaacagagaagggagctctatagtcggagtggagaactgcaagggggtcctgatgacaacttaattgaaggtggaggaacaaaatttgtctgcaaacctggagccagaaacattaccgtcatattccacccattactaagactaaagcaagccaaagagctggaccgagagagggctgctgccaatgagcagttaaccagagccatccttcgggagaggatatgtagcgaggaggaacgcgctaaggcaaagcacctgataaaagtggagctgctctgggtgaaacctggagtgttgactgcttag

SEQ ID NO: 148 - DNA, 1194 bp, Homo sapiens
atgctgctgcactgcaaacgggatgagcttcggaaactgtggattgaaggaattgagcataagcatgtcctgaacttgttggatgaaattgagaatatcaagcaagtgcctcaaaagctggaacagtgcatggccagcaagcactatctcagtgccactgacatgttggtgtcagcagttgagtctttggagggccccctgctccaggtggaaggactgagtgaccttcgactagagcttcacagcaagaagatgaaccttcacttggttctcatagatgaactacaccggcacctgtacatcaaatcgactagccgagttgtgcagcgtaacaaggaaaaagggaaaatcagctccctcgtgaaagatgcttctgttcctctgattgatgttacaaacctccctactcctcgaaaattccttgatacctctcactattctactgctggaagctcaagtgtgagggagataaatctgcaggacatcaaggaagatttagaattggatccagaggaaaacagcaccctgtttatgggtatcctcattaagggcttggcgaaactgaagaagatcccagaaacagttaaggcaatcatagagcgcttggagcaggagttgaagcaaattgtgaagaggtctacaacccaggtggcagacagtggctatcagcggggggagaacgttactgtggagaaccaaccaaggttgcttctagaactgctggagttactgtttgacaagtttaatgctgtagccgctgcacactctgtggtcctgggatacctgcaggacactgtagtgactccactgactcagcaggaagatatcaaactgtatgatatggcagatgtatgggtgaagatccaagatgttctacaggctaggcagctggaagagaaagaccgagtgctaaagaagcaggatgcattctacaaagaacagctggctagactggaggagaggagctcagagttctacagagtcaccactgaacaatatcagaaagctgctgaagaggtggaagcaaagttcaagcgatatgagtctcatccagtctgtgctgatctgcaggccaaaattcttcagtgttaccgtgagaacacccaccagaccctcaaatgctccgctctggccacccagtatatgcactgtgtcaatcatgccaaacagagcatgcttgagaagggaggataa

SEQ ID NO: 149 - DNA, 1497 bp, Homo sapiens
atggcggcagaagcagctggtgggaaatacagaagcacagtcagcaaaagcaaagacccctcggggctgctcatctctgtgatcaggactctgtctactagtgacgatgtcgaagacagggaaaatgaaaagggtcgccttgaagaagcctacgagaaatgtgaccgtgacctggatgaattgattgtacagcactacacagaattgacgacagccattcgcacataccagagcatcacagagcgcatcactaactcccgaaataaaataaagcaggtaaaagagaacctgctttcatgcaagatgctgctgcactgcaaacgggatgagcttcggaaactgtggattgaaggaattgagcataagcatgtcctgaacttgttggatgaaattgagaatatcaagcaagtgcctcaaaagctggaacagtgcatggccagcaagcactatctcagtgccactgacatgttggtgtcagcagttgagtctttggagggccccctgctccaggtggaaggactgagtgaccttcgactagagcttcacagcaagaagatgaaccttcacttggttctcatagatgaactacaccggcacctgtacatcaaatcgactagccgagttgtgcagcgtaacaaggaaaaagggaaaatcagctccctcgtgaaagatgcttctgttcctctgattgatgttacaaacctccctactcctcgaaaattccttgatacctctcactattctactgctggaagctcaagtgtgagggagataaatctgcaggacatcaaggaagatttagaattggatccagaggaaaacagcaccctgtttatgggtatcctcattaagggcttggcgaaactgaagaagatcccagaaacagttaaggcaatcatagagcgcttggagcaggagttgaagcaaattgtgaagaggtctacaacccaggtggcagacagtggctatcagcggggggagaacgttactgtggagaaccaaccaaggttgcttctagaactgctggagttactgtttgacaagtttaatgctgtagccgctgcacactctgtggtcctgggatacctgcaggacactgtagtgactccactgactcagcaggaagatatcaaactgtatgatatggcagatgtatgggtgaagatccaagatgttctacaggctaggcagctggaagagaaagaccgagtgctaaagaagcaggatgcattctacaaagaacagctggctagactggaggagaggagctcagagttctacagagtcaccactgaacaatatcagaaagctgctgaagaggtggaagcaaagttcaagcgatatgagtctcatccagtctgtgctgatctgcaggccaaaattcttcagtgttaccgtgagaacacccaccagaccctcaaatgctccgctctggccacccagtatatgcactgtgtcaatcatgccaaacagagcatgcttgagaagggaggataa

SEQ ID NO: 150 - DNA, 1413 bp, Homo sapiens
atggcggcagaagcagctggtgggaaatacagaagcacagtcagcaaaagcaaagacccctcggggctgctcatctctgtgatcaggactctgtctactagtgacgatgtcgaagacagggaaaatgaaaagggtcgccttgaagaagcctacgagaaatgtgaccgtgacctggatgaattgattgtacagcactacacagaattgacgacagccattcgcacataccagagcatcacagagcgcatcactaactcccgaaataaaataaagcaggtaaaagagaacctgctttcatgcaagatgctgctgcactgcaaacgggatgagcttcggaaactgtggattgaaggaattgagcataagcatgtcctgaacttgttggatgaaattgagaatatcaagcaagtgcctcaaaagctggaacagtgcatggccagcaagcactatctcagtgccactgacatgttggtgtcagcagttgagtctttggagggccccctgctccaggtggaaggactgagtgaccttcgactagagcttcacagcaagaagatgaaccttcacttggttctcatagatgaactacaccggcacctgtacatcaaatcgactagccgagttgtgcagcgtaacaaggaaaaagggaaaatcagctccctcgtgaaagatgcttctgttcctctgattgatgttacaaacctccctactcctcgaaaattccttgatacctctcactattctactgctggaagctcaagtgtgagggagataaatctgcaggacatcaaggaagatttagaattggatccagaggaaaacagcaccctgtttatgggtatcctcattaagggcttggcgaaactgaagaagatcccagaaacagttaaggcaatcatagagcgcttggagcaggagttgaagcaaattgtgaagaggtctacaacccaggtggcagacagtggctatcagcggggggagaacgttactgtggagaaccaaccaaggttgcttctagaactgctggagttactgtttgacaagtttaatgctgtagccgctgcacactctgtggtcctgggatacctgcaggacactgtagtgactccactgactcagcaggaagatatcaaactgtatgatatggcagatgtatgggtgaagatccaagatgttctacagagctcagagttctacagagtcaccactgaacaatatcagaaagctgctgaagaggtggaagcaaagttcaagcgatatgagtctcatccagtctgtgctgatctgcaggccaaaattcttcagtgttaccgtgagaacacccaccagaccctcaaatgctccgctctggccacccagtatatgcactgtgtcaatcatgccaaacagagcatgcttgagaagggaggataa

SEQ ID NO: 151 - DNA, 558 bp, Homo sapiens
atgaattcatcggggggtcctgatgacaacttaattgaaggtggaggaacaaaatttgtctgcaaacctggagccagaaacattaccgtcatattccacccattactaagactaaagcaagccaaagagctggaccgagagagggctgctgccaatgagcagttaaccagagccatccttcgggagaggatatgtagcgaggaggaacgcgctaaggcaaagcacctggatattgaagacaaagctaggcagctggaagagaaagaccgagtgctaaagaagcaggatgcattctacaaagaacagctggctagactggaggagaggagctcagagttctacagagtcaccactgaacaatatcagaaagctgctgaagaggtggaagcaaagttcaagcgatatgagtctcatccagtctgtgctgatctgcaggccaaaattcttcagtgttaccgtgagaacacccaccagaccctcaaatgctccgctctggccacccagtatatgcactgtgtcaatcatgccaaacagagcatgcttgagaagggaggataa

SEQ ID NO: 152 - DNA, 1785 bp, Homo sapiens
atggcggcagaagcagctggtgggaaatacagaagcacagtcagcaaaagcaaagacccctcggggctgctcatctctgtgatcaggactctgtctactagtgacgatgtcgaagacagggaaaatgaaaagggtcgccttgaagaagcctacgagaaatgtgaccgtgacctggatgaattgattgtacagcactacacagaattgacgacagccattcgcacataccagagcatcacagagcgcatcactaactcccgaaataaaataaagcaggtaaaagagaacctgctttcatgcaagatgctgctgcactgcaaacgggatgagcttcggaaactgtggattgaaggaattgagcataagcatgtcctgaacttgttggatgaaattgagaatatcaagcaagtgcctcaaaagctggaacagtgcatggccagcaagcactatctcagtgccactgacatgttggtgtcagcagttgagtctttggagggccccctgctccaggtggaaggactgagtgaccttcgactagagcttcacagcaagaagatgaaccttcacttggttctcatagatgaactacaccggcacctgtacatcaaatcgactagccgagttgtgcagcgtaacaaggaaaaagggaaaatcagctccctcgtgaaagatgcttctgttcctctgattgatgttacaaacctccctactcctcgaaaattccttgatacctctcactattctactgctggaagctcaagtgtgagggagataaatctgcaggacatcaaggaagatttagaattggatccagaggaaaacagcaccctgtttatgggtatcctcattaagggcttggcgaaactgaagaagatcccagaaacagttaaggcaatcatagagcgcttggagcaggagttgaagcaaattgtgaagaggtctacaacccaggtggcagacagtggctatcagcggggggagaacgttactgtggagaaccaaccaaggttgcttctagaactgctggagttactgtttgacaagtttaatgctgtagccgctgcacactctgtggtcctgggatacctgcaggacactgtagtgactccactgactcagcaggaagatatcaaactgtatgatatggcagatgtatgggtgaagatccaagatgttctacagctttcggaaaatgtgattgatcgaatgaaggaatcctctccatctggttcgaagtctcagcggtattctggtgcttatggtgcctcagtttctgatgaagaattgaaaagaagagtagctgaggagctggcattggagcaagccaagaaagaatccgaagatcagaaacgactaaagcaagccaaagagctggaccgagagagggctgctgccaatgagcagttaaccagagccatccttcgggagaggatatgtagcgaggaggaacgcgctaaggcaaagcacctggctaggcagctggaagagaaagaccgagtgctaaagaagcaggatgcattctacaaagaacagctggctagactggaggagaggagctcagagttctacagagtcaccactgaacaatatcagaaagctgctgaagaggtggaagcaaagttcaagcgatatgagtctcatccagtctgtgctgatctgcaggccaaaattcttcagtgttaccgtgagaacacccaccagaccctcaaatgctccgctctggccacccagtatatgcactgtgtcaatcatgccaaacagagcatgcttgagaagggaggataa

SEQ ID NO: 153 - DNA, 1800 bp, Homo sapiens
atggcggcagaagcagctggtgggaaatacagaagcacagtcagcaaaagcaaagacccctcggggctgctcatctctgtgatcaggactctgtctactagtgacgatgtcgaagacagggaaaatgaaaagggtcgccttgaagaagcctacgagaaatgtgaccgtgacctggatgaattgattgtacagcactacacagaattgacgacagccattcgcacataccagagcatcacagagcgcatcactaactcccgaaataaaataaagcaggtaaaagagaacctgctttcatgcaagatgctgctgcactgcaaacgggatgagcttcggaaactgtggattgaaggaattgagcataagcatgtcctgaacttgttggatgaaattgagaatatcaagcaagtgcctcaaaagctggaacagtgcatggccagcaagcactatctcagtgccactgacatgttggtgtcagcagttgagtctttggagggccccctgctccaggtggaaggactgagtgaccttcgactagagcttcacagcaagaagatgaaccttcacttggttctcatagatgaactacaccggcacctgtacatcaaatcgactagccgagttgtgcagcgtaacaaggaaaaagggaaaatcagctccctcgtgaaagatgcttctgttcctctgattgatgttacaaacctccctactcctcgaaaattccttgatacctctcactattctactgctggaagctcaagtgtgagggagataaatctgcaggacatcaaggaagatttagaattggatccagaggaaaacagcaccctgtttatgggtatcctcattaagggcttggcgaaactgaagaagatcccagaaacagttaaggcaatcatagagcgcttggagcaggagttgaagcaaattgtgaagaggtctacaacccaggtggcagacagtggctatcagcggggggagaacgttactgtggagaaccaaccaaggttgcttctagaactgctggagttactgtttgacaagtttaatgctgtagccgctgcacactctgtggtcctgggatacctgcaggacactgtagtgactccactgactcagcaggaagatatcaaactgtatgatatggcagatgtatgggtgaagatccaagatgttctacagctttcggaaaatgtgattgatcgaatgaaggaatcctctccatctggttcgaagtctcagcggtattctggtgcttatggtgcctcagtttctgatgaagaattgaaaagaagagtagctgaggagctggcattggagcaagccaagaaagaatccgaagatcagaaacgactaaagcaagccaaagagctggaccgagagagggctgctgccaatgagcagttaaccagagccatccttcgggagaggatatgtagcgaggaggaacgcgctaaggcaaagcacctggatattgaagacaaagctaggcagctggaagagaaagaccgagtgctaaagaagcaggatgcattctacaaagaacagctggctagactggaggagaggagctcagagttctacagagtcaccactgaacaatatcagaaagctgctgaagaggtggaagcaaagttcaagcgatatgagtctcatccagtctgtgctgatctgcaggccaaaattcttcagtgttaccgtgagaacacccaccagaccctcaaatgctccgctctggccacccagtatatgcactgtgtcaatcatgccaaacagagcatgcttgagaagggaggataa

SEQ ID NO: 154 - DNA, 510 bp, Homo sapiens
atggccaatttagtaacagcaagcaaaaccaaaatgagcaaaggagaggatcccaataatcccagatctataaagcggatttctcaagggggtagagataaccacctagctattgctaaatgtgatctcactcagttgaaaaagaaacaatcagaagtgagcaatgggagccgtgaaaccatctcaatgaagacttgttgccaacatggagatagaggatattggtctacagggtactattggagagggggtcctgatgacaacttaattgaaggtggaggaacaaaatttgtctgcaaacctggagccagaaacattaccgtcatattccacccattactaagactaaagcaagccaaagagctggaccgagagagggctgctgccaatgagcagttaaccagagccatccttcgggagaggatatgtagcgaggaggaacgcgctaaggcaaagcacctgataaaagtggagctgctctgggtgaaacctggagtgttgactgcttag

SEQ ID NO: 155 - DNA, 1518 bp, Homo sapiens
atggcggcagaagcagctggtgggaaatacagaagcacagtcagcaaaagcaaagacccctcggggctgctcatctctgtgatcaggactctgtctactagtgacgatgtcgaagacagggaaaatgaaaagggtcgccttgaagaagcctacgagaaatgtgaccgtgacctggatgaattgattgtacagcactacacagaattgacgacagccattcgcacataccagagcatcacagagcgcatcactaactcccgaaataaaataaagcaggtaaaagagaacctgctttcatgcaagatgctgctgcactgcaaacgggatgagcttcggaaactgtggattgaaggaattgagcataagcatgtcctgaacttgttggatgaaattgagaatatcaagcaagtgcctcaaaagctggaacagtgcatggccagcaagcactatctcagtgccactgacatgttggtgtcagcagttgagtctttggagggccccctgctccaggtggaaggactgagtgaccttcgactagagcttcacagcaagaagatgaaccttcacttggttctcatagatgaactacaccggcacctgtacatcaaatcgactagccgagttgtgcagcgtaacaaggaaaaagggaaaatcagctccctcgtgaaagatgcttctgttcctctgattgatgttacaaacctccctactcctcgaaaattccttgatacctctcactattctactgctggaagctcaagtgtgagggagataaatctgcaggacatcaaggaagatttagaattggatccagaggaaaacagcaccctgtttatgggtatcctcattaagggcttggcgaaactgaagaagatcccagaaacagttaaggcaatcatagagcgcttggagcaggagttgaagcaaattgtgaagaggtctacaacccaggtggcagacagtggctatcagcggggggagaacgttactgtggagaaccaaccaaggttgcttctagaactgctggagttactgtttgacaagtttaatgctgtagccgctgcacactctgtggtcctgggatacctgcaggacactgtagtgactccactgactcagcaggaagatatcaaactgtatgatatggcagatgtatgggtgaagatccaagatgttctacagctttcggaaaatgtgattgatcgaatgaaggaatcctctccatctggttcgaagtctcagcggtattctggtgcttatggtgcctcagtttctgatgaagaattgaaaagaagagtagctgaggagctggcattggagcaagccaagaaagaatccgaagatcagaaacgactaaagcaagccaaagagctggaccgagagagggctgctgccaatgagcagttaaccagagccatccttcgggagaggatatgtagcgaggaggaacgcgctaaggcaaagcacctgataaaagtggagctgctctgggtgaaacctggagtgttgactgcttag

SEQ ID NO: 156 - DNA, 792 bp, Homo sapiens
atggccaatttagtaacagcaagcaaaaccaaaatgagcaaaggagaggatcccaataatcccagatctataaagcggatttctcaagggggtagagataaccacctagctattgctaaatgtgatctcactcagttgaaaaagaaacaatcagaagtgagcaatgggagccgtgaaaccatctcaatgaagacttgttgccaacatggagatagaggatattggtctacagggtactattggagagggggtcctgatgacaacttaattgaaggtggaggaacaaaatttgtctgcaaacctggagccagaaacattaccgtcatattccacccattactaagactaaagcaagccaaagagctggaccgagagagggctgctgccaatgagcagttaaccagagccatccttcgggagaggatatgtagcgaggaggaacgcgctaaggcaaagcacctggatattgaagacaaagctaggcagctggaagagaaagaccgagtgctaaagaagcaggatgcattctacaaagaacagctggctagactggaggagaggagctcagagttctacagagtcaccactgaacaatatcagaaagctgctgaagaggtggaagcaaagttcaagcgatatgagtctcatccagtctgtgctgatctgcaggccaaaattcttcagtgttaccgtgagaacacccaccagaccctcaaatgctccgctctggccacccagtatatgcactgtgtcaatcatgccaaacagagcatgcttgagaagggaggataa

SEQ ID NO: 157 - DNA, 270 bp, Homo sapiens
atgaattcatcggggggtcctgatgacaacttaattgaaggtggaggaacaaaatttgtctgcaaacctggagccagaaacattaccgtcatattccacccattactaaggcgatatgagtctcatccagtctgtgctgatctgcaggccaaaattcttcagtgttaccgtgagaacacccaccagaccctcaaatgctccgctctggccacccagtatatgcactgtgtcaatcatgccaaacagagcatgcttgagaagggaggataa

SEQ ID NO: 158 - DNA, 1680 bp, Homo sapiens
atggcggcagaagcagctggtgggaaatacagaagcacagtcagcaaaagcaaagacccctcggggctgctcatctctgtgatcaggactctgtctactagtgacgatgtcgaagacagggaaaatgaaaagggtcgccttgaagaagcctacgagaaatgtgaccgtgacctggatgaattgattgtacagcactacacagaattgacgacagccattcgcacataccagagcatcacagagcgcatcactaactcccgaaataaaataaagcaggtaaaagagaacctgctttcatgcaagatgctgctgcactgcaaacgggatgagcttcggaaactgtggattgaaggaattgagcataagcatgtcctgaacttgttggatgaaattgagaatatcaagcaagtgcctcaaaagctggaacagtgcatggccagcaagcactatctcagtgccactgacatgttggtgtcagcagttgagtctttggagggccccctgctccaggtggaaggactgagtgaccttcgactagagcttcacagcaagaagatgaaccttcacttggttctcatagatgaactacaccggcacctgtacatcaaatcgactagccgagttgtgcagcgtaacaaggaaaaagggaaaatcagctccctcgtgaaagatgcttctgttcctctgattgatgttacaaacctccctactcctcgaaaattccttgatacctctcactattctactgctggaagctcaagtgtgagggagataaatctgcaggacatcaaggaagatttagaattggatccagaggaaaacagcaccctgtttatgggtatcctcattaagggcttggcgaaactgaagaagatcccagaaacagttaaggcaatcatagagcgcttggagcaggagttgaagcaaattgtgaagaggtctacaacccaggtggcagacagtggctatcagcggggggagaacgttactgtggagaaccaaccaaggttgcttctagaactgctggagttactgtttgacaagtttaatgctgtagccgctgcacactctgtggtcctgggatacctgcaggacactgtagtgactccactgactcagcaggaagatatcaaactgtatgatatggcagatgtatgggtgaagatccaagatgttctacagatgctattaactgagtacttggatatgaaaaatactcgtacggcctctgaaccatcagctcaactaagctatgccagcactggacgagagtttgcagccttttttgccaagaagaaacctcaaaggccaaaaaattctcttttcaagttcgaatcgtcctcccatgccatcagtatgagcgcctatctgcgagaacagagaagggagctctatagtcggagtggagaactgcaagggggtcctgatgacaacttaattgaaggtggaggaacaaaatttgtctgcaaacctggagccagaaacattaccgtcatattccacccattactaagactaaagcaagccaaagagctggaccgagagagggctgctgccaatgagcagttaaccagagccatccttcgggagaggatatgtagcgaggaggaacgcgctaaggcaaagcacctgataaaagtggagctgctctgggtgaaacctggagtgttgactgcttag

SEQ ID NO: 159 - DNA, 1644 bp, Homo sapiens
atgctgctgcactgcaaacgggatgagcttcggaaactgtggattgaaggaattgagcataagcatgtcctgaacttgttggatgaaattgagaatatcaagcaagtgcctcaaaagctggaacagtgcatggccagcaagcactatctcagtgccactgacatgttggtgtcagcagttgagtctttggagggccccctgctccaggtggaaggactgagtgaccttcgactagagcttcacagcaagaagatgaaccttcacttggttctcatagatgaactacaccggcacctgtacatcaaatcgactagccgagttgtgcagcgtaacaaggaaaaagggaaaatcagctccctcgtgaaagatgcttctgttcctctgattgatgttacaaacctccctactcctcgaaaattccttgatacctctcactattctactgctggaagctcaagtgtgagggagataaatctgcaggacatcaaggaagatttagaattggatccagaggaaaacagcaccctgtttatgggtatcctcattaagggcttggcgaaactgaagaagatcccagaaacagttaaggcaatcatagagcgcttggagcaggagttgaagcaaattgtgaagaggtctacaacccaggtggcagacagtggctatcagcggggggagaacgttactgtggagaaccaaccaaggttgcttctagaactgctggagttactgtttgacaagtttaatgctgtagccgctgcacactctgtggtcctgggatacctgcaggacactgtagtgactccactgactcagcaggaagatatcaaactgtatgatatggcagatgtatgggtgaagatccaagatgttctacagatgctattaactgagtacttggatatgaaaaatactcgtacggcctctgaaccatcagctcaactaagctatgccagcactggacgagagtttgcagccttttttgccaagaagaaacctcaaaggccaaaaaattctcttttcaagttcgaatcgtcctcccatgccatcagtatgagcgcctatctgcgagaacagagaagggagctctatagtcggagtggagaactgcaagggggtcctgatgacaacttaattgaaggtggaggaacaaaatttgtctgcaaacctggagccagaaacattaccgtcatattccacccattactaagactaaagcaagccaaagagctggaccgagagagggctgctgccaatgagcagttaaccagagccatccttcgggagaggatatgtagcgaggaggaacgcgctaaggcaaagcacctggctaggcagctggaagagaaagaccgagtgctaaagaagcaggatgcattctacaaagaacagctggctagactggaggagaggagctcagagttctacagagtcaccactgaacaatatcagaaagctgctgaagaggtggaagcaaagttcaagcgatatgagtctcatccagtctgtgctgatctgcaggccaaaattcttcagtgttaccgtgagaacacccaccagaccctcaaatgctccgctctggccacccagtatatgcactgtgtcaatcatgccaaacagagcatgcttgagaagggaggataa

SEQ ID NO: 160 - DNA, 504 bp, Homo sapiens
atggccaatttagtaacagcaagcaaaaccaaaatgagcaaaggagaggatcccaataatcccagatctataaagcggatttctcaagggggtagagataaccacctagctattgctaaatgtgatctcactcagttgaaaaagaaacaatcagaagtgagcaatgggagccgtgaaaccatctcaatgaagacttgttgccaacatggagatagaggatattggtctacagggtactattggagagggggtcctgatgacaacttaattgaaggtggaggaacaaaatttgtctgcaaacctggagccagaaacattaccgtcatattccacccattactaaggcgatatgagtctcatccagtctgtgctgatctgcaggccaaaattcttcagtgttaccgtgagaacacccaccagaccctcaaatgctccgctctggccacccagtatatgcactgtgtcaatcatgccaaacagagcatgcttgagaagggaggataa

SEQ ID NO: 161 - DNA, 6369 bp, Homo sapiens
atggtgtcccggccagagcccgagggcgaggccatggacgccgagctggcggtagcgccgccgggctgctcgcacctgggcagcttcaaggtggacaactggaagcagaacctgcgggccatctaccagtgcttcgtgtggagcggcacggctgaggcccgcaagcgcaaggccaagtcctgtatctgccatgtctgtggcgtccacctcaacaggctgcattcctgcctctactgtgtcttcttcggctgtttcacaaagaagcatattcacgagcatgcgaaggcgaagcggcacaacctggccattgatctgatgtacggaggcatctactgttttctgtgccaggactacatctatgacaaagacatggaaataatcgccaaggaggagcagcgaaaagcttggaaaatgcaaggcgttggagagaagttttcaacttgggaaccaaccaaacgggagcttgaactgctgaagcacaacccgaaaaggagaaagatcacctcgaactgcaccataggtctgcgtgggctgatcaaccttgggaacacatgcttcatgaactgcatcgtgcaggccctgacccacacgccacttctgcgggacttcttcctgtctgacaggcaccgctgtgagatgcagagccccagctcctgtctggtctgtgagatgtcctcactgtttcaggagacttattctggactcttctgtgtagttataaacccttacaagaatcttccaatttactctgagaatattattgaaatgtacagagggaagaagcgtcatgagatgcctccacacatctatgctatatctgaatctgcttacagatgcatgcttcaagatcgtgaggaccagtcaattctttgcacgggtgagtcaggtgctgggaagacagaaaatacaaagaaagttattcagtaccttgcccatgttgcttcttcacataaaggaagaaaggaccataatattcctcaggaatcgcctaaaccagtgaaacaccagggggaacttgaacggcagcttttgcaagcaaatccaattctggaatcatttggaaatgcgaagactgtgaaaaatgataactcatctcgttttggcaaatttattcggatcaactttgatgtaactggctatatcgttggggccaacattgaaacataccttctggaaaagtctcgtgctgttcgtcaagcaaaagatgaacgtacttttcatatcttttaccagttgttatctggagcaggagaacacctaaagtctgatttgcttcttgaaggatttaataactacaggtttctctccaatggctatattcctattccgggacagcaagacaaagataatttccaggagaccatggaagcaatgcacataatgggcttctcccatgaagagattctgtcaatgcttaaagtagtatcttcagtgctacagtttggaaatatttctttcaaaaaggagagaaatactgatcaagcttccatgccagaaaatacagttgcgcagaagctctgccatcttcttgggatgaatgtgatggagtttactcgggccatcctgactccccggatcaaggtcggccgagactatgtgcaaaaagcccagaccaaagaacaggcagattttgcagtagaagcattggcaaaagctacctatgagcggctctttcgctggctcgttcatcgcatcaataaagctctggataggaccaaacgtcagggagcatctttcattggaatcctggatattgctggatttgaaatttttgagctgaactcctttgaacaactttgcatcaactacaccaatgagaagctgcagcagctgttcaaccacaccatgtttatcctagaacaagaggaataccagcgcgaaggcatcgagtggaacttcatcgatttcgggctggatctgcagccatgcatcgacctaatagagagacctgcgaaccctcctggtgtactggcccttttggatgaagaatgctggttccctaaagccacagataaaacctttgttgaaaaactggttcaagagcaaggttcccactccaagtttcagaaacctcgacaattaaaagacaaagctgatttttgcattatacattatgcagggaaggtggactataaggcagatgagtggctgatgaagaatatggaccccctgaatgacaacgtggccacccttttgcaccagtcatcagacagatttgtggcagagctttggaaagatgagattcagaatattcagagagcttctttctatgacagtgtttctggtcttcatgagccaccagtggaccgtatcgtgggtctggatcaagtcactggtatgactgagacagcttttggctccgcatataaaaccaagaagggcatgtttcgtaccgttgggcaactctacaaagaatctctcaccaagctgatggcaactctccgaaacaccaaccctaactttgttcgttgtatcattccaaatcacgagaagagggctggaaaattggatccacacctagtcctagatcagcttcgctgtaacggtgtcctggaagggatccgaatctgtcgccagggcttccctaaccgaatagttttccaggaattcagacagagatatgagatcctaactccaaatgctattcctaaaggttttatggatggtaaacaggcctgtgaacgaatgatccgggctttagaattggacccaaacttgtacagaattggacagagcaagatatttttcagagctggagttctggcacacttagaggaagaaagagatttaaaaatcaccgatatcattatcttcttccaggccgtttgcagaggttacctggccagaaaggcctttgccaagaagcagcagcaactaagtgccttaaaggtcttgcagcggaactgtgccgcgtacctgaaattacggcactggcagtggtggcgagtcttcacaaaggtgaagccgcttctacaagtgactcgccaggaggaagaacttcaggccaaagatgaagagctgttgaaggtgaaggagaagcagacgaaggtggaaggagagctggaggagatggagcggaagcaccagcagcttttagaagagaagaatatccttgcagaacaactacaagcagagactgagctctttgctgaagcagaagagatgagggcaagacttgctgctaaaaagcaggaattagaagagattctacatgacttggagtctagggttgaagaagaagaagaaagaaaccaaatcctccaaaatgaaaagaaaaaaatgcaagcacatattcaggacctggaagaacagctagacgaggaggaaggggctcggcaaaagctgcagctggaaaaggtgacagcagaggccaagatcaagaagatggaagaggagattctgcttctcgaggaccaaaattccaagttcatcaaagaaaagaaactcatggaagatcgcattgctgagtgttcctctcagctggctgaagaggaagaaaaggcgaaaaacttggccaaaatcaggaataagcaagaagtgatgatctcagatttagaagaacgcttaaagaaggaagaaaagactcgtcaggaactggaaaaggccaaaagaaaactcgacggggagacgaccgacctgcaggaccagatcgcagagctgcaggcgcagattgatgagctcaagctgcagctggccaagaaggaggaggagctgcagggcgcactggccagaggtgatgatgaaacactccataagaacaatgcccttaaagttgtgcgagagctacaagcccaaattgctgaacttcaggaagactttgaatccgagaaggcttcacggaacaaggccgaaaagcagaaaagggacttgagtgaggaactggaagctctgaaaacagagctggaggacacgctggacaccacggcagcccagcaggaactacgtacaaaacgtgaacaagaagtggcagagctgaagaaagctcttgaggaggaaactaagaaccatgaagctcaaatccaggacatgagacaaagacacgcaacagccctggaggagctctcagagcagctggaacaggccaagcggttcaaagcaaatctagagaagaacaagcagggcctggagacagataacaaggagctggcgtgtgaggtgaaggtcctgcagcaggtcaaggctgagtctgagcacaagaggaagaagctcgacgcgcaggtccaggagctccatgccaaggtctctgaaggcgacaggctcagggtggagctggcggagaaagcaagtaagctgcagaatgagctagataatgtctccacccttctggaagaagcagagaagaagggtattaaatttgctaaggatgcagctagtcttgagtctcaactacaggatacacaggagcttcttcaggaggagacacgccagaaactaaacctgagcagtcggatccggcagctggaagaggagaagaacagtcttcaggagcagcaggaggaggaggaggaggccaggaagaacctggagaagcaagtgctggccctgcagtcccagttggctgataccaagaagaaagtagatgacgacctgggaacaattgaaagtctggaagaagccaagaagaagcttctgaaggacgcggaggccctgagccagcgcctggaggagaaggcactggcgtatgacaaactggagaagaccaagaaccgcctgcagcaggagctggacgacctcacggtggacctggaccaccagcgccaggtcgcctccaacttggagaagaagcagaagaagtttgaccagctgttagcagaagagaagagcatctctgctcgctatgccgaagagcgggaccgggccgaagccgaggccagagagaaagaaaccaaagccctgtcactggcccgggccctcgaggaagccctggaggccaaggaggagtttgagaggcagaacaagcagctccgagcagacatggaagacctcatgagctccaaagatgatgtgggaaaaaacgttcacgaacttgaaaaatccaaacgggccctagagcagcaggtggaggaaatgaggacccagctggaggagctggaagacgaactccaggccacggaagatgccaagcttcgtctggaggtcaacatgcaggccatgaaggcgcagttcgagagagacctgcaaaccagggatgagcagaatgaagagaagaagcggctgctgatcaaacaggtgcgggagctcgaggcggagctggaggatgagaggaaacagcgggcgcttgctgtagcttcaaagaaaaagatggagatagacctgaaggacctcgaagcccaaatcgaggctgcgaacaaagctcgggatgaggtgattaagcagctccgcaagctccaggctcagatgaaggattaccaacgtgaattagaagaagctcgtgcatccagagatgagatttttgctcaatccaaagagagtgaaaagaaattgaagagtctggaagcagaaatccttcaattgcaggaggaacttgcctcatctgagcgagcccgccgacacgccgagcaggagagagatgagctggcggacgagatcaccaacagcgcctctggcaagtccgcgctgctggatgagaagcggcgtctggaagctcggatcgcacagctggaggaggagctggaagaggagcagagcaacatggagctgctcaacgaccgcttccgcaagaccactctacaggtggacacactgaacgccgagctagcagccgagcgcagcgccgcccagaagagtgacaatgcacgccagcaactggagcggcagaacaaggagctgaaggccaagctgcaggaactcgagggtgctgtcaagtctaagttcaaggccaccatctcagccctggaggccaagattgggcagctggaggagcagcttgagcaggaagccaaggaacgagcagccgccaacaaattagtccgtcgcactgagaagaagctgaaagaaatcttcatgcaggttgaggatgagcgtcgacacgcggaccagtataaagagcagatggagaaggccaacgctcggatgaagcagcttaaacgccagctggaggaagcagaagaagaagcgacgcgtgccaacgcatctcggcgtaaactccagcgggaactggatgatgccaccgaggccaacgagggcctgagccgcgaggtcagcaccctgaagaaccggctgaggcggggtggccccatcagcttctcttccagccgatctggccggcgccagctgcaccttgaaggagcttccctggagctctccgacgatgacacagaaagtaagaccagtgatgtcaacgagacgcagccaccccagtcagagtaa

SEQ ID NO: 162 - DNA, 6267 bp, Homo sapiens
atggcgccgggttggccctcactatcagcgggctcccgacaggaggcgccccagcttgcggccgggggcagcgcctaccaggcagttggcaggcagttccagccccgggccacggcactgcagggcccgagccaggccaagtcctgtatctgccatgtctgtggcgtccacctcaacaggctgcattcctgcctctactgtgtcttcttcggctgtttcacaaagaagcatattcacgagcatgcgaaggcgaagcggcacaacctggccattgatctgatgtacggaggcatctactgttttctgtgccaggactacatctatgacaaagacatggaaataatcgccaaggaggagcagcgaaaagcttggaaaatgcaaggcgttggagagaagttttcaacttgggaaccaaccaaacgggagcttgaactgctgaagcacaacccgaaaaggagaaagatcacctcgaactgcaccataggtctgcgtgggctgatcaaccttgggaacacatgcttcatgaactgcatcgtgcaggccctgacccacacgccacttctgcgggacttcttcctgtctgacaggcaccgctgtgagatgcagagccccagctcctgtctggtctgtgagatgtcctcactgtttcaggagacttattctggactcttctgtgtagttataaacccttacaagaatcttccaatttactctgagaatattattgaaatgtacagagggaagaagcgtcatgagatgcctccacacatctatgctatatctgaatctgcttacagatgcatgcttcaagatcgtgaggaccagtcaattctttgcacgggtgagtcaggtgctgggaagacagaaaatacaaagaaagttattcagtaccttgcccatgttgcttcttcacataaaggaagaaaggaccataatattcctgaatcgcctaaaccagtgaaacaccagggggaacttgaacggcagcttttgcaagcaaatccaattctggaatcatttggaaatgcgaagactgtgaaaaatgataactcatctcgttttggcaaatttattcggatcaactttgatgtaactggctatatcgttggggccaacattgaaacataccttctggaaaagtctcgtgctgttcgtcaagcaaaagatgaacgtacttttcatatcttttaccagttgttatctggagcaggagaacacctaaagtctgatttgcttcttgaaggatttaataactacaggtttctctccaatggctatattcctattccgggacagcaagacaaagataatttccaggagaccatggaagcaatgcacataatgggcttctcccatgaagagattctgtcaatgcttaaagtagtatcttcagtgctacagtttggaaatatttctttcaaaaaggagagaaatactgatcaagcttccatgccagaaaatacagttgcgcagaagctctgccatcttcttgggatgaatgtgatggagtttactcgggccatcctgactccccggatcaaggtcggccgagactatgtgcaaaaagcccagaccaaagaacaggcagattttgcagtagaagcattggcaaaagctacctatgagcggctctttcgctggctcgttcatcgcatcaataaagctctggataggaccaaacgtcagggagcatctttcattggaatcctggatattgctggatttgaaatttttgagctgaactcctttgaacaactttgcatcaactacaccaatgagaagctgcagcagctgttcaaccacaccatgtttatcctagaacaagaggaataccagcgcgaaggcatcgagtggaacttcatcgatttcgggctggatctgcagccatgcatcgacctaatagagagacctgcgaaccctcctggtgtactggcccttttggatgaagaatgctggttccctaaagccacagataaaacctttgttgaaaaactggttcaagagcaaggttcccactccaagtttcagaaacctcgacaattaaaagacaaagctgatttttgcattatacattatgcagggaaggtggactataaggcagatgagtggctgatgaagaatatggaccccctgaatgacaacgtggccacccttttgcaccagtcatcagacagatttgtggcagagctttggaaagatgtggaccgtatcgtgggtctggatcaagtcactggtatgactgagacagcttttggctccgcatataaaaccaagaagggcatgtttcgtaccgttgggcaactctacaaagaatctctcaccaagctgatggcaactctccgaaacaccaaccctaactttgttcgttgtatcattccaaatcacgagaagagggctggaaaattggatccacacctagtcctagatcagcttcgctgtaacggtgtcctggaagggatccgaatctgtcgccagggcttccctaaccgaatagttttccaggaattcagacagagatatgagatcctaactccaaatgctattcctaaaggttttatggatggtaaacaggcctgtgaacgaatgatccgggctttagaattggacccaaacttgtacagaattggacagagcaagatatttttcagagctggagttctggcacacttagaggaagaaagagatttaaaaatcaccgatatcattatcttcttccaggccgtttgcagaggttacctggccagaaaggcctttgccaagaagcagcagcaactaagtgccttaaaggtcttgcagcggaactgtgccgcgtacctgaaattacggcactggcagtggtggcgagtcttcacaaaggtgaagccgcttctacaagtgactcgccaggaggaagaacttcaggccaaagatgaagagctgttgaaggtgaaggagaagcagacgaaggtggaaggagagctggaggagatggagcggaagcaccagcagcttttagaagagaagaatatccttgcagaacaactacaagcagagactgagctctttgctgaagcagaagagatgagggcaagacttgctgctaaaaagcaggaattagaagagattctacatgacttggagtctagggttgaagaagaagaagaaagaaaccaaatcctccaaaatgaaaagaaaaaaatgcaagcacatattcaggacctggaagaacagctagacgaggaggaaggggctcggcaaaagctgcagctggaaaaggtgacagcagaggccaagatcaagaagatggaagaggagattctgcttctcgaggaccaaaattccaagttcatcaaagaaaagaaactcatggaagatcgcattgctgagtgttcctctcagctggctgaagaggaagaaaaggcgaaaaacttggccaaaatcaggaataagcaagaagtgatgatctcagatttagaagaacgcttaaagaaggaagaaaagactcgtcaggaactggaaaaggccaaaagaaaactcgacggggagacgaccgacctgcaggaccagatcgcagagctgcaggcgcagattgatgagctcaagctgcagctggccaagaaggaggaggagctgcagggcgcactggccagaggtgatgatgaaacactccataagaacaatgcccttaaagttgtgcgagagctacaagcccaaattgctgaacttcaggaagactttgaatccgagaaggcttcacggaacaaggccgaaaagcagaaaagggacttgagtgaggaactggaagctctgaaaacagagctggaggacacgctggacaccacggcagcccagcaggaactacgtacaaaacgtgaacaagaagtggcagagctgaagaaagctcttgaggaggaaactaagaaccatgaagctcaaatccaggacatgagacaaagacacgcaacagccctggaggagctctcagagcagctggaacaggccaagcggttcaaagcaaatctagagaagaacaagcagggcctggagacagataacaaggagctggcgtgtgaggtgaaggtcctgcagcaggtcaaggctgagtctgagcacaagaggaagaagctcgacgcgcaggtccaggagctccatgccaaggtctctgaaggcgacaggctcagggtggagctggcggagaaagcaagtaagctgcagaatgagctagataatgtctccacccttctggaagaagcagagaagaagggtattaaatttgctaaggatgcagctagtcttgagtctcaactacaggatacacaggagcttcttcaggaggagacacgccagaaactaaacctgagcagtcggatccggcagctggaagaggagaagaacagtcttcaggagcagcaggaggaggaggaggaggccaggaagaacctggagaagcaagtgctggccctgcagtcccagttggctgataccaagaagaaagtagatgacgacctgggaacaattgaaagtctggaagaagccaagaagaagcttctgaaggacgcggaggccctgagccagcgcctggaggagaaggcactggcgtatgacaaactggagaagaccaagaaccgcctgcagcaggagctggacgacctcacggtggacctggaccaccagcgccaggtcgcctccaacttggagaagaagcagaagaagtttgaccagctgttagcagaagagaagagcatctctgctcgctatgccgaagagcgggaccgggccgaagccgaggccagagagaaagaaaccaaagccctgtcactggcccgggccctcgaggaagccctggaggccaaggaggagtttgagaggcagaacaagcagctccgagcagacatggaagacctcatgagctccaaagatgatgtgggaaaaaacgttcacgaacttgaaaaatccaaacgggccctagagcagcaggtggaggaaatgaggacccagctggaggagctggaagacgaactccaggccacggaagatgccaagcttcgtctggaggtcaacatgcaggccatgaaggcgcagttcgagagagacctgcaaaccagggatgagcagaatgaagagaagaagcggctgctgatcaaacaggtgcgggagctcgaggcggagctggaggatgagaggaaacagcgggcgcttgctgtagcttcaaagaaaaagatggagatagacctgaaggacctcgaagcccaaatcgaggctgcgaacaaagctcgggatgaggtgattaagcagctccgcaagctccaggctcagatgaaggattaccaacgtgaattagaagaagctcgtgcatccagagatgagatttttgctcaatccaaagagagtgaaaagaaattgaagagtctggaagcagaaatccttcaattgcaggaggaacttgcctcatctgagcgagcccgccgacacgccgagcaggagagagatgagctggcggacgagatcaccaacagcgcctctggcaagtccgcgctgctggatgagaagcggcgtctggaagctcggatcgcacagctggaggaggagctggaagaggagcagagcaacatggagctgctcaacgaccgcttccgcaagaccactctacaggtggacacactgaacgccgagctagcagccgagcgcagcgccgcccagaagagtgacaatgcacgccagcaactggagcggcagaacaaggagctgaaggccaagctgcaggaactcgagggtgctgtcaagtctaagttcaaggccaccatctcagccctggaggccaagattgggcagctggaggagcagcttgagcaggaagccaaggaacgagcagccgccaacaaattagtccgtcgcactgagaagaagctgaaagaaatcttcatgcaggttgaggatgagcgtcgacacgcggaccagtataaagagcagatggagaaggccaacgctcggatgaagcagcttaaacgccagctggaggaagcagaagaagaagcgacgcgtgccaacgcatctcggcgtaaactccagcgggaactggatgatgccaccgaggccaacgagggcctgagccgcgaggtcagcaccctgaagaaccggctgaggcggggtggccccatcagcttctcttccagccgatctggccggcgccagctgcaccttgaaggagcttccctggagctctccgacgatgacacagaaagtaagaccagtgatgtcaacgagacgcagccaccccagtcagagtaa

SEQ ID NO: 163 - DNA, 6303 bp, Homo sapiens
atggtgtcccggccagagcccgagggcgaggccatggacgccgagctggcggtagcgccgccgggctgctcgcacctgggcagcttcaaggtggacaactggaagcagaacctgcgggccatctaccagtgcttcgtgtggagcggcacggctgaggcccgcaagcgcaaggccaagtcctgtatctgccatgtctgtggcgtccacctcaacaggctgcattcctgcctctactgtgtcttcttcggctgtttcacaaagaagcatattcacgagcatgcgaaggcgaagcggcacaacctggccattgatctgatgtacggaggcatctactgttttctgtgccaggactacatctatgacaaagacatggaaataatcgccaaggaggagcagcgaaaagcttggaaaatgcaaggcgttggagagaagttttcaacttgggaaccaaccaaacgggagcttgaactgctgaagcacaacccgaaaaggagaaagatcacctcgaactgcaccataggtctgcgtgggctgatcaaccttgggaacacatgcttcatgaactgcatcgtgcaggccctgacccacacgccacttctgcgggacttcttcctgtctgacaggcaccgctgtgagatgcagagccccagctcctgtctggtctgtgagatgtcctcactgtttcaggagacttattctggactcttctgtgtagttataaacccttacaagaatcttccaatttactctgagaatattattgaaatgtacagagggaagaagcgtcatgagatgcctccacacatctatgctatatctgaatctgcttacagatgcatgcttcaagatcgtgaggaccagtcaattctttgcacgggtgagtcaggtgctgggaagacagaaaatacaaagaaagttattcagtaccttgcccatgttgcttcttcacataaaggaagaaaggaccataatattcctgaatcgcctaaaccagtgaaacaccagggggaacttgaacggcagcttttgcaagcaaatccaattctggaatcatttggaaatgcgaagactgtgaaaaatgataactcatctcgttttggcaaatttattcggatcaactttgatgtaactggctatatcgttggggccaacattgaaacataccttctggaaaagtctcgtgctgttcgtcaagcaaaagatgaacgtacttttcatatcttttaccagttgttatctggagcaggagaacacctaaagtctgatttgcttcttgaaggatttaataactacaggtttctctccaatggctatattcctattccgggacagcaagacaaagataatttccaggagaccatggaagcaatgcacataatgggcttctcccatgaagagattctgtcaatgcttaaagtagtatcttcagtgctacagtttggaaatatttctttcaaaaaggagagaaatactgatcaagcttccatgccagaaaatacagttgcgcagaagctctgccatcttcttgggatgaatgtgatggagtttactcgggccatcctgactccccggatcaaggtcggccgagactatgtgcaaaaagcccagaccaaagaacaggcagattttgcagtagaagcattggcaaaagctacctatgagcggctctttcgctggctcgttcatcgcatcaataaagctctggataggaccaaacgtcagggagcatctttcattggaatcctggatattgctggatttgaaatttttgagctgaactcctttgaacaactttgcatcaactacaccaatgagaagctgcagcagctgttcaaccacaccatgtttatcctagaacaagaggaataccagcgcgaaggcatcgagtggaacttcatcgatttcgggctggatctgcagccatgcatcgacctaatagagagacctgcgaaccctcctggtgtactggcccttttggatgaagaatgctggttccctaaagccacagataaaacctttgttgaaaaactggttcaagagcaaggttcccactccaagtttcagaaacctcgacaattaaaagacaaagctgatttttgcattatacattatgcagggaaggtggactataaggcagatgagtggctgatgaagaatatggaccccctgaatgacaacgtggccacccttttgcaccagtcatcagacagatttgtggcagagctttggaaagatgtggaccgtatcgtgggtctggatcaagtcactggtatgactgagacagcttttggctccgcatataaaaccaagaagggcatgtttcgtaccgttgggcaactctacaaagaatctctcaccaagctgatggcaactctccgaaacaccaaccctaactttgttcgttgtatcattccaaatcacgagaagagggctggaaaattggatccacacctagtcctagatcagcttcgctgtaacggtgtcctggaagggatccgaatctgtcgccagggcttccctaaccgaatagttttccaggaattcagacagagatatgagatcctaactccaaatgctattcctaaaggttttatggatggtaaacaggcctgtgaacgaatgatccgggctttagaattggacccaaacttgtacagaattggacagagcaagatatttttcagagctggagttctggcacacttagaggaagaaagagatttaaaaatcaccgatatcattatcttcttccaggccgtttgcagaggttacctggccagaaaggcctttgccaagaagcagcagcaactaagtgccttaaaggtcttgcagcggaactgtgccgcgtacctgaaattacggcactggcagtggtggcgagtcttcacaaaggtgaagccgcttctacaagtgactcgccaggaggaagaacttcaggccaaagatgaagagctgttgaaggtgaaggagaagcagacgaaggtggaaggagagctggaggagatggagcggaagcaccagcagcttttagaagagaagaatatccttgcagaacaactacaagcagagactgagctctttgctgaagcagaagagatgagggcaagacttgctgctaaaaagcaggaattagaagagattctacatgacttggagtctagggttgaagaagaagaagaaagaaaccaaatcctccaaaatgaaaagaaaaaaatgcaagcacatattcaggacctggaagaacagctagacgaggaggaaggggctcggcaaaagctgcagctggaaaaggtgacagcagaggccaagatcaagaagatggaagaggagattctgcttctcgaggaccaaaattccaagttcatcaaagaaaagaaactcatggaagatcgcattgctgagtgttcctctcagctggctgaagaggaagaaaaggcgaaaaacttggccaaaatcaggaataagcaagaagtgatgatctcagatttagaagaacgcttaaagaaggaagaaaagactcgtcaggaactggaaaaggccaaaagaaaactcgacggggagacgaccgacctgcaggaccagatcgcagagctgcaggcgcagattgatgagctcaagctgcagctggccaagaaggaggaggagctgcagggcgcactggccagaggtgatgatgaaacactccataagaacaatgcccttaaagttgtgcgagagctacaagcccaaattgctgaacttcaggaagactttgaatccgagaaggcttcacggaacaaggccgaaaagcagaaaagggacttgagtgaggaactggaagctctgaaaacagagctggaggacacgctggacaccacggcagcccagcaggaactacgtacaaaacgtgaacaagaagtggcagagctgaagaaagctcttgaggaggaaactaagaaccatgaagctcaaatccaggacatgagacaaagacacgcaacagccctggaggagctctcagagcagctggaacaggccaagcggttcaaagcaaatctagagaagaacaagcagggcctggagacagataacaaggagctggcgtgtgaggtgaaggtcctgcagcaggtcaaggctgagtctgagcacaagaggaagaagctcgacgcgcaggtccaggagctccatgccaaggtctctgaaggcgacaggctcagggtggagctggcggagaaagcaagtaagctgcagaatgagctagataatgtctccacccttctggaagaagcagagaagaagggtattaaatttgctaaggatgcagctagtcttgagtctcaactacaggatacacaggagcttcttcaggaggagacacgccagaaactaaacctgagcagtcggatccggcagctggaagaggagaagaacagtcttcaggagcagcaggaggaggaggaggaggccaggaagaacctggagaagcaagtgctggccctgcagtcccagttggctgataccaagaagaaagtagatgacgacctgggaacaattgaaagtctggaagaagccaagaagaagcttctgaaggacgcggaggccctgagccagcgcctggaggagaaggcactggcgtatgacaaactggagaagaccaagaaccgcctgcagcaggagctggacgacctcacggtggacctggaccaccagcgccaggtcgcctccaacttggagaagaagcagaagaagtttgaccagctgttagcagaagagaagagcatctctgctcgctatgccgaagagcgggaccgggccgaagccgaggccagagagaaagaaaccaaagccctgtcactggcccgggccctcgaggaagccctggaggccaaggaggagtttgagaggcagaacaagcagctccgagcagacatggaagacctcatgagctccaaagatgatgtgggaaaaaacgttcacgaacttgaaaaatccaaacgggccctagagcagcaggtggaggaaatgaggacccagctggaggagctggaagacgaactccaggccacggaagatgccaagcttcgtctggaggtcaacatgcaggccatgaaggcgcagttcgagagagacctgcaaaccagggatgagcagaatgaagagaagaagcggctgctgatcaaacaggtgcgggagctcgaggcggagctggaggatgagaggaaacagcgggcgcttgctgtagcttcaaagaaaaagatggagatagacctgaaggacctcgaagcccaaatcgaggctgcgaacaaagctcgggatgaggtgattaagcagctccgcaagctccaggctcagatgaaggattaccaacgtgaattagaagaagctcgtgcatccagagatgagatttttgctcaatccaaagagagtgaaaagaaattgaagagtctggaagcagaaatccttcaattgcaggaggaacttgcctcatctgagcgagcccgccgacacgccgagcaggagagagatgagctggcggacgagatcaccaacagcgcctctggcaagtccgcgctgctggatgagaagcggcgtctggaagctcggatcgcacagctggaggaggagctggaagaggagcagagcaacatggagctgctcaacgaccgcttccgcaagaccactctacaggtggacacactgaacgccgagctagcagccgagcgcagcgccgcccagaagagtgacaatgcacgccagcaactggagcggcagaacaaggagctgaaggccaagctgcaggaactcgagggtgctgtcaagtctaagttcaaggccaccatctcagccctggaggccaagattgggcagctggaggagcagcttgagcaggaagccaaggaacgagcagccgccaacaaattagtccgtcgcactgagaagaagctgaaagaaatcttcatgcaggttgaggatgagcgtcgacacgcggaccagtataaagagcagatggagaaggccaacgctcggatgaagcagcttaaacgccagctggaggaagcagaagaagaagcgacgcgtgccaacgcatctcggcgtaaactccagcgggaactggatgatgccaccgaggccaacgagggcctgagccgcgaggtcagcaccctgaagaaccggctgaggcggggtggccccatcagcttctcttccagccgatctggccggcgccagctgcaccttgaaggagcttccctggagctctccgacgatgacacagaaagtaagaccagtgatgtcaacgagacgcagccaccccagtcagagtaa

SEQ ID NO: 164 - DNA, 6240 bp, Homo sapiens
atggcgccgggttggccctcactatcagcgggctcccgacaggaggcgccccagcttgcggccgggggcagcgcctaccaggcagttggcaggcagttccagccccgggccacggcactgcagggcccgagccaggccaagtcctgtatctgccatgtctgtggcgtccacctcaacaggctgcattcctgcctctactgtgtcttcttcggctgtttcacaaagaagcatattcacgagcatgcgaaggcgaagcggcacaacctggccattgatctgatgtacggaggcatctactgttttctgtgccaggactacatctatgacaaagacatggaaataatcgccaaggaggagcagcgaaaagcttggaaaatgcaaggcgttggagagaagttttcaacttgggaaccaaccaaacgggagcttgaactgctgaagcacaacccgaaaaggagaaagatcacctcgaactgcaccataggtctgcgtgggctgatcaaccttgggaacacatgcttcatgaactgcatcgtgcaggccctgacccacacgccacttctgcgggacttcttcctgtctgacaggcaccgctgtgagatgcagagccccagctcctgtctggtctgtgagatgtcctcactgtttcaggagacttattctggactcttctgtgtagttataaacccttacaagaatcttccaatttactctgagaatattattgaaatgtacagagggaagaagcgtcatgagatgcctccacacatctatgctatatctgaatctgcttacagatgcatgcttcaagatcgtgaggaccagtcaattctttgcacgggtgagtcaggtgctgggaagacagaaaatacaaagaaagttattcagtaccttgcccatgttgcttcttcacataaaggaagaaaggaccataatattcctggggaacttgaacggcagcttttgcaagcaaatccaattctggaatcatttggaaatgcgaagactgtgaaaaatgataactcatctcgttttggcaaatttattcggatcaactttgatgtaactggctatatcgttggggccaacattgaaacataccttctggaaaagtctcgtgctgttcgtcaagcaaaagatgaacgtacttttcatatcttttaccagttgttatctggagcaggagaacacctaaagtctgatttgcttcttgaaggatttaataactacaggtttctctccaatggctatattcctattccgggacagcaagacaaagataatttccaggagaccatggaagcaatgcacataatgggcttctcccatgaagagattctgtcaatgcttaaagtagtatcttcagtgctacagtttggaaatatttctttcaaaaaggagagaaatactgatcaagcttccatgccagaaaatacagttgcgcagaagctctgccatcttcttgggatgaatgtgatggagtttactcgggccatcctgactccccggatcaaggtcggccgagactatgtgcaaaaagcccagaccaaagaacaggcagattttgcagtagaagcattggcaaaagctacctatgagcggctctttcgctggctcgttcatcgcatcaataaagctctggataggaccaaacgtcagggagcatctttcattggaatcctggatattgctggatttgaaatttttgagctgaactcctttgaacaactttgcatcaactacaccaatgagaagctgcagcagctgttcaaccacaccatgtttatcctagaacaagaggaataccagcgcgaaggcatcgagtggaacttcatcgatttcgggctggatctgcagccatgcatcgacctaatagagagacctgcgaaccctcctggtgtactggcccttttggatgaagaatgctggttccctaaagccacagataaaacctttgttgaaaaactggttcaagagcaaggttcccactccaagtttcagaaacctcgacaattaaaagacaaagctgatttttgcattatacattatgcagggaaggtggactataaggcagatgagtggctgatgaagaatatggaccccctgaatgacaacgtggccacccttttgcaccagtcatcagacagatttgtggcagagctttggaaagatgtggaccgtatcgtgggtctggatcaagtcactggtatgactgagacagcttttggctccgcatataaaaccaagaagggcatgtttcgtaccgttgggcaactctacaaagaatctctcaccaagctgatggcaactctccgaaacaccaaccctaactttgttcgttgtatcattccaaatcacgagaagagggctggaaaattggatccacacctagtcctagatcagcttcgctgtaacggtgtcctggaagggatccgaatctgtcgccagggcttccctaaccgaatagttttccaggaattcagacagagatatgagatcctaactccaaatgctattcctaaaggttttatggatggtaaacaggcctgtgaacgaatgatccgggctttagaattggacccaaacttgtacagaattggacagagcaagatatttttcagagctggagttctggcacacttagaggaagaaagagatttaaaaatcaccgatatcattatcttcttccaggccgtttgcagaggttacctggccagaaaggcctttgccaagaagcagcagcaactaagtgccttaaaggtcttgcagcggaactgtgccgcgtacctgaaattacggcactggcagtggtggcgagtcttcacaaaggtgaagccgcttctacaagtgactcgccaggaggaagaacttcaggccaaagatgaagagctgttgaaggtgaaggagaagcagacgaaggtggaaggagagctggaggagatggagcggaagcaccagcagcttttagaagagaagaatatccttgcagaacaactacaagcagagactgagctctttgctgaagcagaagagatgagggcaagacttgctgctaaaaagcaggaattagaagagattctacatgacttggagtctagggttgaagaagaagaagaaagaaaccaaatcctccaaaatgaaaagaaaaaaatgcaagcacatattcaggacctggaagaacagctagacgaggaggaaggggctcggcaaaagctgcagctggaaaaggtgacagcagaggccaagatcaagaagatggaagaggagattctgcttctcgaggaccaaaattccaagttcatcaaagaaaagaaactcatggaagatcgcattgctgagtgttcctctcagctggctgaagaggaagaaaaggcgaaaaacttggccaaaatcaggaataagcaagaagtgatgatctcagatttagaagaacgcttaaagaaggaagaaaagactcgtcaggaactggaaaaggccaaaagaaaactcgacggggagacgaccgacctgcaggaccagatcgcagagctgcaggcgcagattgatgagctcaagctgcagctggccaagaaggaggaggagctgcagggcgcactggccagaggtgatgatgaaacactccataagaacaatgcccttaaagttgtgcgagagctacaagcccaaattgctgaacttcaggaagactttgaatccgagaaggcttcacggaacaaggccgaaaagcagaaaagggacttgagtgaggaactggaagctctgaaaacagagctggaggacacgctggacaccacggcagcccagcaggaactacgtacaaaacgtgaacaagaagtggcagagctgaagaaagctcttgaggaggaaactaagaaccatgaagctcaaatccaggacatgagacaaagacacgcaacagccctggaggagctctcagagcagctggaacaggccaagcggttcaaagcaaatctagagaagaacaagcagggcctggagacagataacaaggagctggcgtgtgaggtgaaggtcctgcagcaggtcaaggctgagtctgagcacaagaggaagaagctcgacgcgcaggtccaggagctccatgccaaggtctctgaaggcgacaggctcagggtggagctggcggagaaagcaagtaagctgcagaatgagctagataatgtctccacccttctggaagaagcagagaagaagggtattaaatttgctaaggatgcagctagtcttgagtctcaactacaggatacacaggagcttcttcaggaggagacacgccagaaactaaacctgagcagtcggatccggcagctggaagaggagaagaacagtcttcaggagcagcaggaggaggaggaggaggccaggaagaacctggagaagcaagtgctggccctgcagtcccagttggctgataccaagaagaaagtagatgacgacctgggaacaattgaaagtctggaagaagccaagaagaagcttctgaaggacgcggaggccctgagccagcgcctggaggagaaggcactggcgtatgacaaactggagaagaccaagaaccgcctgcagcaggagctggacgacctcacggtggacctggaccaccagcgccaggtcgcctccaacttggagaagaagcagaagaagtttgaccagctgttagcagaagagaagagcatctctgctcgctatgccgaagagcgggaccgggccgaagccgaggccagagagaaagaaaccaaagccctgtcactggcccgggccctcgaggaagccctggaggccaaggaggagtttgagaggcagaacaagcagctccgagcagacatggaagacctcatgagctccaaagatgatgtgggaaaaaacgttcacgaacttgaaaaatccaaacgggccctagagcagcaggtggaggaaatgaggacccagctggaggagctggaagacgaactccaggccacggaagatgccaagcttcgtctggaggtcaacatgcaggccatgaaggcgcagttcgagagagacctgcaaaccagggatgagcagaatgaagagaagaagcggctgctgatcaaacaggtgcgggagctcgaggcggagctggaggatgagaggaaacagcgggcgcttgctgtagcttcaaagaaaaagatggagatagacctgaaggacctcgaagcccaaatcgaggctgcgaacaaagctcgggatgaggtgattaagcagctccgcaagctccaggctcagatgaaggattaccaacgtgaattagaagaagctcgtgcatccagagatgagatttttgctcaatccaaagagagtgaaaagaaattgaagagtctggaagcagaaatccttcaattgcaggaggaacttgcctcatctgagcgagcccgccgacacgccgagcaggagagagatgagctggcggacgagatcaccaacagcgcctctggcaagtccgcgctgctggatgagaagcggcgtctggaagctcggatcgcacagctggaggaggagctggaagaggagcagagcaacatggagctgctcaacgaccgcttccgcaagaccactctacaggtggacacactgaacgccgagctagcagccgagcgcagcgccgcccagaagagtgacaatgcacgccagcaactggagcggcagaacaaggagctgaaggccaagctgcaggaactcgagggtgctgtcaagtctaagttcaaggccaccatctcagccctggaggccaagattgggcagctggaggagcagcttgagcaggaagccaaggaacgagcagccgccaacaaattagtccgtcgcactgagaagaagctgaaagaaatcttcatgcaggttgaggatgagcgtcgacacgcggaccagtataaagagcagatggagaaggccaacgctcggatgaagcagcttaaacgccagctggaggaagcagaagaagaagcgacgcgtgccaacgcatctcggcgtaaactccagcgggaactggatgatgccaccgaggccaacgagggcctgagccgcgaggtcagcaccctgaagaaccggctgaggcggggtggccccatcagcttctcttccagccgatctggccggcgccagctgcaccttgaaggagcttccctggagctctccgacgatgacacagaaagtaagaccagtgatgtcaacgagacgcagccaccccagtcagagtaa

SEQ ID NO: 165 - DNA, 6276 bp, Homo sapiens
atggtgtcccggccagagcccgagggcgaggccatggacgccgagctggcggtagcgccgccgggctgctcgcacctgggcagcttcaaggtggacaactggaagcagaacctgcgggccatctaccagtgcttcgtgtggagcggcacggctgaggcccgcaagcgcaaggccaagtcctgtatctgccatgtctgtggcgtccacctcaacaggctgcattcctgcctctactgtgtcttcttcggctgtttcacaaagaagcatattcacgagcatgcgaaggcgaagcggcacaacctggccattgatctgatgtacggaggcatctactgttttctgtgccaggactacatctatgacaaagacatggaaataatcgccaaggaggagcagcgaaaagcttggaaaatgcaaggcgttggagagaagttttcaacttgggaaccaaccaaacgggagcttgaactgctgaagcacaacccgaaaaggagaaagatcacctcgaactgcaccataggtctgcgtgggctgatcaaccttgggaacacatgcttcatgaactgcatcgtgcaggccctgacccacacgccacttctgcgggacttcttcctgtctgacaggcaccgctgtgagatgcagagccccagctcctgtctggtctgtgagatgtcctcactgtttcaggagacttattctggactcttctgtgtagttataaacccttacaagaatcttccaatttactctgagaatattattgaaatgtacagagggaagaagcgtcatgagatgcctccacacatctatgctatatctgaatctgcttacagatgcatgcttcaagatcgtgaggaccagtcaattctttgcacgggtgagtcaggtgctgggaagacagaaaatacaaagaaagttattcagtaccttgcccatgttgcttcttcacataaaggaagaaaggaccataatattcctggggaacttgaacggcagcttttgcaagcaaatccaattctggaatcatttggaaatgcgaagactgtgaaaaatgataactcatctcgttttggcaaatttattcggatcaactttgatgtaactggctatatcgttggggccaacattgaaacataccttctggaaaagtctcgtgctgttcgtcaagcaaaagatgaacgtacttttcatatcttttaccagttgttatctggagcaggagaacacctaaagtctgatttgcttcttgaaggatttaataactacaggtttctctccaatggctatattcctattccgggacagcaagacaaagataatttccaggagaccatggaagcaatgcacataatgggcttctcccatgaagagattctgtcaatgcttaaagtagtatcttcagtgctacagtttggaaatatttctttcaaaaaggagagaaatactgatcaagcttccatgccagaaaatacagttgcgcagaagctctgccatcttcttgggatgaatgtgatggagtttactcgggccatcctgactccccggatcaaggtcggccgagactatgtgcaaaaagcccagaccaaagaacaggcagattttgcagtagaagcattggcaaaagctacctatgagcggctctttcgctggctcgttcatcgcatcaataaagctctggataggaccaaacgtcagggagcatctttcattggaatcctggatattgctggatttgaaatttttgagctgaactcctttgaacaactttgcatcaactacaccaatgagaagctgcagcagctgttcaaccacaccatgtttatcctagaacaagaggaataccagcgcgaaggcatcgagtggaacttcatcgatttcgggctggatctgcagccatgcatcgacctaatagagagacctgcgaaccctcctggtgtactggcccttttggatgaagaatgctggttccctaaagccacagataaaacctttgttgaaaaactggttcaagagcaaggttcccactccaagtttcagaaacctcgacaattaaaagacaaagctgatttttgcattatacattatgcagggaaggtggactataaggcagatgagtggctgatgaagaatatggaccccctgaatgacaacgtggccacccttttgcaccagtcatcagacagatttgtggcagagctttggaaagatgtggaccgtatcgtgggtctggatcaagtcactggtatgactgagacagcttttggctccgcatataaaaccaagaagggcatgtttcgtaccgttgggcaactctacaaagaatctctcaccaagctgatggcaactctccgaaacaccaaccctaactttgttcgttgtatcattccaaatcacgagaagagggctggaaaattggatccacacctagtcctagatcagcttcgctgtaacggtgtcctggaagggatccgaatctgtcgccagggcttccctaaccgaatagttttccaggaattcagacagagatatgagatcctaactccaaatgctattcctaaaggttttatggatggtaaacaggcctgtgaacgaatgatccgggctttagaattggacccaaacttgtacagaattggacagagcaagatatttttcagagctggagttctggcacacttagaggaagaaagagatttaaaaatcaccgatatcattatcttcttccaggccgtttgcagaggttacctggccagaaaggcctttgccaagaagcagcagcaactaagtgccttaaaggtcttgcagcggaactgtgccgcgtacctgaaattacggcactggcagtggtggcgagtcttcacaaaggtgaagccgcttctacaagtgactcgccaggaggaagaacttcaggccaaagatgaagagctgttgaaggtgaaggagaagcagacgaaggtggaaggagagctggaggagatggagcggaagcaccagcagcttttagaagagaagaatatccttgcagaacaactacaagcagagactgagctctttgctgaagcagaagagatgagggcaagacttgctgctaaaaagcaggaattagaagagattctacatgacttggagtctagggttgaagaagaagaagaaagaaaccaaatcctccaaaatgaaaagaaaaaaatgcaagcacatattcaggacctggaagaacagctagacgaggaggaaggggctcggcaaaagctgcagctggaaaaggtgacagcagaggccaagatcaagaagatggaagaggagattctgcttctcgaggaccaaaattccaagttcatcaaagaaaagaaactcatggaagatcgcattgctgagtgttcctctcagctggctgaagaggaagaaaaggcgaaaaacttggccaaaatcaggaataagcaagaagtgatgatctcagatttagaagaacgcttaaagaaggaagaaaagactcgtcaggaactggaaaaggccaaaagaaaactcgacggggagacgaccgacctgcaggaccagatcgcagagctgcaggcgcagattgatgagctcaagctgcagctggccaagaaggaggaggagctgcagggcgcactggccagaggtgatgatgaaacactccataagaacaatgcccttaaagttgtgcgagagctacaagcccaaattgctgaacttcaggaagactttgaatccgagaaggcttcacggaacaaggccgaaaagcagaaaagggacttgagtgaggaactggaagctctgaaaacagagctggaggacacgctggacaccacggcagcccagcaggaactacgtacaaaacgtgaacaagaagtggcagagctgaagaaagctcttgaggaggaaactaagaaccatgaagctcaaatccaggacatgagacaaagacacgcaacagccctggaggagctctcagagcagctggaacaggccaagcggttcaaagcaaatctagagaagaacaagcagggcctggagacagataacaaggagctggcgtgtgaggtgaaggtcctgcagcaggtcaaggctgagtctgagcacaagaggaagaagctcgacgcgcaggtccaggagctccatgccaaggtctctgaaggcgacaggctcagggtggagctggcggagaaagcaagtaagctgcagaatgagctagataatgtctccacccttctggaagaagcagagaagaagggtattaaatttgctaaggatgcagctagtcttgagtctcaactacaggatacacaggagcttcttcaggaggagacacgccagaaactaaacctgagcagtcggatccggcagctggaagaggagaagaacagtcttcaggagcagcaggaggaggaggaggaggccaggaagaacctggagaagcaagtgctggccctgcagtcccagttggctgataccaagaagaaagtagatgacgacctgggaacaattgaaagtctggaagaagccaagaagaagcttctgaaggacgcggaggccctgagccagcgcctggaggagaaggcactggcgtatgacaaactggagaagaccaagaaccgcctgcagcaggagctggacgacctcacggtggacctggaccaccagcgccaggtcgcctccaacttggagaagaagcagaagaagtttgaccagctgttagcagaagagaagagcatctctgctcgctatgccgaagagcgggaccgggccgaagccgaggccagagagaaagaaaccaaagccctgtcactggcccgggccctcgaggaagccctggaggccaaggaggagtttgagaggcagaacaagcagctccgagcagacatggaagacctcatgagctccaaagatgatgtgggaaaaaacgttcacgaacttgaaaaatccaaacgggccctagagcagcaggtggaggaaatgaggacccagctggaggagctggaagacgaactccaggccacggaagatgccaagcttcgtctggaggtcaacatgcaggccatgaaggcgcagttcgagagagacctgcaaaccagggatgagcagaatgaagagaagaagcggctgctgatcaaacaggtgcgggagctcgaggcggagctggaggatgagaggaaacagcgggcgcttgctgtagcttcaaagaaaaagatggagatagacctgaaggacctcgaagcccaaatcgaggctgcgaacaaagctcgggatgaggtgattaagcagctccgcaagctccaggctcagatgaaggattaccaacgtgaattagaagaagctcgtgcatccagagatgagatttttgctcaatccaaagagagtgaaaagaaattgaagagtctggaagcagaaatccttcaattgcaggaggaacttgcctcatctgagcgagcccgccgacacgccgagcaggagagagatgagctggcggacgagatcaccaacagcgcctctggcaagtccgcgctgctggatgagaagcggcgtctggaagctcggatcgcacagctggaggaggagctggaagaggagcagagcaacatggagctgctcaacgaccgcttccgcaagaccactctacaggtggacacactgaacgccgagctagcagccgagcgcagcgccgcccagaagagtgacaatgcacgccagcaactggagcggcagaacaaggagctgaaggccaagctgcaggaactcgagggtgctgtcaagtctaagttcaaggccaccatctcagccctggaggccaagattgggcagctggaggagcagcttgagcaggaagccaaggaacgagcagccgccaacaaattagtccgtcgcactgagaagaagctgaaagaaatcttcatgcaggttgaggatgagcgtcgacacgcggaccagtataaagagcagatggagaaggccaacgctcggatgaagcagcttaaacgccagctggaggaagcagaagaagaagcgacgcgtgccaacgcatctcggcgtaaactccagcgggaactggatgatgccaccgaggccaacgagggcctgagccgcgaggtcagcaccctgaagaaccggctgaggcggggtggccccatcagcttctcttccagccgatctggccggcgccagctgcaccttgaaggagcttccctggagctctccgacgatgacacagaaagtaagaccagtgatgtcaacgagacgcagccaccccagtcagagtaa

SEQ ID NO: 166 - DNA, 6333 bp, Homo sapiens
atggcgccgggttggccctcactatcagcgggctcccgacaggaggcgccccagcttgcggccgggggcagcgcctaccaggcagttggcaggcagttccagccccgggccacggcactgcagggcccgagccaggccaagtcctgtatctgccatgtctgtggcgtccacctcaacaggctgcattcctgcctctactgtgtcttcttcggctgtttcacaaagaagcatattcacgagcatgcgaaggcgaagcggcacaacctggccattgatctgatgtacggaggcatctactgttttctgtgccaggactacatctatgacaaagacatggaaataatcgccaaggaggagcagcgaaaagcttggaaaatgcaaggcgttggagagaagttttcaacttgggaaccaaccaaacgggagcttgaactgctgaagcacaacccgaaaaggagaaagatcacctcgaactgcaccataggtctgcgtgggctgatcaaccttgggaacacatgcttcatgaactgcatcgtgcaggccctgacccacacgccacttctgcgggacttcttcctgtctgacaggcaccgctgtgagatgcagagccccagctcctgtctggtctgtgagatgtcctcactgtttcaggagacttattctggactcttctgtgtagttataaacccttacaagaatcttccaatttactctgagaatattattgaaatgtacagagggaagaagcgtcatgagatgcctccacacatctatgctatatctgaatctgcttacagatgcatgcttcaagatcgtgaggaccagtcaattctttgcacgggtgagtcaggtgctgggaagacagaaaatacaaagaaagttattcagtaccttgcccatgttgcttcttcacataaaggaagaaaggaccataatattcctcaggaatcgcctaaaccagtgaaacaccagggggaacttgaacggcagcttttgcaagcaaatccaattctggaatcatttggaaatgcgaagactgtgaaaaatgataactcatctcgttttggcaaatttattcggatcaactttgatgtaactggctatatcgttggggccaacattgaaacataccttctggaaaagtctcgtgctgttcgtcaagcaaaagatgaacgtacttttcatatcttttaccagttgttatctggagcaggagaacacctaaagtctgatttgcttcttgaaggatttaataactacaggtttctctccaatggctatattcctattccgggacagcaagacaaagataatttccaggagaccatggaagcaatgcacataatgggcttctcccatgaagagattctgtcaatgcttaaagtagtatcttcagtgctacagtttggaaatatttctttcaaaaaggagagaaatactgatcaagcttccatgccagaaaatacagttgcgcagaagctctgccatcttcttgggatgaatgtgatggagtttactcgggccatcctgactccccggatcaaggtcggccgagactatgtgcaaaaagcccagaccaaagaacaggcagattttgcagtagaagcattggcaaaagctacctatgagcggctctttcgctggctcgttcatcgcatcaataaagctctggataggaccaaacgtcagggagcatctttcattggaatcctggatattgctggatttgaaatttttgagctgaactcctttgaacaactttgcatcaactacaccaatgagaagctgcagcagctgttcaaccacaccatgtttatcctagaacaagaggaataccagcgcgaaggcatcgagtggaacttcatcgatttcgggctggatctgcagccatgcatcgacctaatagagagacctgcgaaccctcctggtgtactggcccttttggatgaagaatgctggttccctaaagccacagataaaacctttgttgaaaaactggttcaagagcaaggttcccactccaagtttcagaaacctcgacaattaaaagacaaagctgatttttgcattatacattatgcagggaaggtggactataaggcagatgagtggctgatgaagaatatggaccccctgaatgacaacgtggccacccttttgcaccagtcatcagacagatttgtggcagagctttggaaagatgagattcagaatattcagagagcttctttctatgacagtgtttctggtcttcatgagccaccagtggaccgtatcgtgggtctggatcaagtcactggtatgactgagacagcttttggctccgcatataaaaccaagaagggcatgtttcgtaccgttgggcaactctacaaagaatctctcaccaagctgatggcaactctccgaaacaccaaccctaactttgttcgttgtatcattccaaatcacgagaagagggctggaaaattggatccacacctagtcctagatcagcttcgctgtaacggtgtcctggaagggatccgaatctgtcgccagggcttccctaaccgaatagttttccaggaattcagacagagatatgagatcctaactccaaatgctattcctaaaggttttatggatggtaaacaggcctgtgaacgaatgatccgggctttagaattggacccaaacttgtacagaattggacagagcaagatatttttcagagctggagttctggcacacttagaggaagaaagagatttaaaaatcaccgatatcattatcttcttccaggccgtttgcagaggttacctggccagaaaggcctttgccaagaagcagcagcaactaagtgccttaaaggtcttgcagcggaactgtgccgcgtacctgaaattacggcactggcagtggtggcgagtcttcacaaaggtgaagccgcttctacaagtgactcgccaggaggaagaacttcaggccaaagatgaagagctgttgaaggtgaaggagaagcagacgaaggtggaaggagagctggaggagatggagcggaagcaccagcagcttttagaagagaagaatatccttgcagaacaactacaagcagagactgagctctttgctgaagcagaagagatgagggcaagacttgctgctaaaaagcaggaattagaagagattctacatgacttggagtctagggttgaagaagaagaagaaagaaaccaaatcctccaaaatgaaaagaaaaaaatgcaagcacatattcaggacctggaagaacagctagacgaggaggaaggggctcggcaaaagctgcagctggaaaaggtgacagcagaggccaagatcaagaagatggaagaggagattctgcttctcgaggaccaaaattccaagttcatcaaagaaaagaaactcatggaagatcgcattgctgagtgttcctctcagctggctgaagaggaagaaaaggcgaaaaacttggccaaaatcaggaataagcaagaagtgatgatctcagatttagaagaacgcttaaagaaggaagaaaagactcgtcaggaactggaaaaggccaaaagaaaactcgacggggagacgaccgacctgcaggaccagatcgcagagctgcaggcgcagattgatgagctcaagctgcagctggccaagaaggaggaggagctgcagggcgcactggccagaggtgatgatgaaacactccataagaacaatgcccttaaagttgtgcgagagctacaagcccaaattgctgaacttcaggaagactttgaatccgagaaggcttcacggaacaaggccgaaaagcagaaaagggacttgagtgaggaactggaagctctgaaaacagagctggaggacacgctggacaccacggcagcccagcaggaactacgtacaaaacgtgaacaagaagtggcagagctgaagaaagctcttgaggaggaaactaagaaccatgaagctcaaatccaggacatgagacaaagacacgcaacagccctggaggagctctcagagcagctggaacaggccaagcggttcaaagcaaatctagagaagaacaagcagggcctggagacagataacaaggagctggcgtgtgaggtgaaggtcctgcagcaggtcaaggctgagtctgagcacaagaggaagaagctcgacgcgcaggtccaggagctccatgccaaggtctctgaaggcgacaggctcagggtggagctggcggagaaagcaagtaagctgcagaatgagctagataatgtctccacccttctggaagaagcagagaagaagggtattaaatttgctaaggatgcagctagtcttgagtctcaactacaggatacacaggagcttcttcaggaggagacacgccagaaactaaacctgagcagtcggatccggcagctggaagaggagaagaacagtcttcaggagcagcaggaggaggaggaggaggccaggaagaacctggagaagcaagtgctggccctgcagtcccagttggctgataccaagaagaaagtagatgacgacctgggaacaattgaaagtctggaagaagccaagaagaagcttctgaaggacgcggaggccctgagccagcgcctggaggagaaggcactggcgtatgacaaactggagaagaccaagaaccgcctgcagcaggagctggacgacctcacggtggacctggaccaccagcgccaggtcgcctccaacttggagaagaagcagaagaagtttgaccagctgttagcagaagagaagagcatctctgctcgctatgccgaagagcgggaccgggccgaagccgaggccagagagaaagaaaccaaagccctgtcactggcccgggccctcgaggaagccctggaggccaaggaggagtttgagaggcagaacaagcagctccgagcagacatggaagacctcatgagctccaaagatgatgtgggaaaaaacgttcacgaacttgaaaaatccaaacgggccctagagcagcaggtggaggaaatgaggacccagctggaggagctggaagacgaactccaggccacggaagatgccaagcttcgtctggaggtcaacatgcaggccatgaaggcgcagttcgagagagacctgcaaaccagggatgagcagaatgaagagaagaagcggctgctgatcaaacaggtgcgggagctcgaggcggagctggaggatgagaggaaacagcgggcgcttgctgtagcttcaaagaaaaagatggagatagacctgaaggacctcgaagcccaaatcgaggctgcgaacaaagctcgggatgaggtgattaagcagctccgcaagctccaggctcagatgaaggattaccaacgtgaattagaagaagctcgtgcatccagagatgagatttttgctcaatccaaagagagtgaaaagaaattgaagagtctggaagcagaaatccttcaattgcaggaggaacttgcctcatctgagcgagcccgccgacacgccgagcaggagagagatgagctggcggacgagatcaccaacagcgcctctggcaagtccgcgctgctggatgagaagcggcgtctggaagctcggatcgcacagctggaggaggagctggaagaggagcagagcaacatggagctgctcaacgaccgcttccgcaagaccactctacaggtggacacactgaacgccgagctagcagccgagcgcagcgccgcccagaagagtgacaatgcacgccagcaactggagcggcagaacaaggagctgaaggccaagctgcaggaactcgagggtgctgtcaagtctaagttcaaggccaccatctcagccctggaggccaagattgggcagctggaggagcagcttgagcaggaagccaaggaacgagcagccgccaacaaattagtccgtcgcactgagaagaagctgaaagaaatcttcatgcaggttgaggatgagcgtcgacacgcggaccagtataaagagcagatggagaaggccaacgctcggatgaagcagcttaaacgccagctggaggaagcagaagaagaagcgacgcgtgccaacgcatctcggcgtaaactccagcgggaactggatgatgccaccgaggccaacgagggcctgagccgcgaggtcagcaccctgaagaaccggctgaggcggggtggccccatcagcttctcttccagccgatctggccggcgccagctgcaccttgaaggagcttccctggagctctccgacgatgacacagaaagtaagaccagtgatgtcaacgagacgcagccaccccagtcagagtaa

SEQ ID NO: 167 - DNA, 6054 bp, Homo sapiens
atgtacggaggcatctactgttttctgtgccaggactacatctatgacaaagacatggaaataatcgccaaggaggagcagcgaaaagcttggaaaatgcaaggcgttggagagaagttttcaacttgggaaccaaccaaacgggagcttgaactgctgaagcacaacccgaaaaggagaaagatcacctcgaactgcaccataggtctgcgtgggctgatcaaccttgggaacacatgcttcatgaactgcatcgtgcaggccctgacccacacgccacttctgcgggacttcttcctgtctgacaggcaccgctgtgagatgcagagccccagctcctgtctggtctgtgagatgtcctcactgtttcaggagacttattctggactcttctgtgtagttataaacccttacaagaatcttccaatttactctgagaatattattgaaatgtacagagggaagaagcgtcatgagatgcctccacacatctatgctatatctgaatctgcttacagatgcatgcttcaagatcgtgaggaccagtcaattctttgcacgggtgagtcaggtgctgggaagacagaaaatacaaagaaagttattcagtaccttgcccatgttgcttcttcacataaaggaagaaaggaccataatattcctcaggaatcgcctaaaccagtgaaacaccagggggaacttgaacggcagcttttgcaagcaaatccaattctggaatcatttggaaatgcgaagactgtgaaaaatgataactcatctcgttttggcaaatttattcggatcaactttgatgtaactggctatatcgttggggccaacattgaaacataccttctggaaaagtctcgtgctgttcgtcaagcaaaagatgaacgtacttttcatatcttttaccagttgttatctggagcaggagaacacctaaagtctgatttgcttcttgaaggatttaataactacaggtttctctccaatggctatattcctattccgggacagcaagacaaagataatttccaggagaccatggaagcaatgcacataatgggcttctcccatgaagagattctgtcaatgcttaaagtagtatcttcagtgctacagtttggaaatatttctttcaaaaaggagagaaatactgatcaagcttccatgccagaaaatacagttgcgcagaagctctgccatcttcttgggatgaatgtgatggagtttactcgggccatcctgactccccggatcaaggtcggccgagactatgtgcaaaaagcccagaccaaagaacaggcagattttgcagtagaagcattggcaaaagctacctatgagcggctctttcgctggctcgttcatcgcatcaataaagctctggataggaccaaacgtcagggagcatctttcattggaatcctggatattgctggatttgaaatttttgagctgaactcctttgaacaactttgcatcaactacaccaatgagaagctgcagcagctgttcaaccacaccatgtttatcctagaacaagaggaataccagcgcgaaggcatcgagtggaacttcatcgatttcgggctggatctgcagccatgcatcgacctaatagagagacctgcgaaccctcctggtgtactggcccttttggatgaagaatgctggttccctaaagccacagataaaacctttgttgaaaaactggttcaagagcaaggttcccactccaagtttcagaaacctcgacaattaaaagacaaagctgatttttgcattatacattatgcagggaaggtggactataaggcagatgagtggctgatgaagaatatggaccccctgaatgacaacgtggccacccttttgcaccagtcatcagacagatttgtggcagagctttggaaagatgagattcagaatattcagagagcttctttctatgacagtgtttctggtcttcatgagccaccagtggaccgtatcgtgggtctggatcaagtcactggtatgactgagacagcttttggctccgcatataaaaccaagaagggcatgtttcgtaccgttgggcaactctacaaagaatctctcaccaagctgatggcaactctccgaaacaccaaccctaactttgttcgttgtatcattccaaatcacgagaagagggctggaaaattggatccacacctagtcctagatcagcttcgctgtaacggtgtcctggaagggatccgaatctgtcgccagggcttccctaaccgaatagttttccaggaattcagacagagatatgagatcctaactccaaatgctattcctaaaggttttatggatggtaaacaggcctgtgaacgaatgatccgggctttagaattggacccaaacttgtacagaattggacagagcaagatatttttcagagctggagttctggcacacttagaggaagaaagagatttaaaaatcaccgatatcattatcttcttccaggccgtttgcagaggttacctggccagaaaggcctttgccaagaagcagcagcaactaagtgccttaaaggtcttgcagcggaactgtgccgcgtacctgaaattacggcactggcagtggtggcgagtcttcacaaaggtgaagccgcttctacaagtgactcgccaggaggaagaacttcaggccaaagatgaagagctgttgaaggtgaaggagaagcagacgaaggtggaaggagagctggaggagatggagcggaagcaccagcagcttttagaagagaagaatatccttgcagaacaactacaagcagagactgagctctttgctgaagcagaagagatgagggcaagacttgctgctaaaaagcaggaattagaagagattctacatgacttggagtctagggttgaagaagaagaagaaagaaaccaaatcctccaaaatgaaaagaaaaaaatgcaagcacatattcaggacctggaagaacagctagacgaggaggaaggggctcggcaaaagctgcagctggaaaaggtgacagcagaggccaagatcaagaagatggaagaggagattctgcttctcgaggaccaaaattccaagttcatcaaagaaaagaaactcatggaagatcgcattgctgagtgttcctctcagctggctgaagaggaagaaaaggcgaaaaacttggccaaaatcaggaataagcaagaagtgatgatctcagatttagaagaacgcttaaagaaggaagaaaagactcgtcaggaactggaaaaggccaaaagaaaactcgacggggagacgaccgacctgcaggaccagatcgcagagctgcaggcgcagattgatgagctcaagctgcagctggccaagaaggaggaggagctgcagggcgcactggccagaggtgatgatgaaacactccataagaacaatgcccttaaagttgtgcgagagctacaagcccaaattgctgaacttcaggaagactttgaatccgagaaggcttcacggaacaaggccgaaaagcagaaaagggacttgagtgaggaactggaagctctgaaaacagagctggaggacacgctggacaccacggcagcccagcaggaactacgtacaaaacgtgaacaagaagtggcagagctgaagaaagctcttgaggaggaaactaagaaccatgaagctcaaatccaggacatgagacaaagacacgcaacagccctggaggagctctcagagcagctggaacaggccaagcggttcaaagcaaatctagagaagaacaagcagggcctggagacagataacaaggagctggcgtgtgaggtgaaggtcctgcagcaggtcaaggctgagtctgagcacaagaggaagaagctcgacgcgcaggtccaggagctccatgccaaggtctctgaaggcgacaggctcagggtggagctggcggagaaagcaagtaagctgcagaatgagctagataatgtctccacccttctggaagaagcagagaagaagggtattaaatttgctaaggatgcagctagtcttgagtctcaactacaggatacacaggagcttcttcaggaggagacacgccagaaactaaacctgagcagtcggatccggcagctggaagaggagaagaacagtcttcaggagcagcaggaggaggaggaggaggccaggaagaacctggagaagcaagtgctggccctgcagtcccagttggctgataccaagaagaaagtagatgacgacctgggaacaattgaaagtctggaagaagccaagaagaagcttctgaaggacgcggaggccctgagccagcgcctggaggagaaggcactggcgtatgacaaactggagaagaccaagaaccgcctgcagcaggagctggacgacctcacggtggacctggaccaccagcgccaggtcgcctccaacttggagaagaagcagaagaagtttgaccagctgttagcagaagagaagagcatctctgctcgctatgccgaagagcgggaccgggccgaagccgaggccagagagaaagaaaccaaagccctgtcactggcccgggccctcgaggaagccctggaggccaaggaggagtttgagaggcagaacaagcagctccgagcagacatggaagacctcatgagctccaaagatgatgtgggaaaaaacgttcacgaacttgaaaaatccaaacgggccctagagcagcaggtggaggaaatgaggacccagctggaggagctggaagacgaactccaggccacggaagatgccaagcttcgtctggaggtcaacatgcaggccatgaaggcgcagttcgagagagacctgcaaaccagggatgagcagaatgaagagaagaagcggctgctgatcaaacaggtgcgggagctcgaggcggagctggaggatgagaggaaacagcgggcgcttgctgtagcttcaaagaaaaagatggagatagacctgaaggacctcgaagcccaaatcgaggctgcgaacaaagctcgggatgaggtgattaagcagctccgcaagctccaggctcagatgaaggattaccaacgtgaattagaagaagctcgtgcatccagagatgagatttttgctcaatccaaagagagtgaaaagaaattgaagagtctggaagcagaaatccttcaattgcaggaggaacttgcctcatctgagcgagcccgccgacacgccgagcaggagagagatgagctggcggacgagatcaccaacagcgcctctggcaagtccgcgctgctggatgagaagcggcgtctggaagctcggatcgcacagctggaggaggagctggaagaggagcagagcaacatggagctgctcaacgaccgcttccgcaagaccactctacaggtggacacactgaacgccgagctagcagccgagcgcagcgccgcccagaagagtgacaatgcacgccagcaactggagcggcagaacaaggagctgaaggccaagctgcaggaactcgagggtgctgtcaagtctaagttcaaggccaccatctcagccctggaggccaagattgggcagctggaggagcagcttgagcaggaagccaaggaacgagcagccgccaacaaattagtccgtcgcactgagaagaagctgaaagaaatcttcatgcaggttgaggatgagcgtcgacacgcggaccagtataaagagcagatggagaaggccaacgctcggatgaagcagcttaaacgccagctggaggaagcagaagaagaagcgacgcgtgccaacgcatctcggcgtaaactccagcgggaactggatgatgccaccgaggccaacgagggcctgagccgcgaggtcagcaccctgaagaaccggctgaggcggggtggccccatcagcttctcttccagccgatctggccggcgccagctgcaccttgaaggagcttccctggagctctccgacgatgacacagaaagtaagaccagtgatgtcaacgagacgcagccaccccagtcagagtaa

SEQ ID NO: 168 - DNA, 5961 bp, Homo sapiens
atgtacggaggcatctactgttttctgtgccaggactacatctatgacaaagacatggaaataatcgccaaggaggagcagcgaaaagcttggaaaatgcaaggcgttggagagaagttttcaacttgggaaccaaccaaacgggagcttgaactgctgaagcacaacccgaaaaggagaaagatcacctcgaactgcaccataggtctgcgtgggctgatcaaccttgggaacacatgcttcatgaactgcatcgtgcaggccctgacccacacgccacttctgcgggacttcttcctgtctgacaggcaccgctgtgagatgcagagccccagctcctgtctggtctgtgagatgtcctcactgtttcaggagacttattctggactcttctgtgtagttataaacccttacaagaatcttccaatttactctgagaatattattgaaatgtacagagggaagaagcgtcatgagatgcctccacacatctatgctatatctgaatctgcttacagatgcatgcttcaagatcgtgaggaccagtcaattctttgcacgggtgagtcaggtgctgggaagacagaaaatacaaagaaagttattcagtaccttgcccatgttgcttcttcacataaaggaagaaaggaccataatattcctggggaacttgaacggcagcttttgcaagcaaatccaattctggaatcatttggaaatgcgaagactgtgaaaaatgataactcatctcgttttggcaaatttattcggatcaactttgatgtaactggctatatcgttggggccaacattgaaacataccttctggaaaagtctcgtgctgttcgtcaagcaaaagatgaacgtacttttcatatcttttaccagttgttatctggagcaggagaacacctaaagtctgatttgcttcttgaaggatttaataactacaggtttctctccaatggctatattcctattccgggacagcaagacaaagataatttccaggagaccatggaagcaatgcacataatgggcttctcccatgaagagattctgtcaatgcttaaagtagtatcttcagtgctacagtttggaaatatttctttcaaaaaggagagaaatactgatcaagcttccatgccagaaaatacagttgcgcagaagctctgccatcttcttgggatgaatgtgatggagtttactcgggccatcctgactccccggatcaaggtcggccgagactatgtgcaaaaagcccagaccaaagaacaggcagattttgcagtagaagcattggcaaaagctacctatgagcggctctttcgctggctcgttcatcgcatcaataaagctctggataggaccaaacgtcagggagcatctttcattggaatcctggatattgctggatttgaaatttttgagctgaactcctttgaacaactttgcatcaactacaccaatgagaagctgcagcagctgttcaaccacaccatgtttatcctagaacaagaggaataccagcgcgaaggcatcgagtggaacttcatcgatttcgggctggatctgcagccatgcatcgacctaatagagagacctgcgaaccctcctggtgtactggcccttttggatgaagaatgctggttccctaaagccacagataaaacctttgttgaaaaactggttcaagagcaaggttcccactccaagtttcagaaacctcgacaattaaaagacaaagctgatttttgcattatacattatgcagggaaggtggactataaggcagatgagtggctgatgaagaatatggaccccctgaatgacaacgtggccacccttttgcaccagtcatcagacagatttgtggcagagctttggaaagatgtggaccgtatcgtgggtctggatcaagtcactggtatgactgagacagcttttggctccgcatataaaaccaagaagggcatgtttcgtaccgttgggcaactctacaaagaatctctcaccaagctgatggcaactctccgaaacaccaaccctaactttgttcgttgtatcattccaaatcacgagaagagggctggaaaattggatccacacctagtcctagatcagcttcgctgtaacggtgtcctggaagggatccgaatctgtcgccagggcttccctaaccgaatagttttccaggaattcagacagagatatgagatcctaactccaaatgctattcctaaaggttttatggatggtaaacaggcctgtgaacgaatgatccgggctttagaattggacccaaacttgtacagaattggacagagcaagatatttttcagagctggagttctggcacacttagaggaagaaagagatttaaaaatcaccgatatcattatcttcttccaggccgtttgcagaggttacctggccagaaaggcctttgccaagaagcagcagcaactaagtgccttaaaggtcttgcagcggaactgtgccgcgtacctgaaattacggcactggcagtggtggcgagtcttcacaaaggtgaagccgcttctacaagtgactcgccaggaggaagaacttcaggccaaagatgaagagctgttgaaggtgaaggagaagcagacgaaggtggaaggagagctggaggagatggagcggaagcaccagcagcttttagaagagaagaatatccttgcagaacaactacaagcagagactgagctctttgctgaagcagaagagatgagggcaagacttgctgctaaaaagcaggaattagaagagattctacatgacttggagtctagggttgaagaagaagaagaaagaaaccaaatcctccaaaatgaaaagaaaaaaatgcaagcacatattcaggacctggaagaacagctagacgaggaggaaggggctcggcaaaagctgcagctggaaaaggtgacagcagaggccaagatcaagaagatggaagaggagattctgcttctcgaggaccaaaattccaagttcatcaaagaaaagaaactcatggaagatcgcattgctgagtgttcctctcagctggctgaagaggaagaaaaggcgaaaaacttggccaaaatcaggaataagcaagaagtgatgatctcagatttagaagaacgcttaaagaaggaagaaaagactcgtcaggaactggaaaaggccaaaagaaaactcgacggggagacgaccgacctgcaggaccagatcgcagagctgcaggcgcagattgatgagctcaagctgcagctggccaagaaggaggaggagctgcagggcgcactggccagaggtgatgatgaaacactccataagaacaatgcccttaaagttgtgcgagagctacaagcccaaattgctgaacttcaggaagactttgaatccgagaaggcttcacggaacaaggccgaaaagcagaaaagggacttgagtgaggaactggaagctctgaaaacagagctggaggacacgctggacaccacggcagcccagcaggaactacgtacaaaacgtgaacaagaagtggcagagctgaagaaagctcttgaggaggaaactaagaaccatgaagctcaaatccaggacatgagacaaagacacgcaacagccctggaggagctctcagagcagctggaacaggccaagcggttcaaagcaaatctagagaagaacaagcagggcctggagacagataacaaggagctggcgtgtgaggtgaaggtcctgcagcaggtcaaggctgagtctgagcacaagaggaagaagctcgacgcgcaggtccaggagctccatgccaaggtctctgaaggcgacaggctcagggtggagctggcggagaaagcaagtaagctgcagaatgagctagataatgtctccacccttctggaagaagcagagaagaagggtattaaatttgctaaggatgcagctagtcttgagtctcaactacaggatacacaggagcttcttcaggaggagacacgccagaaactaaacctgagcagtcggatccggcagctggaagaggagaagaacagtcttcaggagcagcaggaggaggaggaggaggccaggaagaacctggagaagcaagtgctggccctgcagtcccagttggctgataccaagaagaaagtagatgacgacctgggaacaattgaaagtctggaagaagccaagaagaagcttctgaaggacgcggaggccctgagccagcgcctggaggagaaggcactggcgtatgacaaactggagaagaccaagaaccgcctgcagcaggagctggacgacctcacggtggacctggaccaccagcgccaggtcgcctccaacttggagaagaagcagaagaagtttgaccagctgttagcagaagagaagagcatctctgctcgctatgccgaagagcgggaccgggccgaagccgaggccagagagaaagaaaccaaagccctgtcactggcccgggccctcgaggaagccctggaggccaaggaggagtttgagaggcagaacaagcagctccgagcagacatggaagacctcatgagctccaaagatgatgtgggaaaaaacgttcacgaacttgaaaaatccaaacgggccctagagcagcaggtggaggaaatgaggacccagctggaggagctggaagacgaactccaggccacggaagatgccaagcttcgtctggaggtcaacatgcaggccatgaaggcgcagttcgagagagacctgcaaaccagggatgagcagaatgaagagaagaagcggctgctgatcaaacaggtgcgggagctcgaggcggagctggaggatgagaggaaacagcgggcgcttgctgtagcttcaaagaaaaagatggagatagacctgaaggacctcgaagcccaaatcgaggctgcgaacaaagctcgggatgaggtgattaagcagctccgcaagctccaggctcagatgaaggattaccaacgtgaattagaagaagctcgtgcatccagagatgagatttttgctcaatccaaagagagtgaaaagaaattgaagagtctggaagcagaaatccttcaattgcaggaggaacttgcctcatctgagcgagcccgccgacacgccgagcaggagagagatgagctggcggacgagatcaccaacagcgcctctggcaagtccgcgctgctggatgagaagcggcgtctggaagctcggatcgcacagctggaggaggagctggaagaggagcagagcaacatggagctgctcaacgaccgcttccgcaagaccactctacaggtggacacactgaacgccgagctagcagccgagcgcagcgccgcccagaagagtgacaatgcacgccagcaactggagcggcagaacaaggagctgaaggccaagctgcaggaactcgagggtgctgtcaagtctaagttcaaggccaccatctcagccctggaggccaagattgggcagctggaggagcagcttgagcaggaagccaaggaacgagcagccgccaacaaattagtccgtcgcactgagaagaagctgaaagaaatcttcatgcaggttgaggatgagcgtcgacacgcggaccagtataaagagcagatggagaaggccaacgctcggatgaagcagcttaaacgccagctggaggaagcagaagaagaagcgacgcgtgccaacgcatctcggcgtaaactccagcgggaactggatgatgccaccgaggccaacgagggcctgagccgcgaggtcagcaccctgaagaaccggctgaggcggggtggccccatcagcttctcttccagccgatctggccggcgccagctgcaccttgaaggagcttccctggagctctccgacgatgacacagaaagtaagaccagtgatgtcaacgagacgcagccaccccagtcagagtaa

SEQ ID NO: 169 - DNA, 5988 bp, Homo sapiens
atgtacggaggcatctactgttttctgtgccaggactacatctatgacaaagacatggaaataatcgccaaggaggagcagcgaaaagcttggaaaatgcaaggcgttggagagaagttttcaacttgggaaccaaccaaacgggagcttgaactgctgaagcacaacccgaaaaggagaaagatcacctcgaactgcaccataggtctgcgtgggctgatcaaccttgggaacacatgcttcatgaactgcatcgtgcaggccctgacccacacgccacttctgcgggacttcttcctgtctgacaggcaccgctgtgagatgcagagccccagctcctgtctggtctgtgagatgtcctcactgtttcaggagacttattctggactcttctgtgtagttataaacccttacaagaatcttccaatttactctgagaatattattgaaatgtacagagggaagaagcgtcatgagatgcctccacacatctatgctatatctgaatctgcttacagatgcatgcttcaagatcgtgaggaccagtcaattctttgcacgggtgagtcaggtgctgggaagacagaaaatacaaagaaagttattcagtaccttgcccatgttgcttcttcacataaaggaagaaaggaccataatattcctgaatcgcctaaaccagtgaaacaccagggggaacttgaacggcagcttttgcaagcaaatccaattctggaatcatttggaaatgcgaagactgtgaaaaatgataactcatctcgttttggcaaatttattcggatcaactttgatgtaactggctatatcgttggggccaacattgaaacataccttctggaaaagtctcgtgctgttcgtcaagcaaaagatgaacgtacttttcatatcttttaccagttgttatctggagcaggagaacacctaaagtctgatttgcttcttgaaggatttaataactacaggtttctctccaatggctatattcctattccgggacagcaagacaaagataatttccaggagaccatggaagcaatgcacataatgggcttctcccatgaagagattctgtcaatgcttaaagtagtatcttcagtgctacagtttggaaatatttctttcaaaaaggagagaaatactgatcaagcttccatgccagaaaatacagttgcgcagaagctctgccatcttcttgggatgaatgtgatggagtttactcgggccatcctgactccccggatcaaggtcggccgagactatgtgcaaaaagcccagaccaaagaacaggcagattttgcagtagaagcattggcaaaagctacctatgagcggctctttcgctggctcgttcatcgcatcaataaagctctggataggaccaaacgtcagggagcatctttcattggaatcctggatattgctggatttgaaatttttgagctgaactcctttgaacaactttgcatcaactacaccaatgagaagctgcagcagctgttcaaccacaccatgtttatcctagaacaagaggaataccagcgcgaaggcatcgagtggaacttcatcgatttcgggctggatctgcagccatgcatcgacctaatagagagacctgcgaaccctcctggtgtactggcccttttggatgaagaatgctggttccctaaagccacagataaaacctttgttgaaaaactggttcaagagcaaggttcccactccaagtttcagaaacctcgacaattaaaagacaaagctgatttttgcattatacattatgcagggaaggtggactataaggcagatgagtggctgatgaagaatatggaccccctgaatgacaacgtggccacccttttgcaccagtcatcagacagatttgtggcagagctttggaaagatgtggaccgtatcgtgggtctggatcaagtcactggtatgactgagacagcttttggctccgcatataaaaccaagaagggcatgtttcgtaccgttgggcaactctacaaagaatctctcaccaagctgatggcaactctccgaaacaccaaccctaactttgttcgttgtatcattccaaatcacgagaagagggctggaaaattggatccacacctagtcctagatcagcttcgctgtaacggtgtcctggaagggatccgaatctgtcgccagggcttccctaaccgaatagttttccaggaattcagacagagatatgagatcctaactccaaatgctattcctaaaggttttatggatggtaaacaggcctgtgaacgaatgatccgggctttagaattggacccaaacttgtacagaattggacagagcaagatatttttcagagctggagttctggcacacttagaggaagaaagagatttaaaaatcaccgatatcattatcttcttccaggccgtttgcagaggttacctggccagaaaggcctttgccaagaagcagcagcaactaagtgccttaaaggtcttgcagcggaactgtgccgcgtacctgaaattacggcactggcagtggtggcgagtcttcacaaaggtgaagccgcttctacaagtgactcgccaggaggaagaacttcaggccaaagatgaagagctgttgaaggtgaaggagaagcagacgaaggtggaaggagagctggaggagatggagcggaagcaccagcagcttttagaagagaagaatatccttgcagaacaactacaagcagagactgagctctttgctgaagcagaagagatgagggcaagacttgctgctaaaaagcaggaattagaagagattctacatgacttggagtctagggttgaagaagaagaagaaagaaaccaaatcctccaaaatgaaaagaaaaaaatgcaagcacatattcaggacctggaagaacagctagacgaggaggaaggggctcggcaaaagctgcagctggaaaaggtgacagcagaggccaagatcaagaagatggaagaggagattctgcttctcgaggaccaaaattccaagttcatcaaagaaaagaaactcatggaagatcgcattgctgagtgttcctctcagctggctgaagaggaagaaaaggcgaaaaacttggccaaaatcaggaataagcaagaagtgatgatctcagatttagaagaacgcttaaagaaggaagaaaagactcgtcaggaactggaaaaggccaaaagaaaactcgacggggagacgaccgacctgcaggaccagatcgcagagctgcaggcgcagattgatgagctcaagctgcagctggccaagaaggaggaggagctgcagggcgcactggccagaggtgatgatgaaacactccataagaacaatgcccttaaagttgtgcgagagctacaagcccaaattgctgaacttcaggaagactttgaatccgagaaggcttcacggaacaaggccgaaaagcagaaaagggacttgagtgaggaactggaagctctgaaaacagagctggaggacacgctggacaccacggcagcccagcaggaactacgtacaaaacgtgaacaagaagtggcagagctgaagaaagctcttgaggaggaaactaagaaccatgaagctcaaatccaggacatgagacaaagacacgcaacagccctggaggagctctcagagcagctggaacaggccaagcggttcaaagcaaatctagagaagaacaagcagggcctggagacagataacaaggagctggcgtgtgaggtgaaggtcctgcagcaggtcaaggctgagtctgagcacaagaggaagaagctcgacgcgcaggtccaggagctccatgccaaggtctctgaaggcgacaggctcagggtggagctggcggagaaagcaagtaagctgcagaatgagctagataatgtctccacccttctggaagaagcagagaagaagggtattaaatttgctaaggatgcagctagtcttgagtctcaactacaggatacacaggagcttcttcaggaggagacacgccagaaactaaacctgagcagtcggatccggcagctggaagaggagaagaacagtcttcaggagcagcaggaggaggaggaggaggccaggaagaacctggagaagcaagtgctggccctgcagtcccagttggctgataccaagaagaaagtagatgacgacctgggaacaattgaaagtctggaagaagccaagaagaagcttctgaaggacgcggaggccctgagccagcgcctggaggagaaggcactggcgtatgacaaactggagaagaccaagaaccgcctgcagcaggagctggacgacctcacggtggacctggaccaccagcgccaggtcgcctccaacttggagaagaagcagaagaagtttgaccagctgttagcagaagagaagagcatctctgctcgctatgccgaagagcgggaccgggccgaagccgaggccagagagaaagaaaccaaagccctgtcactggcccgggccctcgaggaagccctggaggccaaggaggagtttgagaggcagaacaagcagctccgagcagacatggaagacctcatgagctccaaagatgatgtgggaaaaaacgttcacgaacttgaaaaatccaaacgggccctagagcagcaggtggaggaaatgaggacccagctggaggagctggaagacgaactccaggccacggaagatgccaagcttcgtctggaggtcaacatgcaggccatgaaggcgcagttcgagagagacctgcaaaccagggatgagcagaatgaagagaagaagcggctgctgatcaaacaggtgcgggagctcgaggcggagctggaggatgagaggaaacagcgggcgcttgctgtagcttcaaagaaaaagatggagatagacctgaaggacctcgaagcccaaatcgaggctgcgaacaaagctcgggatgaggtgattaagcagctccgcaagctccaggctcagatgaaggattaccaacgtgaattagaagaagctcgtgcatccagagatgagatttttgctcaatccaaagagagtgaaaagaaattgaagagtctggaagcagaaatccttcaattgcaggaggaacttgcctcatctgagcgagcccgccgacacgccgagcaggagagagatgagctggcggacgagatcaccaacagcgcctctggcaagtccgcgctgctggatgagaagcggcgtctggaagctcggatcgcacagctggaggaggagctggaagaggagcagagcaacatggagctgctcaacgaccgcttccgcaagaccactctacaggtggacacactgaacgccgagctagcagccgagcgcagcgccgcccagaagagtgacaatgcacgccagcaactggagcggcagaacaaggagctgaaggccaagctgcaggaactcgagggtgctgtcaagtctaagttcaaggccaccatctcagccctggaggccaagattgggcagctggaggagcagcttgagcaggaagccaaggaacgagcagccgccaacaaattagtccgtcgcactgagaagaagctgaaagaaatcttcatgcaggttgaggatgagcgtcgacacgcggaccagtataaagagcagatggagaaggccaacgctcggatgaagcagcttaaacgccagctggaggaagcagaagaagaagcgacgcgtgccaacgcatctcggcgtaaactccagcgggaactggatgatgccaccgaggccaacgagggcctgagccgcgaggtcagcaccctgaagaaccggctgaggcggggtggccccatcagcttctcttccagccgatctggccggcgccagctgcaccttgaaggagcttccctggagctctccgacgatgacacagaaagtaagaccagtgatgtcaacgagacgcagccaccccagtcagagtaa

SEQ ID NO: 170 - DNA, 2784 bp, Homo sapiens
atgagctcccaatgtcggagtttggaaaacaaatttgtctttttaaaagaaggtctaggaaactcaaaacctgaagaattggaagaaatcagaatagaaaatggtaggataagttctgaacgtcgaaaagaaaagtctcgagatgcagccagatctcggcgaagtaaagaatctgaagttttttatgagcttgctcatcagttgccacttccacataatgtgagttcgcatcttgataaggcctctgtgatgaggcttaccatcagctatttgcgtgtgaggaaacttctggatgctggtgatttggatattgaagatgacatgaaagcacagatgaattgcttttatttgaaagccttggatggttttgttatggttctcacagatgatggtgacatgatttacatttctgataatgtgaacaaatacatgggattaactcagtttgaactaactggacacagtgtgtttgattttactcatccatgtgaccatgaggaaatgagagaaatgcttacacacagaaatggccttgtgaaaaagggtaaagaacaaaacacacagcgaagcttttttctcagaatgaagtgtaccctaactagccgaggaagaactatgaacataaagtctgcaacatggaaggtattgcactgcacaggccacattcacgtatatgataccaacagtaaccaacctcagtgtgggtataagaaaccacctatgacctgcttggtgctgatttgtgaacccattcctcacccatcaaatattgaaattcctttagatagcaagactttcctcagtcgacacagcctggatatgaaattttcttattgtgatgaaagaattaccgaattgatgggatatgagccagaagaacttttaggccgctcaatttatgaatattatcatgctttggactctgatcatctgaccaaaactcatcatgatatgtttactaaaggacaagtcaccacaggacagtacaggatgcttgccaaaagaggtggatatgtctgggttgaaactcaagcaactgtcatatataacaccaagaattctcaaccacagtgcattgtatgtgtgaattacgttgtgagtggtattattcagcacgacttgattttctcccttcaacaaacagaatgtgtccttaaaccggttgaatcttcagatatgaaaatgactcagctattcaccaaagttgaatcagaagatacaagtagcctctttgacaaacttaagaaggaacctgatgctttaactttgctggccccagccgctggagacacaatcatatctttagattttggcagcaacgacacagaaactgatgaccagcaacttgaggaagtaccattatataatgatgtaatgctcccctcacccaacgaaaaattacagaatataaatttggcaatgtctccattacccaccgctgaaacgccaaagccacttcgaagtagtgctgaccctgcactcaatcaagaagttgcattaaaattagaaccaaatccagagtcactggaactttcttttaccatgccccagattcaggatcagacacctagtccttccgatggaagcactagacaaagttcacctgagcctaatagtcccagtgaatattgtttttatgtggatagtgatatggtcaatgaattcaagttggaattggtagaaaaactttttgctgaagacacagaagcaaagaacccattttctactcaggacacagatttagacttggagatgttagctccctatatcccaatggatgatgacttccagttacgttccttcgatcagttgtcaccattagaaagcagttccgcaagccctgaaagcgcaagtcctcaaagcacagttacagtattccagcagactcaaatacaagaacctactgctaatgccaccactaccactgccaccactgatgaattaaaaacagtgacaaaagaccgtatggaagacattaaaatattgattgcatctccatctcctacccacatacataaagaaactactagtgccacatcatcaccatatagagatactcaaagtcggacagcctcaccaaacagagcaggaaaaggagtcatagaacagacagaaaaatctcatccaagaagccctaacgtgttatctgtcgctttgagtcaaagagatctgaaactggacaatgtcctgttggaccacgagggtcactgtaaactggcagacttcggaatgtgcaaggaggggatttgcaatggtgtcaccacggccacattctgtggcacgccagactatatcgctccagagatcctccaggaaatgctgtacgggcctgcagtagactggtgggcaatgggcgtgttgctctatgagatgctctgtggtcacgcgccttttgaggcagagaacgaagatgacctctttgaggccatactgaatgatgaggtggtctaccctacctggctccatgaagatgccacagggatcctaaaatctttcatgaccaagaaccccaccatgcgcttgggcagcctgactcagggaggcgagcacgccatcttgagacatcctttttttaaggaaatcgactgggcccagctgaaccatcgccaaatagaaccgcctttcagacccagaatcaaatcccgagaagatgtcagtaattttgaccctgacttcataaaggaagagccagttttaactccaattgatgagggacatcttccaatgattaaccaggatgagtttagaaacttttcctatgtgtctccagaattgcaaccatag

SEQ ID NO: 171 - DNA, 2082 bp, Homo sapiens
atggagggcgccggcggcgcgaacgacaagaaaaagataagttctgaacgtcgaaaagaaaagtctcgagatgcagccagatctcggcgaagtaaagaatctgaagttttttatgagcttgctcatcagttgccacttccacataatgtgagttcgcatcttgataaggcctctgtgatgaggcttaccatcagctatttgcgtgtgaggaaacttctggatgctggtgatttggatattgaagatgacatgaaagcacagatgaattgcttttatttgaaagccttggatggttttgttatggttctcacagatgatggtgacatgatttacatttctgataatgtgaacaaatacatgggattaactcagtttgaactaactggacacagtgtgtttgattttactcatccatgtgaccatgaggaaatgagagaaatgcttacacacagaaatgctactctccagagagaccggatcttcaaacattttaccaggaagcgccaaagggctatgcgaaggcgagtccaccagatcaatggacacaagttcatggccacgtatctgaggcagcccacctactgctctcactgcagggagtttatctggggagtgtttgggaaacagggttatcagtgccaagtgtgcacctgtgtcgtccataaacgctgccatcatctaattgttacagcctgtacttgccaaaacaatattaacaaagtggattcaaagattgcagaacagaggttcgggatcaacatcccacacaagttcagcatccacaactacaaagtgccaacattctgcgatcactgtggctcactgctctggggaataatgcgacaaggacttcagtgtaaaatatgtaaaatgaatgtgcatattcgatgtcaagcgaacgtggcccctaactgtggggtaaatgcggtggaacttgccaagaccctggcagggatgggtctccaacccggaaatatttctccaacctcgaaactcgtttccagatcgaccctaagacgacagggaaaggagagcagcaaagaaggaaatgggattggggttaattcttccaaccgacttggtatcgacaactttgagttcatccgagtgttggggaaggggagttttgggaaggtgatgcttgcaagagtaaaagaaacaggagacctctatgctgtgaaggtgctgaagaaggacgtgattctgcaggatgatgatgtggaatgcaccatgaccgagaaaaggatcctgtctctggcccgcaatcaccccttcctcactcagttgttctgctgctttcagacccccgatcgtctgttttttgtgatggagtttgtgaatgggggtgacttgatgttccacattcagaagtctcgtcgttttgatgaagcacgagctcgcttctatgctgcagaaatcatttcggctctcatgttcctccatgataaaggaatcatctatagagatctgaaactggacaatgtcctgttggaccacgagggtcactgtaaactggcagacttcggaatgtgcaaggaggggatttgcaatggtgtcaccacggccacattctgtggcacgccagactatatcgctccagagatcctccaggaaatgctgtacgggcctgcagtagactggtgggcaatgggcgtgttgctctatgagatgctctgtggtcacgcgccttttgaggcagagaacgaagatgacctctttgaggccatactgaatgatgaggtggtctaccctacctggctccatgaagatgccacagggatcctaaaatctttcatgaccaagaaccccaccatgcgcttgggcagcctgactcagggaggcgagcacgccatcttgagacatcctttttttaaggaaatcgactgggcccagctgaaccatcgccaaatagaaccgcctttcagacccagaatcaaatcccgagaagatgtcagtaattttgaccctgacttcataaaggaagagccagttttaactccaattgatgagggacatcttccaatgattaaccaggatgagtttagaaacttttcctatgtgtctccagaattgcaaccatag

SEQ ID NO: 172 - DNA, 1833 bp, Homo sapiens
atgaaagcacagatgaattgcttttatttgaaagccttggatggttttgttatggttctcacagatgatggtgacatgatttacatttctgataatgtgaacaaatacatgggattaactcagtttgaactaactggacacagtgtgtttgattttactcatccatgtgaccatgaggaaatgagagaaatgcttacacacagaaatgctactctccagagagaccggatcttcaaacattttaccaggaagcgccaaagggctatgcgaaggcgagtccaccagatcaatggacacaagttcatggccacgtatctgaggcagcccacctactgctctcactgcagggagtttatctggggagtgtttgggaaacagggttatcagtgccaagtgtgcacctgtgtcgtccataaacgctgccatcatctaattgttacagcctgtacttgccaaaacaatattaacaaagtggattcaaagattgcagaacagaggttcgggatcaacatcccacacaagttcagcatccacaactacaaagtgccaacattctgcgatcactgtggctcactgctctggggaataatgcgacaaggacttcagtgtaaaatatgtaaaatgaatgtgcatattcgatgtcaagcgaacgtggcccctaactgtggggtaaatgcggtggaacttgccaagaccctggcagggatgggtctccaacccggaaatatttctccaacctcgaaactcgtttccagatcgaccctaagacgacagggaaaggagagcagcaaagaaggaaatgggattggggttaattcttccaaccgacttggtatcgacaactttgagttcatccgagtgttggggaaggggagttttgggaaggtgatgcttgcaagagtaaaagaaacaggagacctctatgctgtgaaggtgctgaagaaggacgtgattctgcaggatgatgatgtggaatgcaccatgaccgagaaaaggatcctgtctctggcccgcaatcaccccttcctcactcagttgttctgctgctttcagacccccgatcgtctgttttttgtgatggagtttgtgaatgggggtgacttgatgttccacattcagaagtctcgtcgttttgatgaagcacgagctcgcttctatgctgcagaaatcatttcggctctcatgttcctccatgataaaggaatcatctatagagatctgaaactggacaatgtcctgttggaccacgagggtcactgtaaactggcagacttcggaatgtgcaaggaggggatttgcaatggtgtcaccacggccacattctgtggcacgccagactatatcgctccagagatcctccaggaaatgctgtacgggcctgcagtagactggtgggcaatgggcgtgttgctctatgagatgctctgtggtcacgcgccttttgaggcagagaacgaagatgacctctttgaggccatactgaatgatgaggtggtctaccctacctggctccatgaagatgccacagggatcctaaaatctttcatgaccaagaaccccaccatgcgcttgggcagcctgactcagggaggcgagcacgccatcttgagacatcctttttttaaggaaatcgactgggcccagctgaaccatcgccaaatagaaccgcctttcagacccagaatcaaatcccgagaagatgtcagtaattttgaccctgacttcataaaggaagagccagttttaactccaattgatgagggacatcttccaatgattaaccaggatgagtttagaaacttttcctatgtgtctccagaattgcaaccatag

SEQ ID NO: 173 - DNA, 756 bp, Homo sapiens; identical to SEQ ID NO: 133

SEQ ID NO: 174 - DNA, 2085 bp, Homo sapiens
atggagggcgccggcggcgcgaacgacaagaaaaataggataagttctgaacgtcgaaaagaaaagtctcgagatgcagccagatctcggcgaagtaaagaatctgaagttttttatgagcttgctcatcagttgccacttccacataatgtgagttcgcatcttgataaggcctctgtgatgaggcttaccatcagctatttgcgtgtgaggaaacttctggatgctggtgatttggatattgaagatgacatgaaagcacagatgaattgcttttatttgaaagccttggatggttttgttatggttctcacagatgatggtgacatgatttacatttctgataatgtgaacaaatacatgggattaactcagtttgaactaactggacacagtgtgtttgattttactcatccatgtgaccatgaggaaatgagagaaatgcttacacacagaaatgctactctccagagagaccggatcttcaaacattttaccaggaagcgccaaagggctatgcgaaggcgagtccaccagatcaatggacacaagttcatggccacgtatctgaggcagcccacctactgctctcactgcagggagtttatctggggagtgtttgggaaacagggttatcagtgccaagtgtgcacctgtgtcgtccataaacgctgccatcatctaattgttacagcctgtacttgccaaaacaatattaacaaagtggattcaaagattgcagaacagaggttcgggatcaacatcccacacaagttcagcatccacaactacaaagtgccaacattctgcgatcactgtggctcactgctctggggaataatgcgacaaggacttcagtgtaaaatatgtaaaatgaatgtgcatattcgatgtcaagcgaacgtggcccctaactgtggggtaaatgcggtggaacttgccaagaccctggcagggatgggtctccaacccggaaatatttctccaacctcgaaactcgtttccagatcgaccctaagacgacagggaaaggagagcagcaaagaaggaaatgggattggggttaattcttccaaccgacttggtatcgacaactttgagttcatccgagtgttggggaaggggagttttgggaaggtgatgcttgcaagagtaaaagaaacaggagacctctatgctgtgaaggtgctgaagaaggacgtgattctgcaggatgatgatgtggaatgcaccatgaccgagaaaaggatcctgtctctggcccgcaatcaccccttcctcactcagttgttctgctgctttcagacccccgatcgtctgttttttgtgatggagtttgtgaatgggggtgacttgatgttccacattcagaagtctcgtcgttttgatgaagcacgagctcgcttctatgctgcagaaatcatttcggctctcatgttcctccatgataaaggaatcatctatagagatctgaaactggacaatgtcctgttggaccacgagggtcactgtaaactggcagacttcggaatgtgcaaggaggggatttgcaatggtgtcaccacggccacattctgtggcacgccagactatatcgctccagagatcctccaggaaatgctgtacgggcctgcagtagactggtgggcaatgggcgtgttgctctatgagatgctctgtggtcacgcgccttttgaggcagagaacgaagatgacctctttgaggccatactgaatgatgaggtggtctaccctacctggctccatgaagatgccacagggatcctaaaatctttcatgaccaagaaccccaccatgcgcttgggcagcctgactcagggaggcgagcacgccatcttgagacatcctttttttaaggaaatcgactgggcccagctgaaccatcgccaaatagaaccgcctttcagacccagaatcaaatcccgagaagatgtcagtaattttgaccctgacttcataaaggaagagccagttttaactccaattgatgagggacatcttccaatgattaaccaggatgagtttagaaacttttcctatgtgtctccagaattgcaaccatag

SEQ ID NO: 175 - DNA, 2154 bp, Homo sapiens
atgagctcccaatgtcggagtttggaaaacaaatttgtctttttaaaagaaggtctaggaaactcaaaacctgaagaattggaagaaatcagaatagaaaatggtaggataagttctgaacgtcgaaaagaaaagtctcgagatgcagccagatctcggcgaagtaaagaatctgaagttttttatgagcttgctcatcagttgccacttccacataatgtgagttcgcatcttgataaggcctctgtgatgaggcttaccatcagctatttgcgtgtgaggaaacttctggatgctggtgatttggatattgaagatgacatgaaagcacagatgaattgcttttatttgaaagccttggatggttttgttatggttctcacagatgatggtgacatgatttacatttctgataatgtgaacaaatacatgggattaactcagtttgaactaactggacacagtgtgtttgattttactcatccatgtgaccatgaggaaatgagagaaatgcttacacacagaaatgctactctccagagagaccggatcttcaaacattttaccaggaagcgccaaagggctatgcgaaggcgagtccaccagatcaatggacacaagttcatggccacgtatctgaggcagcccacctactgctctcactgcagggagtttatctggggagtgtttgggaaacagggttatcagtgccaagtgtgcacctgtgtcgtccataaacgctgccatcatctaattgttacagcctgtacttgccaaaacaatattaacaaagtggattcaaagattgcagaacagaggttcgggatcaacatcccacacaagttcagcatccacaactacaaagtgccaacattctgcgatcactgtggctcactgctctggggaataatgcgacaaggacttcagtgtaaaatatgtaaaatgaatgtgcatattcgatgtcaagcgaacgtggcccctaactgtggggtaaatgcggtggaacttgccaagaccctggcagggatgggtctccaacccggaaatatttctccaacctcgaaactcgtttccagatcgaccctaagacgacagggaaaggagagcagcaaagaaggaaatgggattggggttaattcttccaaccgacttggtatcgacaactttgagttcatccgagtgttggggaaggggagttttgggaaggtgatgcttgcaagagtaaaagaaacaggagacctctatgctgtgaaggtgctgaagaaggacgtgattctgcaggatgatgatgtggaatgcaccatgaccgagaaaaggatcctgtctctggcccgcaatcaccccttcctcactcagttgttctgctgctttcagacccccgatcgtctgttttttgtgatggagtttgtgaatgggggtgacttgatgttccacattcagaagtctcgtcgttttgatgaagcacgagctcgcttctatgctgcagaaatcatttcggctctcatgttcctccatgataaaggaatcatctatagagatctgaaactggacaatgtcctgttggaccacgagggtcactgtaaactggcagacttcggaatgtgcaaggaggggatttgcaatggtgtcaccacggccacattctgtggcacgccagactatatcgctccagagatcctccaggaaatgctgtacgggcctgcagtagactggtgggcaatgggcgtgttgctctatgagatgctctgtggtcacgcgccttttgaggcagagaacgaagatgacctctttgaggccatactgaatgatgaggtggtctaccctacctggctccatgaagatgccacagggatcctaaaatctttcatgaccaagaaccccaccatgcgcttgggcagcctgactcagggaggcgagcacgccatcttgagacatcctttttttaaggaaatcgactgggcccagctgaaccatcgccaaatagaaccgcctttcagacccagaatcaaatcccgagaagatgtcagtaattttgaccctgacttcataaaggaagagccagttttaactccaattgatgagggacatcttccaatgattaaccaggatgagtttagaaacttttcctatgtgtctccagaattgcaaccatag

SEQ ID NO: 176 - DNA, 1569 bp, Homo sapiens; identical to SEQ ID NO: 134

SEQ ID NO: 177 - DNA, 2712 bp, Homo sapiens
atggagggcgccggcggcgcgaacgacaagaaaaagataagttctgaacgtcgaaaagaaaagtctcgagatgcagccagatctcggcgaagtaaagaatctgaagttttttatgagcttgctcatcagttgccacttccacataatgtgagttcgcatcttgataaggcctctgtgatgaggcttaccatcagctatttgcgtgtgaggaaacttctggatgctggtgatttggatattgaagatgacatgaaagcacagatgaattgcttttatttgaaagccttggatggttttgttatggttctcacagatgatggtgacatgatttacatttctgataatgtgaacaaatacatgggattaactcagtttgaactaactggacacagtgtgtttgattttactcatccatgtgaccatgaggaaatgagagaaatgcttacacacagaaatggccttgtgaaaaagggtaaagaacaaaacacacagcgaagcttttttctcagaatgaagtgtaccctaactagccgaggaagaactatgaacataaagtctgcaacatggaaggtattgcactgcacaggccacattcacgtatatgataccaacagtaaccaacctcagtgtgggtataagaaaccacctatgacctgcttggtgctgatttgtgaacccattcctcacccatcaaatattgaaattcctttagatagcaagactttcctcagtcgacacagcctggatatgaaattttcttattgtgatgaaagaattaccgaattgatgggatatgagccagaagaacttttaggccgctcaatttatgaatattatcatgctttggactctgatcatctgaccaaaactcatcatgatatgtttactaaaggacaagtcaccacaggacagtacaggatgcttgccaaaagaggtggatatgtctgggttgaaactcaagcaactgtcatatataacaccaagaattctcaaccacagtgcattgtatgtgtgaattacgttgtgagtggtattattcagcacgacttgattttctcccttcaacaaacagaatgtgtccttaaaccggttgaatcttcagatatgaaaatgactcagctattcaccaaagttgaatcagaagatacaagtagcctctttgacaaacttaagaaggaacctgatgctttaactttgctggccccagccgctggagacacaatcatatctttagattttggcagcaacgacacagaaactgatgaccagcaacttgaggaagtaccattatataatgatgtaatgctcccctcacccaacgaaaaattacagaatataaatttggcaatgtctccattacccaccgctgaaacgccaaagccacttcgaagtagtgctgaccctgcactcaatcaagaagttgcattaaaattagaaccaaatccagagtcactggaactttcttttaccatgccccagattcaggatcagacacctagtccttccgatggaagcactagacaaagttcacctgagcctaatagtcccagtgaatattgtttttatgtggatagtgatatggtcaatgaattcaagttggaattggtagaaaaactttttgctgaagacacagaagcaaagaacccattttctactcaggacacagatttagacttggagatgttagctccctatatcccaatggatgatgacttccagttacgttccttcgatcagttgtcaccattagaaagcagttccgcaagccctgaaagcgcaagtcctcaaagcacagttacagtattccagcagactcaaatacaagaacctactgctaatgccaccactaccactgccaccactgatgaattaaaaacagtgacaaaagaccgtatggaagacattaaaatattgattgcatctccatctcctacccacatacataaagaaactactagtgccacatcatcaccatatagagatactcaaagtcggacagcctcaccaaacagagcaggaaaaggagtcatagaacagacagaaaaatctcatccaagaagccctaacgtgttatctgtcgctttgagtcaaagagatctgaaactggacaatgtcctgttggaccacgagggtcactgtaaactggcagacttcggaatgtgcaaggaggggatttgcaatggtgtcaccacggccacattctgtggcacgccagactatatcgctccagagatcctccaggaaatgctgtacgggcctgcagtagactggtgggcaatgggcgtgttgctctatgagatgctctgtggtcacgcgccttttgaggcagagaacgaagatgacctctttgaggccatactgaatgatgaggtggtctaccctacctggctccatgaagatgccacagggatcctaaaatctttcatgaccaagaaccccaccatgcgcttgggcagcctgactcagggaggcgagcacgccatcttgagacatcctttttttaaggaaatcgactgggcccagctgaaccatcgccaaatagaaccgcctttcagacccagaatcaaatcccgagaagatgtcagtaattttgaccctgacttcataaaggaagagccagttttaactccaattgatgagggacatcttccaatgattaaccaggatgagtttagaaacttttcctatgtgtctccagaattgcaaccatag

SEQ ID NO: 178 - DNA, 654 bp, Homo sapiens
atggagggcgccggcggcgcgaacgacaagaaaaaagatctgaaactggacaatgtcctgttggaccacgagggtcactgtaaactggcagacttcggaatgtgcaaggaggggatttgcaatggtgtcaccacggccacattctgtggcacgccagactatatcgctccagagatcctccaggaaatgctgtacgggcctgcagtagactggtgggcaatgggcgtgttgctctatgagatgctctgtggtcacgcgccttttgaggcagagaacgaagatgacctctttgaggccatactgaatgatgaggtggtctaccctacctggctccatgaagatgccacagggatcctaaaatctttcatgaccaagaaccccaccatgcgcttgggcagcctgactcagggaggcgagcacgccatcttgagacatcctttttttaaggaaatcgactgggcccagctgaaccatcgccaaatagaaccgcctttcagacccagaatcaaatcccgagaagatgtcagtaattttgaccctgacttcataaaggaagagccagttttaactccaattgatgagggacatcttccaatgattaaccaggatgagtttagaaacttttcctatgtgtctccagaattgcaaccatag

SEQ ID NO: 179 - DNA, 2715 bp, Homo sapiens
atggagggcgccggcggcgcgaacgacaagaaaaataggataagttctgaacgtcgaaaagaaaagtctcgagatgcagccagatctcggcgaagtaaagaatctgaagttttttatgagcttgctcatcagttgccacttccacataatgtgagttcgcatcttgataaggcctctgtgatgaggcttaccatcagctatttgcgtgtgaggaaacttctggatgctggtgatttggatattgaagatgacatgaaagcacagatgaattgcttttatttgaaagccttggatggttttgttatggttctcacagatgatggtgacatgatttacatttctgataatgtgaacaaatacatgggattaactcagtttgaactaactggacacagtgtgtttgattttactcatccatgtgaccatgaggaaatgagagaaatgcttacacacagaaatggccttgtgaaaaagggtaaagaacaaaacacacagcgaagcttttttctcagaatgaagtgtaccctaactagccgaggaagaactatgaacataaagtctgcaacatggaaggtattgcactgcacaggccacattcacgtatatgataccaacagtaaccaacctcagtgtgggtataagaaaccacctatgacctgcttggtgctgatttgtgaacccattcctcacccatcaaatattgaaattcctttagatagcaagactttcctcagtcgacacagcctggatatgaaattttcttattgtgatgaaagaattaccgaattgatgggatatgagccagaagaacttttaggccgctcaatttatgaatattatcatgctttggactctgatcatctgaccaaaactcatcatgatatgtttactaaaggacaagtcaccacaggacagtacaggatgcttgccaaaagaggtggatatgtctgggttgaaactcaagcaactgtcatatataacaccaagaattctcaaccacagtgcattgtatgtgtgaattacgttgtgagtggtattattcagcacgacttgattttctcccttcaacaaacagaatgtgtccttaaaccggttgaatcttcagatatgaaaatgactcagctattcaccaaagttgaatcagaagatacaagtagcctctttgacaaacttaagaaggaacctgatgctttaactttgctggccccagccgctggagacacaatcatatctttagattttggcagcaacgacacagaaactgatgaccagcaacttgaggaagtaccattatataatgatgtaatgctcccctcacccaacgaaaaattacagaatataaatttggcaatgtctccattacccaccgctgaaacgccaaagccacttcgaagtagtgctgaccctgcactcaatcaagaagttgcattaaaattagaaccaaatccagagtcactggaactttcttttaccatgccccagattcaggatcagacacctagtccttccgatggaagcactagacaaagttcacctgagcctaatagtcccagtgaatattgtttttatgtggatagtgatatggtcaatgaattcaagttggaattggtagaaaaactttttgctgaagacacagaagcaaagaacccattttctactcaggacacagatttagacttggagatgttagctccctatatcccaatggatgatgacttccagttacgttccttcgatcagttgtcaccattagaaagcagttccgcaagccctgaaagcgcaagtcctcaaagcacagttacagtattccagcagactcaaatacaagaacctactgctaatgccaccactaccactgccaccactgatgaattaaaaacagtgacaaaagaccgtatggaagacattaaaatattgattgcatctccatctcctacccacatacataaagaaactactagtgccacatcatcaccatatagagatactcaaagtcggacagcctcaccaaacagagcaggaaaaggagtcatagaacagacagaaaaatctcatccaagaagccctaacgtgttatctgtcgctttgagtcaaagagatctgaaactggacaatgtcctgttggaccacgagggtcactgtaaactggcagacttcggaatgtgcaaggaggggatttgcaatggtgtcaccacggccacattctgtggcacgccagactatatcgctccagagatcctccaggaaatgctgtacgggcctgcagtagactggtgggcaatgggcgtgttgctctatgagatgctctgtggtcacgcgccttttgaggcagagaacgaagatgacctctttgaggccatactgaatgatgaggtggtctaccctacctggctccatgaagatgccacagggatcctaaaatctttcatgaccaagaaccccaccatgcgcttgggcagcctgactcagggaggcgagcacgccatcttgagacatcctttttttaaggaaatcgactgggcccagctgaaccatcgccaaatagaaccgcctttcagacccagaatcaaatcccgagaagatgtcagtaattttgaccctgacttcataaaggaagagccagttttaactccaattgatgagggacatcttccaatgattaaccaggatgagtttagaaacttttcctatgtgtctccagaattgcaaccatag

SEQ ID NO: 180 - DNA, 738 bp, Homo sapiens
atggatgatcgagaggatctggtgtaccaggcgaagctggccgagcaggctgagcgatacgacggggtgagcccctccagactccgaataggagatcaagagtttgattcattgcctgctttactggaattctacaaaatacactatttggacactacaacgttgatagaaccagtttccagatccaggcagggtagtggagtgattctcaggcaggaggaggcggagtatgtgcgagccctctttgactttaatgggaatgatgaggaagatcttccctttaagaaaggagacatcttgagaatccgggacaagcctgaagagcagtggtggaatgcggaggacagcgaaggcaagagagggatgattccagtcccttacgtcgagaagtatagacctgcctccgcctcagtatcggctctgattggaggtaaccaggagggttcccacccacagccactgggtgggccggagcctgggccctatgcccaacccagcgtcaacactccgctccctaacctccagaatgggcccatatatgccagggttatccagaagcgagtccccaatgcctacgacaagacagccttggctttggaggtcggtgagctggtaaaggttacgaagattaatgtgagtggtcagtgggaaggggagtgtaatggcaaacgaggtcacttcccattcacacatgtccgtctgctggatcaacagaatcccgatgaggacttcagctga

SEQ ID NO: 181 - DNA, 438 bp, Homo sapiens
atggatgatcgagaggatctggtgtaccaggcgaagctggccgagcaggctgagcgatacgacggggtgagcccctccagactccgaataggagatcaagagtttgattcattgcctgctttactggaattctacaaaatacactatttggacactacaacgttgatagaaccagtttccagatccaggcagggtagtggagtgattctcaggcaggaggaggcggagtatgtgcgagccctctttgactttaatgggaatgatgaggaagatcttccctttaagaaaggagacatcttgagaatccgggacaagcctgaagagcagtggtggaatgcggaggacagcgaaggcaagagagggatgattccagtcccttacgtcgagaagtatagacctgcctccgcctcagtatcggctctgattggaggtcggtga

SEQ ID NO: 182 - DNA, 1104 bp, Homo sapiens
atgtcagttaactctgagaagtcgtcctcttcagaaagaataactgcacaaagacttgcccacctgaataagtgcttgatgaactttaagctagggaatttcagctatcaaaaaaacccactgaaattgggagagcttcaaggaaaccacttcactgttgttctcagaaatataacaggaactgatgaccaagtacagcaagctatgaactctctcaaggagattggatttattaactactatggaatgcaaagatttggaaccacagctgtccctacgtatcaggttggaagagctatactacaaaattcctggacagaagtcatggatttaatattgaaaccccgctctggagctgaaaagggctacttggttaaatgcagagaagaatgggcaaagaccaaagacccaactgctgccctcagaaaactacctgtcaaaaggtgtgtggaagggcagctgcttcgaggactttcaaaatatggaatgaagaatatagtctctgcatttggcataatacccagaaataatcgcttaatgtatattcatagctaccaaagctatgtgtggaataacatggtaagcaagaggatagaagactatggactaaaacctgttccaggggacctcgttctcaaaggagccacagccacctatattgaggaagatgatgttaataattactctatccatgatgtggtaatgcccttgcctggtttcgatgttatctacccaaagcataaaattcaagaagcctacagggaaatgctcacagctgacaatcttgatattgacaacatgagacacaaaattcgagattattccttgtcaggggcctaccgaaagatcattattcgtcctcagaatgttagctgggaagtcgttgcatatgatgatcccaaaattccacttttcaacacagatgtggacaacctagaagggaagacaccaccagtttttgcttctgaaggcaaatacagggctctgaaaatggatttttctctacccccttctacttacgccaccatggccattcgagaagtgctaaaaatggataccagtatcaagaaccagacgcagctgaatacaacctggcttcgctga

SEQ ID NO: 183 - DNA, 882 bp, Homo sapiens
atgagctcccggaaagtgctggccattcaggcccgaaagcggaggccgaaaagagagaaacatccgaaaaaagctatactacaaaattcctggacagaagtcatggatttaatattgaaaccccgctctggagctgaaaagggctacttggttaaatgcagagaagaatgggcaaagaccaaagacccaactgctgccctcagaaaactacctgtcaaaaggtgtgtggaagggcagctgcttcgaggactttcaaaatatggaatgaagaatatagtctctgcatttggcataatacccagaaataatcgcttaatgtatattcatagctaccaaagctatgtgtggaataacatggtaagcaagaggatagaagactatggactaaaacctgttccaggggacctcgttctcaaaggagccacagccacctatattgaggaagatgatgttaataattactctatccatgatgtggtaatgcccttgcctggtttcgatgttatctacccaaagcataaaattcaagaagcctacagggaaatgctcacagctgacaatcttgatattgacaacatgagacacaaaattcgagattattccttgtcaggggcctaccgaaagatcattattcgtcctcagaatgttagctgggaagtcgttgcatatgatgatcccaaaattccacttttcaacacagatgtggacaacctagaagggaagacaccaccagtttttgcttctgaaggcaaatacagggctctgaaaatggatttttctctacccccttctacttacgccaccatggccattcgagaagtgctaaaaatggataccagtatcaagaaccagacgcagctgaatacaacctggcttcgctga

SEQ ID NO: 184 - DNA, 300 bp, Homo sapiens
atgagctcccggaaagtgctggccattcaggcccgaaagcggaggccgaaaagagagaaacatccgaaaaaggaagtcgttgcatatgatgatcccaaaattccacttttcaacacagatgtggacaacctagaagggaagacaccaccagtttttgcttctgaaggcaaatacagggctctgaaaatggatttttctctacccccttctacttacgccaccatggccattcgagaagtgctaaaaatggataccagtatcaagaaccagacgcagctgaatacaacctggcttcgctga

SEQ ID NO: 185 - DNA, 906 bp, Homo sapiens
atggccaaggagcggcgcagggcggtcctggagctgctgcagcggccggggaacgcgcgctgcgcggactgcggcgccccggatcccgactgggcctcctacactctgggcgtcttcatctgcctgagctgctcgggaatccaccggaatatcccccaggtcagcaaggtgaagtccgtccgcctggacgcctgggaggaggcccaagtggagttcatggcctcccacgggaacgacgccgcgagagccaggtttgagtccaaagtaccctccttctactaccggcccacgccctccgactgccagctccttcgagagcagtggatccgggccaagtacgagcgacaggagttcatctacccggagaagcaggagccctactcggcagaacaaaactattgtgagtcgaggtatcattttctgcactcagcggacggggagggctgtgccaacatgctggtggagtattccacgtcccgcggcttccgcagcgaggtggacatgttcgtggcccaggccgtgctacagtttctctgtttaaaaaacaaaagtagcgcatcggtggtcttcacgacgtacacccagaagcacccgtccatcgaggacgggcctccgtttgtggagccgctgcttaacttcatctggttcctgctgctggctgtggacggtgggaagctgacggtgttcactgtgctgtgtgagcagtaccagccatccctccggcgggaccccatgtacaacgagtacctcgaccgcataggacagctgttcttcggcgtcccgcccaagcagacgtcttcctacgggggcctgctcgggaaccttctgaccagcctcatgggctcctcagagcaggaggatggggaggagagccccagcgacggcagccccatcgagctggactga

SEQ ID NO: 186 - DNA, 621 bp, Homo sapiens
atggtattggcttcactcgagctccttcgagagcagtggatccgggccaagtacgagcgacaggagttcatctacccggagaagcaggagccctactcggcagaacaaaactattgtgagtcgaggtatcattttctgcactcagcggacggggagggctgtgccaacatgctggtggagtattccacgtcccgcggcttccgcagcgaggtggacatgttcgtggcccaggccgtgctacagtttctctgtttaaaaaacaaaagtagcgcatcggtggtcttcacgacgtacacccagaagcacccgtccatcgaggacgggcctccgtttgtggagccgctgcttaacttcatctggttcctgctgctggctgtggacggtgggaagctgacggtgttcactgtgctgtgtgagcagtaccagccatccctccggcgggaccccatgtacaacgagtacctcgaccgcataggacagctgttcttcggcgtcccgcccaagcagacgtcttcctacgggggcctgctcgggaaccttctgaccagcctcatgggctcctcagagcaggaggatggggaggagagccccagcgacggcagccccatcgagctggactga

SEQ ID NO: 187 - DNA, 690 bp, Homo sapiens
atggcctcccacgggaacgacgccgcgagagccaggtttgagtccaaagtaccctccttctactaccggcccacgccctccgactgccagctccttcgagagcagtggatccgggccaagtacgagcgacaggagttcatctacccggagaagcaggagccctactcggcagaacaaaactattgtgagtcgaggtatcattttctgcactcagcggacggggagggctgtgccaacatgctggtggagtattccacgtcccgcggcttccgcagcgaggtggacatgttcgtggcccaggccgtgctacagtttctctgtttaaaaaacaaaagtagcgcatcggtggtcttcacgacgtacacccagaagcacccgtccatcgaggacgggcctccgtttgtggagccgctgcttaacttcatctggttcctgctgctggctgtggacggtgggaagctgacggtgttcactgtgctgtgtgagcagtaccagccatccctccggcgggaccccatgtacaacgagtacctcgaccgcataggacagctgttcttcggcgtcccgcccaagcagacgtcttcctacgggggcctgctcgggaaccttctgaccagcctcatgggctcctcagagcaggaggatggggaggagagccccagcgacggcagccccatcgagctggactga

SEQ ID NO: 188 - DNA, 3237 bp, Homo sapiens
atggcggacggggagctgaacgtggacagcctcatcacccggctgctggaggtacgaggatgtcgtccaggaaagattgtgcagatgactgaagcagaagttcgaggcttatgtatcaagtctcgggagatctttctcagccagcctattcttttggaattggaagcaccgctgaaaatttgtgacatcctccgggaattcaacccttccctgaagggcttctctgttggcactgggaaagaaaccagtcctaatgccttcttaaaccaggctgtggcaggaggccgagctgaggatctacctgtccaggccaggaggctggtggacctgatgaagaatgacacgaggatacactttcaggaagactggaagataataaccctgtttataggcggcaatgacctctgtgatttctgcaatgatctggtccactattctccccagaacttcacagacaacattggaaaggccctggacatcctccatgctgaggttcctcgggcatttgtgaacctggtgacggtgcttgagatcgtcaacctgagggagctgtaccaggagaaaaaagtctactgcccaaggatgatcctcaggtctctgtgtccctgtgtcctgaagtttgatgataactcaacagaacttgctaccctcatcgaattcaacaagaagtttcaggagaagacccaccaactgattgagagtgggcgatatgacacaagggaagattttactgtggttgtgcagccgttctttgaaaacgtggacatgccaaagacctcggaaggattgcctgacaactctttcttcgctcctgactgtttccacttcagcagcaagtctcactcccgagcagccagtgctctctggaacaatatgctggagcctgttggccagaagacgactcgtcataagtttgaaaacaagatcaatatcacatgtccgaaccaggtccagccgtttctgaggacctacaagaacagcatgcagggtcatgggacctggctgccatgcagggacagagccccttctgccttgcaccctacctcagtgcatgccctgagacctgcagacatccaagttgtggctgctctgggggattctctgaccgctggcaatggaattggctccaaaccagacgacctccccgatgtcaccacacagtatcggggactgtcatacagtgcaggaggggacggctccctggagaatgtgaccaccttacctaatatccttcgggagtttaacagaaacctcacaggctacgccgtgggcacgggtgatgccaatgacacgaatgcattcctcaatcaagctgttcccggagcaaaggctgaggatcttatgagccaagtccaaactctgatgcagaagatgaaagatgatcatagagtaaatttccatgaagactggaaggtcatcacagtgctgatcggaggcagcgatttatgtgactactgcacagattcgaatctgtattctgcagccaactttgttcaccatctccgcaatgccttggacgtcctgcatagagaggtgcccagagtcctggtcaacctcgtggacttcctgaaccccactatcatgcggcaggtgttcctgggaaacccagacaagtgcccagtgcagcaggccagcgttttgtgtaactgcgttctgaccctgcgggagaactcccaagagctagccaggctggaggccttcagccgagcctaccggagcagcatgcgcgagctggtggggtcaggccgctatgacacgcaggaggacttctctgtggtgctgcagcccttcttccagaacatccagctccctgtcctggcggatgggctcccagatacgtccttctttgccccagactgcatccacccaaatcagaaattccactcccagctggccagagccctttggaccaatatgcttgaaccacttggaagcaaaacagagaccctggacctgagagcagagatgcccatcacctgtcccactcagaatgagcccttcctgagaacccctcggaatagtaactacacgtaccccatcaagccagccattgagaactggggcagtgacttcctgtgtacagagtggaaggcttccaatagtgttccaacctctgtccaccagctccgaccagcagacatcaaagtggtggccgccctgggtgactctctgactacagcagtgggagctcgaccaaacaactccagtgacctacccacatcttggaggggactctcttggagcattggaggggatgggaacttggagactcacaccacactgcccaacattctgaagaagttcaacccttacctccttggcttctctaccagcacctgggaggggacagcaggactaaatgtggcagcggaaggggccagagctagggacatgccagcccaggcctgggacctggtagagcgaatgaaaaacagccccgacatcaacctggagaaagactggaagctggtcacactcttcattggggtcaacgacttgtgtcattactgtgagaatccggaggcccacttggccacggaatatgttcagcacatccaacaggccctggacatcctctctgaggagctcccaagggctttcgtcaacgtggtggaggtcatggagctggctagcctgtaccagggccaaggcgggaaatgtgccatgctggcagctcagaacaactgcacttgcctcagacactcgcaaagctccctggagaagcaagaactgaagaaagtgaactggaacctccagcatggcatctccagtttctcctactggcaccaatacacacagcgtgaggactttgcggttgtggtgcagcctttcttccaaaacacactcaccccactgaacgagagaggggacactgacctcaccttcttctccgaggactgttttcacttctcagaccgcgggcatgccgagatggccatcgcactctggaacaacatgctggaaccagtgggccgcaagactacctccaacaacttcacccacagccgagccaaactcaagtgcccctctcctgagagcccttacctctacaccctgcggaacagccgattgctcccagaccaggctgaagaagcccccgaggtgctctactgggctgtcccagtggcagcgggagtcggccttgtggtgggcatcatcgggacagtggtctggaggtgcaggagaggtggccggagggaagatcctccaatgagcctgcgcactgtggccctctag

SEQ ID NO: 189 - DNA, 1263 bp, Homo sapiens
atggcggacggggagctgaacgtggacagcctcatcacccggctgctggaggtacgaggatgtcgtccaggaaagattgtgcagatgactgaagcagaagttcgaggcttatgtatcaagtctcgggagatctttctcagccagcctattcttttggaattggaagcaccgctgaaaatttgtgacatcctccgggaattcaacccttccctgaagggcttctctgttggcactgggaaagaaaccagtcctaatgccttcttaaaccaggctgtggcaggaggccgagctgaggatctacctgtccaggccaggaggctggtggacctgatgaagaatgacacgaggatacactttcaggaagactggaagataataaccctgtttataggcggcaatgacctctgtgatttctgcaatgatctggtccactattctccccagaacttcacagacaacattggaaaggccctggacatcctccatgctgaggttcctcgggcatttgtgaacctggtgacggtgcttgagatcgtcaacctgagggagctgtaccaggagaaaaaagtctactgcccaaggatgatcctcaggtctctgtgtccctgtgtcctgaagtttgatgataactcaacagaacttgctaccctcatcgaattcaacaagaagtttcaggagaagacccaccaactgattgagagtgggcgatatgacacaagggaagattttactgtggttgtgcagccgttctttgaaaacgtggacatgccaaagacctcggaaggattgcctgacaactctttcttcgctcctgactgtttccacttcagcagcaagtctcactcccgagcagccagtgctctctggaacaatatgctggagcctgttggccagaagacgactcgtcataagtttgaaaacaagatcaatatcacatgtccgaaccaggtccagccgtttctgaggacctacaagaacagcatgcagggtcatgggacctggctgccatgcagggacagagccccttctgccttgcaccctacctcagtgcatgccctgagacctgcagacatccaagttgtggctgctctgggggattctctgaccgctggcaatggaattggctccaaaccagacgacctccccgatgtcaccacacagtatcggggactgtcatacagagaaagtaaaccagggttcttatcagactcctgggtcagcaaatccaacaggaaatgcaccagaaaagcaccaaatccctga

SEQ ID NO: 190 - DNA, 3087 bp, Homo sapiens
atgactgaagcagaagttcgaggcttatgtatcaagtctcgggagatctttctcagccagcctattcttttggaattggaagcaccgctgaaaatttgtgacatcctccgggaattcaacccttccctgaagggcttctctgttggcactgggaaagaaaccagtcctaatgccttcttaaaccaggctgtggcaggaggccgagctgaggatctacctgtccaggccaggaggctggtggacctgatgaagaatgacacgaggatacactttcaggaagactggaagataataaccctgtttataggcggcaatgacctctgtgatttctgcaatgatctggttcctcgggcatttgtgaacctggtgacggtgcttgagatcgtcaacctgagggagctgtaccaggagaaaaaagtctactgcccaaggatgatcctcaggtctctgtgtccctgtgtcctgaagtttgatgataactcaacagaacttgctaccctcatcgaattcaacaagaagtttcaggagaagacccaccaactgattgagagtgggcgatatgacacaagggaagattttactgtggttgtgcagccgttctttgaaaacgtggacatgccaaagacctcggaaggattgcctgacaactctttcttcgctcctgactgtttccacttcagcagcaagtctcactcccgagcagccagtgctctctggaacaatatgctggagcctgttggccagaagacgactcgtcataagtttgaaaacaagatcaatatcacatgtccgaaccaggtccagccgtttctgaggacctacaagaacagcatgcagggtcatgggacctggctgccatgcagggacagagccccttctgccttgcaccctacctcagtgcatgccctgagacctgcagacatccaagttgtggctgctctgggggattctctgaccgctggcaatggaattggctccaaaccagacgacctccccgatgtcaccacacagtatcggggactgtcatacagtgcaggaggggacggctccctggagaatgtgaccaccttacctaatatccttcgggagtttaacagaaacctcacaggctacgccgtgggcacgggtgatgccaatgacacgaatgcattcctcaatcaagctgttcccggagcaaaggctgaggatcttatgagccaagtccaaactctgatgcagaagatgaaagatgatcatagagtaaatttccatgaagactggaaggtcatcacagtgctgatcggaggcagcgatttatgtgactactgcacagattcgaatctgtattctgcagccaactttgttcaccatctccgcaatgccttggacgtcctgcatagagaggtgcccagagtcctggtcaacctcgtggacttcctgaaccccactatcatgcggcaggtgttcctgggaaacccagacaagtgcccagtgcagcaggccagcgttttgtgtaactgcgttctgaccctgcgggagaactcccaagagctagccaggctggaggccttcagccgagcctaccggagcagcatgcgcgagctggtggggtcaggccgctatgacacgcaggaggacttctctgtggtgctgcagcccttcttccagaacatccagctccctgtcctggcggatgggctcccagatacgtccttctttgccccagactgcatccacccaaatcagaaattccactcccagctggccagagccctttggaccaatatgcttgaaccacttggaagcaaaacagagaccctggacctgagagcagagatgcccatcacctgtcccactcagaatgagcccttcctgagaacccctcggaatagtaactacacgtaccccatcaagccagccattgagaactggggcagtgacttcctgtgtacagagtggaaggcttccaatagtgttccaacctctgtccaccagctccgaccagcagacatcaaagtggtggccgccctgggtgactctctgactacagcagtgggagctcgaccaaacaactccagtgacctacccacatcttggaggggactctcttggagcattggaggggatgggaacttggagactcacaccacactgcccaacattctgaagaagttcaacccttacctccttggcttctctaccagcacctgggaggggacagcaggactaaatgtggcagcggaaggggccagagctagggacatgccagcccaggcctgggacctggtagagcgaatgaaaaacagccccgacatcaacctggagaaagactggaagctggtcacactcttcattggggtcaacgacttgtgtcattactgtgagaatccggaggcccacttggccacggaatatgttcagcacatccaacaggccctggacatcctctctgaggagctcccaagggctttcgtcaacgtggtggaggtcatggagctggctagcctgtaccagggccaaggcgggaaatgtgccatgctggcagctcagaacaactgcacttgcctcagacactcgcaaagctccctggagaagcaagaactgaagaaagtgaactggaacctccagcatggcatctccagtttctcctactggcaccaatacacacagcgtgaggactttgcggttgtggtgcagcctttcttccaaaacacactcaccccactgaacgagagaggggacactgacctcaccttcttctccgaggactgttttcacttctcagaccgcgggcatgccgagatggccatcgcactctggaacaacatgctggaaccagtgggccgcaagactacctccaacaacttcacccacagccgagccaaactcaagtgcccctctcctgagagcccttacctctacaccctgcggaacagccgattgctcccagaccaggctgaagaagcccccgaggtgctctactgggctgtcccagtggcagcgggagtcggccttgtggtgggcatcatcgggacagtggtctggaggtgcaggagaggtggccggagggaagatcctccaatgagcctgcgcactgtggccctctag

SEQ ID NO: 191 - DNA, 1308 bp, Homo sapiens
atggcggacggggagctgaacgtggacagcctcatcacccggctgctggaggttcataggctgaagccggctgacatcaacgtaattggagccctgggtgactctctcacggcaggcaatggggccgggtccacacctgggaacgtcttggacgtcttgactcagtaccgaggcctgtcctggagcgtcggcggagatgagaacatcggcaccgttaccaccctggcgaacatcctccgggaattcaacccttccctgaagggcttctctgttggcactgggaaagaaaccagtcctaatgccttcttaaaccaggctgtggcaggaggccgagctgaggatctacctgtccaggccaggaggctggtggacctgatgaagaatgacacgaggatacactttcaggaagactggaagataataaccctgtttataggcggcaatgacctctgtgatttctgcaatgatctggtccactattctccccagaacttcacagacaacattggaaaggccctggacatcctccatgctgaggttcctcgggcatttgtgaacctggtgacggtgcttgagatcgtcaacctgagggagctgtaccaggagaaaaaagtctactgcccaaggatgatcctcaggtctctgtgtccctgtgtcctgaagtttgatgataactcaacagaacttgctaccctcatcgaattcaacaagaagtttcaggagaagacccaccaactgattgagagtgggcgatatgacacaagggaagattttactgtggttgtgcagccgttctttgaaaacgtggacatgccaaagacctcggaaggattgcctgacaactctttcttcgctcctgactgtttccacttcagcagcaagtctcactcccgagcagccagtgctctctggaacaatatgctggagcctgttggccagaagacgactcgtcataagtttgaaaacaagatcaatatcacatgtccgaaccaggtccagccgtttctgaggacctacaagaacagcatgcagggtcatgggacctggctgccatgcagggacagagccccttctgccttgcaccctacctcagtgcatgccctgagacctgcagacatccaagttgtggctgctctgggggattctctgaccgctggcaatggaattggctccaaaccagacgacctccccgatgtcaccacacagtatcggggactgtcatacagagaaagtaaaccagggttcttatcagactcctgggtcagcaaatccaacaggaaatgcaccagaaaagcaccaaatccctga

SEQ ID NO: 192 - DNA, 4341 bp, Homo sapiens
atggcggacggggagctgaacgtggacagcctcatcacccggctgctggaggggacccctcagatccatacctctcctagaaagagtacattggaagggcagctatggccagagaccctgaagaattctccattcccatgcaacccaaataaattaggagtgaatatgccttctaaatcagttcactctctgaagccttctgatattaaatttgtggcagccattggcaatctggaaattcctccagacccagggacgggcgatctggagaagcaagactggactgaaaggccacagcaggtgtgcatgggagtgatgacagtcctttcagacatcatcagatatttcagtccttctgttccaatgcctgtgtgccacactggaaagagagtcataccccacgatggtgctgaagacttgtggattcaggctcaagaactggtgagaaacatgaaagagaacctgcaacttgactttcaatttgactggaagctcatcaatgtgttcttcagtaatgcaagccagtgttacctgtgcccctctgctcaacaggcaccctcacttagcacggttctcctctcacagaatgggcttgcggcgggcggcgtggatgagctgatgggggtgctggactacctgcagcaggaggtccccagagcatttgtaaacctggtggacctctctgaggttgcagaggtctctcgtcagtatcacggcacttggctcagccctgcaccagagccctgtaattgctcagaggagaccacccggctggccaaggtggtgatgcagtggtcttatcaggaagcctggaacagcctcctggcctccagcaggtacagtgagcaggagtccttcaccgtggttttccagcctttcttctatgagaccaccccatctctacactcggaggacccccgactccaggattctaccacgctggcctggcatctctggaataggatgatggagccagcaggagagaaagatgagccattgagtgtaaaacacgggaggccaatgaagtgtccctctcaggagagcccctatctgttcagctacagaaacagcaactacctgaccagactgcagaaaccccaagacaagcttgaggtaagagaaggagcggaaatcagatgtcctgacaaagacccctccgatacggttcccacctcagttcataggctgaagccggctgacatcaacgtaattggagccctgggtgactctctcacggcaggcaatggggccgggtccacacctgggaacgtcttggacgtcttgactcagtaccgaggcctgtcctggagcgtcggcggagatgagaacatcggcaccgttaccaccctggcgaacatcctccgggaattcaacccttccctgaagggcttctctgttggcactgggaaagaaaccagtcctaatgccttcttaaaccaggctgtggcaggaggccgagctgaggatctacctgtccaggccaggaggctggtggacctgatgaagaatgacacgaggatacactttcaggaagactggaagataataaccctgtttataggcggcaatgacctctgtgatttctgcaatgatctggttcctcgggcatttgtgaacctggtgacggtgcttgagatcgtcaacctgagggagctgtaccaggagaaaaaagtctactgcccaaggatgatcctcaggtctctgtgtccctgtgtcctgaagtttgatgataactcaacagaacttgctaccctcatcgaattcaacaagaagtttcaggagaagacccaccaactgattgagagtgggcgatatgacacaagggaagattttactgtggttgtgcagccgttctttgaaaacgtggacatgccaaagacctcggaaggattgcctgacaactctttcttcgctcctgactgtttccacttcagcagcaagtctcactcccgagcagccagtgctctctggaacaatatgctggagcctgttggccagaagacgactcgtcataagtttgaaaacaagatcaatatcacatgtccgaaccaggtccagccgtttctgaggacctacaagaacagcatgcagggtcatgggacctggctgccatgcagggacagagccccttctgccttgcaccctacctcagtgcatgccctgagacctgcagacatccaagttgtggctgctctgggggattctctgaccgctggcaatggaattggctccaaaccagacgacctccccgatgtcaccacacagtatcggggactgtcatacagtgcaggaggggacggctccctggagaatgtgaccaccttacctaatatccttcgggagtttaacagaaacctcacaggctacgccgtgggcacgggtgatgccaatgacacgaatgcattcctcaatcaagctgttcccggagcaaaggctgaggatcttatgagccaagtccaaactctgatgcagaagatgaaagatgatcatagagtaaatttccatgaagactggaaggtcatcacagtgctgatcggaggcagcgatttatgtgactactgcacagattcgaatctgtattctgcagccaactttgttcaccatctccgcaatgccttggacgtcctgcatagagaggtgcccagagtcctggtcaacctcgtggacttcctgaaccccactatcatgcggcaggtgttcctgggaaacccagacaagtgcccagtgcagcaggccagcgttttgtgtaactgcgttctgaccctgcgggagaactcccaagagctagccaggctggaggccttcagccgagcctaccggagcagcatgcgcgagctggtggggtcaggccgctatgacacgcaggaggacttctctgtggtgctgcagcccttcttccagaacatccagctccctgtcctggcggatgggctcccagatacgtccttctttgccccagactgcatccacccaaatcagaaattccactcccagctggccagagccctttggaccaatatgcttgaaccacttggaagcaaaacagagaccctggacctgagagcagagatgcccatcacctgtcccactcagaatgagcccttcctgagaacccctcggaatagtaactacacgtaccccatcaagccagccattgagaactggggcagtgacttcctgtgtacagagtggaaggcttccaatagtgttccaacctctgtccaccagctccgaccagcagacatcaaagtggtggccgccctgggtgactctctgactacagcagtgggagctcgaccaaacaactccagtgacctacccacatcttggaggggactctcttggagcattggaggggatgggaacttggagactcacaccacactgcccaacattctgaagaagttcaacccttacctccttggcttctctaccagcacctgggaggggacagcaggactaaatgtggcagcggaaggggccagagctagggacatgccagcccaggcctgggacctggtagagcgaatgaaaaacagccccgacatcaacctggagaaagactggaagctggtcacactcttcattggggtcaacgacttgtgtcattactgtgagaatccggaggcccacttggccacggaatatgttcagcacatccaacaggccctggacatcctctctgaggagctcccaagggctttcgtcaacgtggtggaggtcatggagctggctagcctgtaccagggccaaggcgggaaatgtgccatgctggcagctcagaacaactgcacttgcctcagacactcgcaaagctccctggagaagcaagaactgaagaaagtgaactggaacctccagcatggcatctccagtttctcctactggcaccaatacacacagcgtgaggactttgcggttgtggtgcagcctttcttccaaaacacactcaccccactgaacgagagaggggacactgacctcaccttcttctccgaggactgttttcacttctcagaccgcgggcatgccgagatggccatcgcactctggaacaacatgctggaaccagtgggccgcaagactacctccaacaacttcacccacagccgagccaaactcaagtgcccctctcctgagagcccttacctctacaccctgcggaacagccgattgctcccagaccaggctgaagaagcccccgaggtgctctactgggctgtcccagtggcagcgggagtcggccttgtggtgggcatcatcgggacagtggtctggaggtgcaggagaggtggccggagggaagatcctccaatgagcctgcgcactgtggccctctag

SEQ ID NO: 193 - DNA, 3153 bp, Homo sapiens
atgactgaagcagaagttcgaggcttatgtatcaagtctcgggagatctttctcagccagcctattcttttggaattggaagcaccgctgaaaatttgtgacatcctccgggaattcaacccttccctgaagggcttctctgttggcactgggaaagaaaccagtcctaatgccttcttaaaccaggctgtggcaggaggccgagctgaggatctacctgtccaggccaggaggctggtggacctgatgaagaatgacacgaggatacactttcaggaagactggaagataataaccctgtttataggcggcaatgacctctgtgatttctgcaatgatctggtccactattctccccagaacttcacagacaacattggaaaggccctggacatcctccatgctgaggttcctcgggcatttgtgaacctggtgacggtgcttgagatcgtcaacctgagggagctgtaccaggagaaaaaagtctactgcccaaggatgatcctcaggtctctgtgtccctgtgtcctgaagtttgatgataactcaacagaacttgctaccctcatcgaattcaacaagaagtttcaggagaagacccaccaactgattgagagtgggcgatatgacacaagggaagattttactgtggttgtgcagccgttctttgaaaacgtggacatgccaaagacctcggaaggattgcctgacaactctttcttcgctcctgactgtttccacttcagcagcaagtctcactcccgagcagccagtgctctctggaacaatatgctggagcctgttggccagaagacgactcgtcataagtttgaaaacaagatcaatatcacatgtccgaaccaggtccagccgtttctgaggacctacaagaacagcatgcagggtcatgggacctggctgccatgcagggacagagccccttctgccttgcaccctacctcagtgcatgccctgagacctgcagacatccaagttgtggctgctctgggggattctctgaccgctggcaatggaattggctccaaaccagacgacctccccgatgtcaccacacagtatcggggactgtcatacagtgcaggaggggacggctccctggagaatgtgaccaccttacctaatatccttcgggagtttaacagaaacctcacaggctacgccgtgggcacgggtgatgccaatgacacgaatgcattcctcaatcaagctgttcccggagcaaaggctgaggatcttatgagccaagtccaaactctgatgcagaagatgaaagatgatcatagagtaaatttccatgaagactggaaggtcatcacagtgctgatcggaggcagcgatttatgtgactactgcacagattcgaatctgtattctgcagccaactttgttcaccatctccgcaatgccttggacgtcctgcatagagaggtgcccagagtcctggtcaacctcgtggacttcctgaaccccactatcatgcggcaggtgttcctgggaaacccagacaagtgcccagtgcagcaggccagcgttttgtgtaactgcgttctgaccctgcgggagaactcccaagagctagccaggctggaggccttcagccgagcctaccggagcagcatgcgcgagctggtggggtcaggccgctatgacacgcaggaggacttctctgtggtgctgcagcccttcttccagaacatccagctccctgtcctggcggatgggctcccagatacgtccttctttgccccagactgcatccacccaaatcagaaattccactcccagctggccagagccctttggaccaatatgcttgaaccacttggaagcaaaacagagaccctggacctgagagcagagatgcccatcacctgtcccactcagaatgagcccttcctgagaacccctcggaatagtaactacacgtaccccatcaagccagccattgagaactggggcagtgacttcctgtgtacagagtggaaggcttccaatagtgttccaacctctgtccaccagctccgaccagcagacatcaaagtggtggccgccctgggtgactctctgactacagcagtgggagctcgaccaaacaactccagtgacctacccacatcttggaggggactctcttggagcattggaggggatgggaacttggagactcacaccacactgcccaacattctgaagaagttcaacccttacctccttggcttctctaccagcacctgggaggggacagcaggactaaatgtggcagcggaaggggccagagctagggacatgccagcccaggcctgggacctggtagagcgaatgaaaaacagccccgacatcaacctggagaaagactggaagctggtcacactcttcattggggtcaacgacttgtgtcattactgtgagaatccggaggcccacttggccacggaatatgttcagcacatccaacaggccctggacatcctctctgaggagctcccaagggctttcgtcaacgtggtggaggtcatggagctggctagcctgtaccagggccaaggcgggaaatgtgccatgctggcagctcagaacaactgcacttgcctcagacactcgcaaagctccctggagaagcaagaactgaagaaagtgaactggaacctccagcatggcatctccagtttctcctactggcaccaatacacacagcgtgaggactttgcggttgtggtgcagcctttcttccaaaacacactcaccccactgaacgagagaggggacactgacctcaccttcttctccgaggactgttttcacttctcagaccgcgggcatgccgagatggccatcgcactctggaacaacatgctggaaccagtgggccgcaagactacctccaacaacttcacccacagccgagccaaactcaagtgcccctctcctgagagcccttacctctacaccctgcggaacagccgattgctcccagaccaggctgaagaagcccccgaggtgctctactgggctgtcccagtggcagcgggagtcggccttgtggtgggcatcatcgggacagtggtctggaggtgcaggagaggtggccggagggaagatcctccaatgagcctgcgcactgtggccctctag

SEQ ID NO: 194 - DNA, 2112 bp, Homo sapiens
atgactgaagcagaagttcgaggcttatgtatcaagtctcgggagatctttctcagccagcctattcttttggaattggaagcaccgctgaaaatttgtgatatccttcgggagtttaacagaaacctcacaggctacgccgtgggcacgggtgatgccaatgacacgaatgcattcctcaatcaagctgttcccggagcaaaggctgaggatcttatgagccaagtccaaactctgatgcagaagatgaaagatgatcatagagtaaatttccatgaagactggaaggtcatcacagtgctgatcggaggcagcgatttatgtgactactgcacagattcgaatctgtattctgcagccaactttgttcaccatctccgcaatgccttggacgtcctgcatagagaggtgcccagagtcctggtcaacctcgtggacttcctgaaccccactatcatgcggcaggtgttcctgggaaacccagacaagtgcccagtgcagcaggccagcgttttgtgtaactgcgttctgaccctgcgggagaactcccaagagctagccaggctggaggccttcagccgagcctaccggagcagcatgcgcgagctggtggggtcaggccgctatgacacgcaggaggacttctctgtggtgctgcagcccttcttccagaacatccagctccctgtcctggcggatgggctcccagatacgtccttctttgccccagactgcatccacccaaatcagaaattccactcccagctggccagagccctttggaccaatatgcttgaaccacttggaagcaaaacagagaccctggacctgagagcagagatgcccatcacctgtcccactcagaatgagcccttcctgagaacccctcggaatagtaactacacgtaccccatcaagccagccattgagaactggggcagtgacttcctgtgtacagagtggaaggcttccaatagtgttccaacctctgtccaccagctccgaccagcagacatcaaagtggtggccgccctgggtgactctctgactacagcagtgggagctcgaccaaacaactccagtgacctacccacatcttggaggggactctcttggagcattggaggggatgggaacttggagactcacaccacactgcccaacattctgaagaagttcaacccttacctccttggcttctctaccagcacctgggaggggacagcaggactaaatgtggcagcggaaggggccagagctagggacatgccagcccaggcctgggacctggtagagcgaatgaaaaacagccccgacatcaacctggagaaagactggaagctggtcacactcttcattggggtcaacgacttgtgtcattactgtgagaatccggaggcccacttggccacggaatatgttcagcacatccaacaggccctggacatcctctctgaggagctcccaagggctttcgtcaacgtggtggaggtcatggagctggctagcctgtaccagggccaaggcgggaaatgtgccatgctggcagctcagaacaactgcacttgcctcagacactcgcaaagctccctggagaagcaagaactgaagaaagtgaactggaacctccagcatggcatctccagtttctcctactggcaccaatacacacagcgtgaggactttgcggttgtggtgcagcctttcttccaaaacacactcaccccactgaacgagagaggggacactgacctcaccttcttctccgaggactgttttcacttctcagaccgcgggcatgccgagatggccatcgcactctggaacaacatgctggaaccagtgggccgcaagactacctccaacaacttcacccacagccgagccaaactcaagtgcccctctcctgagagcccttacctctacaccctgcggaacagccgattgctcccagaccaggctgaagaagcccccgaggtgctctactgggctgtcccagtggcagcgggagtcggccttgtggtgggcatcatcgggacagtggtctggaggtgcaggagaggtggccggagggaagatcctccaatgagcctgcgcactgtggccctctag

SEQ ID NO: 195 - DNA, 3171 bp, Homo sapiens
atggcggacggggagctgaacgtggacagcctcatcacccggctgctggaggtacgaggatgtcgtccaggaaagattgtgcagatgactgaagcagaagttcgaggcttatgtatcaagtctcgggagatctttctcagccagcctattcttttggaattggaagcaccgctgaaaatttgtgacatcctccgggaattcaacccttccctgaagggcttctctgttggcactgggaaagaaaccagtcctaatgccttcttaaaccaggctgtggcaggaggccgagctgaggatctacctgtccaggccaggaggctggtggacctgatgaagaatgacacgaggatacactttcaggaagactggaagataataaccctgtttataggcggcaatgacctctgtgatttctgcaatgatctggttcctcgggcatttgtgaacctggtgacggtgcttgagatcgtcaacctgagggagctgtaccaggagaaaaaagtctactgcccaaggatgatcctcaggtctctgtgtccctgtgtcctgaagtttgatgataactcaacagaacttgctaccctcatcgaattcaacaagaagtttcaggagaagacccaccaactgattgagagtgggcgatatgacacaagggaagattttactgtggttgtgcagccgttctttgaaaacgtggacatgccaaagacctcggaaggattgcctgacaactctttcttcgctcctgactgtttccacttcagcagcaagtctcactcccgagcagccagtgctctctggaacaatatgctggagcctgttggccagaagacgactcgtcataagtttgaaaacaagatcaatatcacatgtccgaaccaggtccagccgtttctgaggacctacaagaacagcatgcagggtcatgggacctggctgccatgcagggacagagccccttctgccttgcaccctacctcagtgcatgccctgagacctgcagacatccaagttgtggctgctctgggggattctctgaccgctggcaatggaattggctccaaaccagacgacctccccgatgtcaccacacagtatcggggactgtcatacagtgcaggaggggacggctccctggagaatgtgaccaccttacctaatatccttcgggagtttaacagaaacctcacaggctacgccgtgggcacgggtgatgccaatgacacgaatgcattcctcaatcaagctgttcccggagcaaaggctgaggatcttatgagccaagtccaaactctgatgcagaagatgaaagatgatcatagagtaaatttccatgaagactggaaggtcatcacagtgctgatcggaggcagcgatttatgtgactactgcacagattcgaatctgtattctgcagccaactttgttcaccatctccgcaatgccttggacgtcctgcatagagaggtgcccagagtcctggtcaacctcgtggacttcctgaaccccactatcatgcggcaggtgttcctgggaaacccagacaagtgcccagtgcagcaggccagcgttttgtgtaactgcgttctgaccctgcgggagaactcccaagagctagccaggctggaggccttcagccgagcctaccggagcagcatgcgcgagctggtggggtcaggccgctatgacacgcaggaggacttctctgtggtgctgcagcccttcttccagaacatccagctccctgtcctggcggatgggctcccagatacgtccttctttgccccagactgcatccacccaaatcagaaattccactcccagctggccagagccctttggaccaatatgcttgaaccacttggaagcaaaacagagaccctggacctgagagcagagatgcccatcacctgtcccactcagaatgagcccttcctgagaacccctcggaatagtaactacacgtaccccatcaagccagccattgagaactggggcagtgacttcctgtgtacagagtggaaggcttccaatagtgttccaacctctgtccaccagctccgaccagcagacatcaaagtggtggccgccctgggtgactctctgactacagcagtgggagctcgaccaaacaactccagtgacctacccacatcttggaggggactctcttggagcattggaggggatgggaacttggagactcacaccacactgcccaacattctgaagaagttcaacccttacctccttggcttctctaccagcacctgggaggggacagcaggactaaatgtggcagcggaaggggccagagctagggacatgccagcccaggcctgggacctggtagagcgaatgaaaaacagccccgacatcaacctggagaaagactggaagctggtcacactcttcattggggtcaacgacttgtgtcattactgtgagaatccggaggcccacttggccacggaatatgttcagcacatccaacaggccctggacatcctctctgaggagctcccaagggctttcgtcaacgtggtggaggtcatggagctggctagcctgtaccagggccaaggcgggaaatgtgccatgctggcagctcagaacaactgcacttgcctcagacactcgcaaagctccctggagaagcaagaactgaagaaagtgaactggaacctccagcatggcatctccagtttctcctactggcaccaatacacacagcgtgaggactttgcggttgtggtgcagcctttcttccaaaacacactcaccccactgaacgagagaggggacactgacctcaccttcttctccgaggactgttttcacttctcagaccgcgggcatgccgagatggccatcgcactctggaacaacatgctggaaccagtgggccgcaagactacctccaacaacttcacccacagccgagccaaactcaagtgcccctctcctgagagcccttacctctacaccctgcggaacagccgattgctcccagaccaggctgaagaagcccccgaggtgctctactgggctgtcccagtggcagcgggagtcggccttgtggtgggcatcatcgggacagtggtctggaggtgcaggagaggtggccggagggaagatcctccaatgagcctgcgcactgtggccctctag

SEQ ID NO: 196 - DNA, 3282 bp, Homo sapiens
atggcggacggggagctgaacgtggacagcctcatcacccggctgctggaggttcataggctgaagccggctgacatcaacgtaattggagccctgggtgactctctcacggcaggcaatggggccgggtccacacctgggaacgtcttggacgtcttgactcagtaccgaggcctgtcctggagcgtcggcggagatgagaacatcggcaccgttaccaccctggcgaacatcctccgggaattcaacccttccctgaagggcttctctgttggcactgggaaagaaaccagtcctaatgccttcttaaaccaggctgtggcaggaggccgagctgaggatctacctgtccaggccaggaggctggtggacctgatgaagaatgacacgaggatacactttcaggaagactggaagataataaccctgtttataggcggcaatgacctctgtgatttctgcaatgatctggtccactattctccccagaacttcacagacaacattggaaaggccctggacatcctccatgctgaggttcctcgggcatttgtgaacctggtgacggtgcttgagatcgtcaacctgagggagctgtaccaggagaaaaaagtctactgcccaaggatgatcctcaggtctctgtgtccctgtgtcctgaagtttgatgataactcaacagaacttgctaccctcatcgaattcaacaagaagtttcaggagaagacccaccaactgattgagagtgggcgatatgacacaagggaagattttactgtggttgtgcagccgttctttgaaaacgtggacatgccaaagacctcggaaggattgcctgacaactctttcttcgctcctgactgtttccacttcagcagcaagtctcactcccgagcagccagtgctctctggaacaatatgctggagcctgttggccagaagacgactcgtcataagtttgaaaacaagatcaatatcacatgtccgaaccaggtccagccgtttctgaggacctacaagaacagcatgcagggtcatgggacctggctgccatgcagggacagagccccttctgccttgcaccctacctcagtgcatgccctgagacctgcagacatccaagttgtggctgctctgggggattctctgaccgctggcaatggaattggctccaaaccagacgacctccccgatgtcaccacacagtatcggggactgtcatacagtgcaggaggggacggctccctggagaatgtgaccaccttacctaatatccttcgggagtttaacagaaacctcacaggctacgccgtgggcacgggtgatgccaatgacacgaatgcattcctcaatcaagctgttcccggagcaaaggctgaggatcttatgagccaagtccaaactctgatgcagaagatgaaagatgatcatagagtaaatttccatgaagactggaaggtcatcacagtgctgatcggaggcagcgatttatgtgactactgcacagattcgaatctgtattctgcagccaactttgttcaccatctccgcaatgccttggacgtcctgcatagagaggtgcccagagtcctggtcaacctcgtggacttcctgaaccccactatcatgcggcaggtgttcctgggaaacccagacaagtgcccagtgcagcaggccagcgttttgtgtaactgcgttctgaccctgcgggagaactcccaagagctagccaggctggaggccttcagccgagcctaccggagcagcatgcgcgagctggtggggtcaggccgctatgacacgcaggaggacttctctgtggtgctgcagcccttcttccagaacatccagctccctgtcctggcggatgggctcccagatacgtccttctttgccccagactgcatccacccaaatcagaaattccactcccagctggccagagccctttggaccaatatgcttgaaccacttggaagcaaaacagagaccctggacctgagagcagagatgcccatcacctgtcccactcagaatgagcccttcctgagaacccctcggaatagtaactacacgtaccccatcaagccagccattgagaactggggcagtgacttcctgtgtacagagtggaaggcttccaatagtgttccaacctctgtccaccagctccgaccagcagacatcaaagtggtggccgccctgggtgactctctgactacagcagtgggagctcgaccaaacaactccagtgacctacccacatcttggaggggactctcttggagcattggaggggatgggaacttggagactcacaccacactgcccaacattctgaagaagttcaacccttacctccttggcttctctaccagcacctgggaggggacagcaggactaaatgtggcagcggaaggggccagagctagggacatgccagcccaggcctgggacctggtagagcgaatgaaaaacagccccgacatcaacctggagaaagactggaagctggtcacactcttcattggggtcaacgacttgtgtcattactgtgagaatccggaggcccacttggccacggaatatgttcagcacatccaacaggccctggacatcctctctgaggagctcccaagggctttcgtcaacgtggtggaggtcatggagctggctagcctgtaccagggccaaggcgggaaatgtgccatgctggcagctcagaacaactgcacttgcctcagacactcgcaaagctccctggagaagcaagaactgaagaaagtgaactggaacctccagcatggcatctccagtttctcctactggcaccaatacacacagcgtgaggactttgcggttgtggtgcagcctttcttccaaaacacactcaccccactgaacgagagaggggacactgacctcaccttcttctccgaggactgttttcacttctcagaccgcgggcatgccgagatggccatcgcactctggaacaacatgctggaaccagtgggccgcaagactacctccaacaacttcacccacagccgagccaaactcaagtgcccctctcctgagagcccttacctctacaccctgcggaacagccgattgctcccagaccaggctgaagaagcccccgaggtgctctactgggctgtcccagtggcagcgggagtcggccttgtggtgggcatcatcgggacagtggtctggaggtgcaggagaggtggccggagggaagatcctccaatgagcctgcgcactgtggccctctag

SEQ ID NO: 197 - DNA, 3216 bp, Homo sapiens
atggcggacggggagctgaacgtggacagcctcatcacccggctgctggaggttcataggctgaagccggctgacatcaacgtaattggagccctgggtgactctctcacggcaggcaatggggccgggtccacacctgggaacgtcttggacgtcttgactcagtaccgaggcctgtcctggagcgtcggcggagatgagaacatcggcaccgttaccaccctggcgaacatcctccgggaattcaacccttccctgaagggcttctctgttggcactgggaaagaaaccagtcctaatgccttcttaaaccaggctgtggcaggaggccgagctgaggatctacctgtccaggccaggaggctggtggacctgatgaagaatgacacgaggatacactttcaggaagactggaagataataaccctgtttataggcggcaatgacctctgtgatttctgcaatgatctggttcctcgggcatttgtgaacctggtgacggtgcttgagatcgtcaacctgagggagctgtaccaggagaaaaaagtctactgcccaaggatgatcctcaggtctctgtgtccctgtgtcctgaagtttgatgataactcaacagaacttgctaccctcatcgaattcaacaagaagtttcaggagaagacccaccaactgattgagagtgggcgatatgacacaagggaagattttactgtggttgtgcagccgttctttgaaaacgtggacatgccaaagacctcggaaggattgcctgacaactctttcttcgctcctgactgtttccacttcagcagcaagtctcactcccgagcagccagtgctctctggaacaatatgctggagcctgttggccagaagacgactcgtcataagtttgaaaacaagatcaatatcacatgtccgaaccaggtccagccgtttctgaggacctacaagaacagcatgcagggtcatgggacctggctgccatgcagggacagagccccttctgccttgcaccctacctcagtgcatgccctgagacctgcagacatccaagttgtggctgctctgggggattctctgaccgctggcaatggaattggctccaaaccagacgacctccccgatgtcaccacacagtatcggggactgtcatacagtgcaggaggggacggctccctggagaatgtgaccaccttacctaatatccttcgggagtttaacagaaacctcacaggctacgccgtgggcacgggtgatgccaatgacacgaatgcattcctcaatcaagctgttcccggagcaaaggctgaggatcttatgagccaagtccaaactctgatgcagaagatgaaagatgatcatagagtaaatttccatgaagactggaaggtcatcacagtgctgatcggaggcagcgatttatgtgactactgcacagattcgaatctgtattctgcagccaactttgttcaccatctccgcaatgccttggacgtcctgcatagagaggtgcccagagtcctggtcaacctcgtggacttcctgaaccccactatcatgcggcaggtgttcctgggaaacccagacaagtgcccagtgcagcaggccagcgttttgtgtaactgcgttctgaccctgcgggagaactcccaagagctagccaggctggaggccttcagccgagcctaccggagcagcatgcgcgagctggtggggtcaggccgctatgacacgcaggaggacttctctgtggtgctgcagcccttcttccagaacatccagctccctgtcctggcggatgggctcccagatacgtccttctttgccccagactgcatccacccaaatcagaaattccactcccagctggccagagccctttggaccaatatgcttgaaccacttggaagcaaaacagagaccctggacctgagagcagagatgcccatcacctgtcccactcagaatgagcccttcctgagaacccctcggaatagtaactacacgtaccccatcaagccagccattgagaactggggcagtgacttcctgtgtacagagtggaaggcttccaatagtgttccaacctctgtccaccagctccgaccagcagacatcaaagtggtggccgccctgggtgactctctgactacagcagtgggagctcgaccaaacaactccagtgacctacccacatcttggaggggactctcttggagcattggaggggatgggaacttggagactcacaccacactgcccaacattctgaagaagttcaacccttacctccttggcttctctaccagcacctgggaggggacagcaggactaaatgtggcagcggaaggggccagagctagggacatgccagcccaggcctgggacctggtagagcgaatgaaaaacagccccgacatcaacctggagaaagactggaagctggtcacactcttcattggggtcaacgacttgtgtcattactgtgagaatccggaggcccacttggccacggaatatgttcagcacatccaacaggccctggacatcctctctgaggagctcccaagggctttcgtcaacgtggtggaggtcatggagctggctagcctgtaccagggccaaggcgggaaatgtgccatgctggcagctcagaacaactgcacttgcctcagacactcgcaaagctccctggagaagcaagaactgaagaaagtgaactggaacctccagcatggcatctccagtttctcctactggcaccaatacacacagcgtgaggactttgcggttgtggtgcagcctttcttccaaaacacactcaccccactgaacgagagaggggacactgacctcaccttcttctccgaggactgttttcacttctcagaccgcgggcatgccgagatggccatcgcactctggaacaacatgctggaaccagtgggccgcaagactacctccaacaacttcacccacagccgagccaaactcaagtgcccctctcctgagagcccttacctctacaccctgcggaacagccgattgctcccagaccaggctgaagaagcccccgaggtgctctactgggctgtcccagtggcagcgggagtcggccttgtggtgggcatcatcgggacagtggtctggaggtgcaggagaggtggccggagggaagatcctccaatgagcctgcgcactgtggccctctag

SEQ ID NO: 198 - DNA, 4374 bp, Homo sapiens
atggcggacggggagctgaacgtggacagcctcatcacccggctgctggaggggacccctcagatccatacctctcctagaaagagtacattggaagggcagctatggccagagaccctgaagaattctccattcccatgcaacccaaataaattaggagtgaatatgccttctaaatcagttcactctctgaagccttctgatattaaatttgtggcagccattggcaatctggaaattcctccagacccagggacgggcgatctggagaagcaagactggactgaaaggccacagcaggtgtgcatgggagtgatgacagtcctttcagacatcatcagatatttcagtccttctgttccaatgcctgtgtgccacactggaaagagagtcataccccacgatggtgctgaagacttgtggattcaggctcaagaactggtgagaaacatgaaagagaacctgcaacttgactttcaatttgactggaagctcatcaatgtgttcttcagtaatgcaagccagtgttacctgtgcccctctgctcaacagaatgggcttgcggcgggcggcgtggatgagctgatgggggtgctggactacctgcagcaggaggtccccagagcatttgtaaacctggtggacctctctgaggttgcagaggtctctcgtcagtatcacggcacttggctcagccctgcaccagagccctgtaattgctcagaggagaccacccggctggccaaggtggtgatgcagtggtcttatcaggaagcctggaacagcctcctggcctccagcaggtacagtgagcaggagtccttcaccgtggttttccagcctttcttctatgagaccaccccatctctacactcggaggacccccgactccaggattctaccacgctggcctggcatctctggaataggatgatggagccagcaggagagaaagatgagccattgagtgtaaaacacgggaggccaatgaagtgtccctctcaggagagcccctatctgttcagctacagaaacagcaactacctgaccagactgcagaaaccccaagacaagcttgaggtaagagaaggagcggaaatcagatgtcctgacaaagacccctccgatacggttcccacctcagttcataggctgaagccggctgacatcaacgtaattggagccctgggtgactctctcacggcaggcaatggggccgggtccacacctgggaacgtcttggacgtcttgactcagtaccgaggcctgtcctggagcgtcggcggagatgagaacatcggcaccgttaccaccctggcgaacatcctccgggaattcaacccttccctgaagggcttctctgttggcactgggaaagaaaccagtcctaatgccttcttaaaccaggctgtggcaggaggccgagctgaggatctacctgtccaggccaggaggctggtggacctgatgaagaatgacacgaggatacactttcaggaagactggaagataataaccctgtttataggcggcaatgacctctgtgatttctgcaatgatctggtccactattctccccagaacttcacagacaacattggaaaggccctggacatcctccatgctgaggttcctcgggcatttgtgaacctggtgacggtgcttgagatcgtcaacctgagggagctgtaccaggagaaaaaagtctactgcccaaggatgatcctcaggtctctgtgtccctgtgtcctgaagtttgatgataactcaacagaacttgctaccctcatcgaattcaacaagaagtttcaggagaagacccaccaactgattgagagtgggcgatatgacacaagggaagattttactgtggttgtgcagccgttctttgaaaacgtggacatgccaaagacctcggaaggattgcctgacaactctttcttcgctcctgactgtttccacttcagcagcaagtctcactcccgagcagccagtgctctctggaacaatatgctggagcctgttggccagaagacgactcgtcataagtttgaaaacaagatcaatatcacatgtccgaaccaggtccagccgtttctgaggacctacaagaacagcatgcagggtcatgggacctggctgccatgcagggacagagccccttctgccttgcaccctacctcagtgcatgccctgagacctgcagacatccaagttgtggctgctctgggggattctctgaccgctggcaatggaattggctccaaaccagacgacctccccgatgtcaccacacagtatcggggactgtcatacagtgcaggaggggacggctccctggagaatgtgaccaccttacctaatatccttcgggagtttaacagaaacctcacaggctacgccgtgggcacgggtgatgccaatgacacgaatgcattcctcaatcaagctgttcccggagcaaaggctgaggatcttatgagccaagtccaaactctgatgcagaagatgaaagatgatcatagagtaaatttccatgaagactggaaggtcatcacagtgctgatcggaggcagcgatttatgtgactactgcacagattcgaatctgtattctgcagccaactttgttcaccatctccgcaatgccttggacgtcctgcatagagaggtgcccagagtcctggtcaacctcgtggacttcctgaaccccactatcatgcggcaggtgttcctgggaaacccagacaagtgcccagtgcagcaggccagcgttttgtgtaactgcgttctgaccctgcgggagaactcccaagagctagccaggctggaggccttcagccgagcctaccggagcagcatgcgcgagctggtggggtcaggccgctatgacacgcaggaggacttctctgtggtgctgcagcccttcttccagaacatccagctccctgtcctggcggatgggctcccagatacgtccttctttgccccagactgcatccacccaaatcagaaattccactcccagctggccagagccctttggaccaatatgcttgaaccacttggaagcaaaacagagaccctggacctgagagcagagatgcccatcacctgtcccactcagaatgagcccttcctgagaacccctcggaatagtaactacacgtaccccatcaagccagccattgagaactggggcagtgacttcctgtgtacagagtggaaggcttccaatagtgttccaacctctgtccaccagctccgaccagcagacatcaaagtggtggccgccctgggtgactctctgactacagcagtgggagctcgaccaaacaactccagtgacctacccacatcttggaggggactctcttggagcattggaggggatgggaacttggagactcacaccacactgcccaacattctgaagaagttcaacccttacctccttggcttctctaccagcacctgggaggggacagcaggactaaatgtggcagcggaaggggccagagctagggacatgccagcccaggcctgggacctggtagagcgaatgaaaaacagccccgacatcaacctggagaaagactggaagctggtcacactcttcattggggtcaacgacttgtgtcattactgtgagaatccggaggcccacttggccacggaatatgttcagcacatccaacaggccctggacatcctctctgaggagctcccaagggctttcgtcaacgtggtggaggtcatggagctggctagcctgtaccagggccaaggcgggaaatgtgccatgctggcagctcagaacaactgcacttgcctcagacactcgcaaagctccctggagaagcaagaactgaagaaagtgaactggaacctccagcatggcatctccagtttctcctactggcaccaatacacacagcgtgaggactttgcggttgtggtgcagcctttcttccaaaacacactcaccccactgaacgagagaggggacactgacctcaccttcttctccgaggactgttttcacttctcagaccgcgggcatgccgagatggccatcgcactctggaacaacatgctggaaccagtgggccgcaagactacctccaacaacttcacccacagccgagccaaactcaagtgcccctctcctgagagcccttacctctacaccctgcggaacagccgattgctcccagaccaggctgaagaagcccccgaggtgctctactgggctgtcccagtggcagcgggagtcggccttgtggtgggcatcatcgggacagtggtctggaggtgcaggagaggtggccggagggaagatcctccaatgagcctgcgcactgtggccctctag

SEQ ID NO: 199 - DNA, 4104 bp, Homo sapiens
atggcggacggggagctgaacgtggacagcctcatcacccggctgctggaggtcctttcagacatcatcagatatttcagtccttctgttccaatgcctgtgtgccacactggaaagagagtcataccccacgatggtgctgaagacttgtggattcaggctcaagaactggtgagaaacatgaaagagaacctgcaacttgactttcaatttgactggaagctcatcaatgtgttcttcagtaatgcaagccagtgttacctgtgcccctctgctcaacagaatgggcttgcggcgggcggcgtggatgagctgatgggggtgctggactacctgcagcaggaggtccccagagcatttgtaaacctggtggacctctctgaggttgcagaggtctctcgtcagtatcacggcacttggctcagccctgcaccagagccctgtaattgctcagaggagaccacccggctggccaaggtggtgatgcagtggtcttatcaggaagcctggaacagcctcctggcctccagcaggtacagtgagcaggagtccttcaccgtggttttccagcctttcttctatgagaccaccccatctctacactcggaggacccccgactccaggattctaccacgctggcctggcatctctggaataggatgatggagccagcaggagagaaagatgagccattgagtgtaaaacacgggaggccaatgaagtgtccctctcaggagagcccctatctgttcagctacagaaacagcaactacctgaccagactgcagaaaccccaagacaagcttgaggtaagagaaggagcggaaatcagatgtcctgacaaagacccctccgatacggttcccacctcagttcataggctgaagccggctgacatcaacgtaattggagccctgggtgactctctcacggcaggcaatggggccgggtccacacctgggaacgtcttggacgtcttgactcagtaccgaggcctgtcctggagcgtcggcggagatgagaacatcggcaccgttaccaccctggcgaacatcctccgggaattcaacccttccctgaagggcttctctgttggcactgggaaagaaaccagtcctaatgccttcttaaaccaggctgtggcaggaggccgagctgaggatctacctgtccaggccaggaggctggtggacctgatgaagaatgacacgaggatacactttcaggaagactggaagataataaccctgtttataggcggcaatgacctctgtgatttctgcaatgatctggtccactattctccccagaacttcacagacaacattggaaaggccctggacatcctccatgctgaggttcctcgggcatttgtgaacctggtgacggtgcttgagatcgtcaacctgagggagctgtaccaggagaaaaaagtctactgcccaaggatgatcctcaggtctctgtgtccctgtgtcctgaagtttgatgataactcaacagaacttgctaccctcatcgaattcaacaagaagtttcaggagaagacccaccaactgattgagagtgggcgatatgacacaagggaagattttactgtggttgtgcagccgttctttgaaaacgtggacatgccaaagacctcggaaggattgcctgacaactctttcttcgctcctgactgtttccacttcagcagcaagtctcactcccgagcagccagtgctctctggaacaatatgctggagcctgttggccagaagacgactcgtcataagtttgaaaacaagatcaatatcacatgtccgaaccaggtccagccgtttctgaggacctacaagaacagcatgcagggtcatgggacctggctgccatgcagggacagagccccttctgccttgcaccctacctcagtgcatgccctgagacctgcagacatccaagttgtggctgctctgggggattctctgaccgctggcaatggaattggctccaaaccagacgacctccccgatgtcaccacacagtatcggggactgtcatacagtgcaggaggggacggctccctggagaatgtgaccaccttacctaatatccttcgggagtttaacagaaacctcacaggctacgccgtgggcacgggtgatgccaatgacacgaatgcattcctcaatcaagctgttcccggagcaaaggctgaggatcttatgagccaagtccaaactctgatgcagaagatgaaagatgatcatagagtaaatttccatgaagactggaaggtcatcacagtgctgatcggaggcagcgatttatgtgactactgcacagattcgaatctgtattctgcagccaactttgttcaccatctccgcaatgccttggacgtcctgcatagagaggtgcccagagtcctggtcaacctcgtggacttcctgaaccccactatcatgcggcaggtgttcctgggaaacccagacaagtgcccagtgcagcaggccagcgttttgtgtaactgcgttctgaccctgcgggagaactcccaagagctagccaggctggaggccttcagccgagcctaccggagcagcatgcgcgagctggtggggtcaggccgctatgacacgcaggaggacttctctgtggtgctgcagcccttcttccagaacatccagctccctgtcctggcggatgggctcccagatacgtccttctttgccccagactgcatccacccaaatcagaaattccactcccagctggccagagccctttggaccaatatgcttgaaccacttggaagcaaaacagagaccctggacctgagagcagagatgcccatcacctgtcccactcagaatgagcccttcctgagaacccctcggaatagtaactacacgtaccccatcaagccagccattgagaactggggcagtgacttcctgtgtacagagtggaaggcttccaatagtgttccaacctctgtccaccagctccgaccagcagacatcaaagtggtggccgccctgggtgactctctgactacagcagtgggagctcgaccaaacaactccagtgacctacccacatcttggaggggactctcttggagcattggaggggatgggaacttggagactcacaccacactgcccaacattctgaagaagttcaacccttacctccttggcttctctaccagcacctgggaggggacagcaggactaaatgtggcagcggaaggggccagagctagggacatgccagcccaggcctgggacctggtagagcgaatgaaaaacagccccgacatcaacctggagaaagactggaagctggtcacactcttcattggggtcaacgacttgtgtcattactgtgagaatccggaggcccacttggccacggaatatgttcagcacatccaacaggccctggacatcctctctgaggagctcccaagggctttcgtcaacgtggtggaggtcatggagctggctagcctgtaccagggccaaggcgggaaatgtgccatgctggcagctcagaacaactgcacttgcctcagacactcgcaaagctccctggagaagcaagaactgaagaaagtgaactggaacctccagcatggcatctccagtttctcctactggcaccaatacacacagcgtgaggactttgcggttgtggtgcagcctttcttccaaaacacactcaccccactgaacgagagaggggacactgacctcaccttcttctccgaggactgttttcacttctcagaccgcgggcatgccgagatggccatcgcactctggaacaacatgctggaaccagtgggccgcaagactacctccaacaacttcacccacagccgagccaaactcaagtgcccctctcctgagagcccttacctctacaccctgcggaacagccgattgctcccagaccaggctgaagaagcccccgaggtgctctactgggctgtcccagtggcagcgggagtcggccttgtggtgggcatcatcgggacagtggtctggaggtgcaggagaggtggccggagggaagatcctccaatgagcctgcgcactgtggccctctag

SEQ ID NO: 200 - DNA, 1179 bp, Homo sapiens
atgactgaagcagaagttcgaggcttatgtatcaagtctcgggagatctttctcagccagcctattcttttggaattggaagcaccgctgaaaatttgtgacatcctccgggaattcaacccttccctgaagggcttctctgttggcactgggaaagaaaccagtcctaatgccttcttaaaccaggctgtggcaggaggccgagctgaggatctacctgtccaggccaggaggctggtggacctgatgaagaatgacacgaggatacactttcaggaagactggaagataataaccctgtttataggcggcaatgacctctgtgatttctgcaatgatctggtccactattctccccagaacttcacagacaacattggaaaggccctggacatcctccatgctgaggttcctcgggcatttgtgaacctggtgacggtgcttgagatcgtcaacctgagggagctgtaccaggagaaaaaagtctactgcccaaggatgatcctcaggtctctgtgtccctgtgtcctgaagtttgatgataactcaacagaacttgctaccctcatcgaattcaacaagaagtttcaggagaagacccaccaactgattgagagtgggcgatatgacacaagggaagattttactgtggttgtgcagccgttctttgaaaacgtggacatgccaaagacctcggaaggattgcctgacaactctttcttcgctcctgactgtttccacttcagcagcaagtctcactcccgagcagccagtgctctctggaacaatatgctggagcctgttggccagaagacgactcgtcataagtttgaaaacaagatcaatatcacatgtccgaaccaggtccagccgtttctgaggacctacaagaacagcatgcagggtcatgggacctggctgccatgcagggacagagccccttctgccttgcaccctacctcagtgcatgccctgagacctgcagacatccaagttgtggctgctctgggggattctctgaccgctggcaatggaattggctccaaaccagacgacctccccgatgtcaccacacagtatcggggactgtcatacagagaaagtaaaccagggttcttatcagactcctgggtcagcaaatccaacaggaaatgcaccagaaaagcaccaaatccctga

SEQ ID NO: 201 - DNA, 2196 bp, Homo sapiens
atggcggacggggagctgaacgtggacagcctcatcacccggctgctggaggtacgaggatgtcgtccaggaaagattgtgcagatgactgaagcagaagttcgaggcttatgtatcaagtctcgggagatctttctcagccagcctattcttttggaattggaagcaccgctgaaaatttgtgatatccttcgggagtttaacagaaacctcacaggctacgccgtgggcacgggtgatgccaatgacacgaatgcattcctcaatcaagctgttcccggagcaaaggctgaggatcttatgagccaagtccaaactctgatgcagaagatgaaagatgatcatagagtaaatttccatgaagactggaaggtcatcacagtgctgatcggaggcagcgatttatgtgactactgcacagattcgaatctgtattctgcagccaactttgttcaccatctccgcaatgccttggacgtcctgcatagagaggtgcccagagtcctggtcaacctcgtggacttcctgaaccccactatcatgcggcaggtgttcctgggaaacccagacaagtgcccagtgcagcaggccagcgttttgtgtaactgcgttctgaccctgcgggagaactcccaagagctagccaggctggaggccttcagccgagcctaccggagcagcatgcgcgagctggtggggtcaggccgctatgacacgcaggaggacttctctgtggtgctgcagcccttcttccagaacatccagctccctgtcctggcggatgggctcccagatacgtccttctttgccccagactgcatccacccaaatcagaaattccactcccagctggccagagccctttggaccaatatgcttgaaccacttggaagcaaaacagagaccctggacctgagagcagagatgcccatcacctgtcccactcagaatgagcccttcctgagaacccctcggaatagtaactacacgtaccccatcaagccagccattgagaactggggcagtgacttcctgtgtacagagtggaaggcttccaatagtgttccaacctctgtccaccagctccgaccagcagacatcaaagtggtggccgccctgggtgactctctgactacagcagtgggagctcgaccaaacaactccagtgacctacccacatcttggaggggactctcttggagcattggaggggatgggaacttggagactcacaccacactgcccaacattctgaagaagttcaacccttacctccttggcttctctaccagcacctgggaggggacagcaggactaaatgtggcagcggaaggggccagagctagggacatgccagcccaggcctgggacctggtagagcgaatgaaaaacagccccgacatcaacctggagaaagactggaagctggtcacactcttcattggggtcaacgacttgtgtcattactgtgagaatccggaggcccacttggccacggaatatgttcagcacatccaacaggccctggacatcctctctgaggagctcccaagggctttcgtcaacgtggtggaggtcatggagctggctagcctgtaccagggccaaggcgggaaatgtgccatgctggcagctcagaacaactgcacttgcctcagacactcgcaaagctccctggagaagcaagaactgaagaaagtgaactggaacctccagcatggcatctccagtttctcctactggcaccaatacacacagcgtgaggactttgcggttgtggtgcagcctttcttccaaaacacactcaccccactgaacgagagaggggacactgacctcaccttcttctccgaggactgttttcacttctcagaccgcgggcatgccgagatggccatcgcactctggaacaacatgctggaaccagtgggccgcaagactacctccaacaacttcacccacagccgagccaaactcaagtgcccctctcctgagagcccttacctctacaccctgcggaacagccgattgctcccagaccaggctgaagaagcccccgaggtgctctactgggctgtcccagtggcagcgggagtcggccttgtggtgggcatcatcgggacagtggtctggaggtgcaggagaggtggccggagggaagatcctccaatgagcctgcgcactgtggccctctag

SEQ ID NO: 202 - DNA, 4071 bp, Homo sapiens
atggcggacggggagctgaacgtggacagcctcatcacccggctgctggaggtcctttcagacatcatcagatatttcagtccttctgttccaatgcctgtgtgccacactggaaagagagtcataccccacgatggtgctgaagacttgtggattcaggctcaagaactggtgagaaacatgaaagagaacctgcaacttgactttcaatttgactggaagctcatcaatgtgttcttcagtaatgcaagccagtgttacctgtgcccctctgctcaacaggcaccctcacttagcacggttctcctctcacagaatgggcttgcggcgggcggcgtggatgagctgatgggggtgctggactacctgcagcaggaggtccccagagcatttgtaaacctggtggacctctctgaggttgcagaggtctctcgtcagtatcacggcacttggctcagccctgcaccagagccctgtaattgctcagaggagaccacccggctggccaaggtggtgatgcagtggtcttatcaggaagcctggaacagcctcctggcctccagcaggtacagtgagcaggagtccttcaccgtggttttccagcctttcttctatgagaccaccccatctctacactcggaggacccccgactccaggattctaccacgctggcctggcatctctggaataggatgatggagccagcaggagagaaagatgagccattgagtgtaaaacacgggaggccaatgaagtgtccctctcaggagagcccctatctgttcagctacagaaacagcaactacctgaccagactgcagaaaccccaagacaagcttgaggtaagagaaggagcggaaatcagatgtcctgacaaagacccctccgatacggttcccacctcagttcataggctgaagccggctgacatcaacgtaattggagccctgggtgactctctcacggcaggcaatggggccgggtccacacctgggaacgtcttggacgtcttgactcagtaccgaggcctgtcctggagcgtcggcggagatgagaacatcggcaccgttaccaccctggcgaacatcctccgggaattcaacccttccctgaagggcttctctgttggcactgggaaagaaaccagtcctaatgccttcttaaaccaggctgtggcaggaggccgagctgaggatctacctgtccaggccaggaggctggtggacctgatgaagaatgacacgaggatacactttcaggaagactggaagataataaccctgtttataggcggcaatgacctctgtgatttctgcaatgatctggttcctcgggcatttgtgaacctggtgacggtgcttgagatcgtcaacctgagggagctgtaccaggagaaaaaagtctactgcccaaggatgatcctcaggtctctgtgtccctgtgtcctgaagtttgatgataactcaacagaacttgctaccctcatcgaattcaacaagaagtttcaggagaagacccaccaactgattgagagtgggcgatatgacacaagggaagattttactgtggttgtgcagccgttctttgaaaacgtggacatgccaaagacctcggaaggattgcctgacaactctttcttcgctcctgactgtttccacttcagcagcaagtctcactcccgagcagccagtgctctctggaacaatatgctggagcctgttggccagaagacgactcgtcataagtttgaaaacaagatcaatatcacatgtccgaaccaggtccagccgtttctgaggacctacaagaacagcatgcagggtcatgggacctggctgccatgcagggacagagccccttctgccttgcaccctacctcagtgcatgccctgagacctgcagacatccaagttgtggctgctctgggggattctctgaccgctggcaatggaattggctccaaaccagacgacctccccgatgtcaccacacagtatcggggactgtcatacagtgcaggaggggacggctccctggagaatgtgaccaccttacctaatatccttcgggagtttaacagaaacctcacaggctacgccgtgggcacgggtgatgccaatgacacgaatgcattcctcaatcaagctgttcccggagcaaaggctgaggatcttatgagccaagtccaaactctgatgcagaagatgaaagatgatcatagagtaaatttccatgaagactggaaggtcatcacagtgctgatcggaggcagcgatttatgtgactactgcacagattcgaatctgtattctgcagccaactttgttcaccatctccgcaatgccttggacgtcctgcatagagaggtgcccagagtcctggtcaacctcgtggacttcctgaaccccactatcatgcggcaggtgttcctgggaaacccagacaagtgcccagtgcagcaggccagcgttttgtgtaactgcgttctgaccctgcgggagaactcccaagagctagccaggctggaggccttcagccgagcctaccggagcagcatgcgcgagctggtggggtcaggccgctatgacacgcaggaggacttctctgtggtgctgcagcccttcttccagaacatccagctccctgtcctggcggatgggctcccagatacgtccttctttgccccagactgcatccacccaaatcagaaattccactcccagctggccagagccctttggaccaatatgcttgaaccacttggaagcaaaacagagaccctggacctgagagcagagatgcccatcacctgtcccactcagaatgagcccttcctgagaacccctcggaatagtaactacacgtaccccatcaagccagccattgagaactggggcagtgacttcctgtgtacagagtggaaggcttccaatagtgttccaacctctgtccaccagctccgaccagcagacatcaaagtggtggccgccctgggtgactctctgactacagcagtgggagctcgaccaaacaactccagtgacctacccacatcttggaggggactctcttggagcattggaggggatgggaacttggagactcacaccacactgcccaacattctgaagaagttcaacccttacctccttggcttctctaccagcacctgggaggggacagcaggactaaatgtggcagcggaaggggccagagctagggacatgccagcccaggcctgggacctggtagagcgaatgaaaaacagccccgacatcaacctggagaaagactggaagctggtcacactcttcattggggtcaacgacttgtgtcattactgtgagaatccggaggcccacttggccacggaatatgttcagcacatccaacaggccctggacatcctctctgaggagctcccaagggctttcgtcaacgtggtggaggtcatggagctggctagcctgtaccagggccaaggcgggaaatgtgccatgctggcagctcagaacaactgcacttgcctcagacactcgcaaagctccctggagaagcaagaactgaagaaagtgaactggaacctccagcatggcatctccagtttctcctactggcaccaatacacacagcgtgaggactttgcggttgtggtgcagcctttcttccaaaacacactcaccccactgaacgagagaggggacactgacctcaccttcttctccgaggactgttttcacttctcagaccgcgggcatgccgagatggccatcgcactctggaacaacatgctggaaccagtgggccgcaagactacctccaacaacttcacccacagccgagccaaactcaagtgcccctctcctgagagcccttacctctacaccctgcggaacagccgattgctcccagaccaggctgaagaagcccccgaggtgctctactgggctgtcccagtggcagcgggagtcggccttgtggtgggcatcatcgggacagtggtctggaggtgcaggagaggtggccggagggaagatcctccaatgagcctgcgcactgtggccctctag

SEQ ID NO: 203 - DNA, 210 bp, Homo sapiens
atgtcctccgaggtgtccgcgcgccgcgacgccaagaagctggtgcgctccccgagcggcctgcgcatggtgcccgaacaccgcgccttcggaagcccgttcggcctggaggagccgcagtgggtcccggacaaggagggcgtctctggccgagcctctttttgtggaaaacgacagcagcagcagtggcctggaagacgccaccgctaa

SEQ ID NO: 204 - DNA, 2337 bp, Homo sapiens
atgggctcgcagggcagtccggtgaagagctacgactacctgctcaagttcctgctggtgggcgacagcgacgtgggcaagggcgagatcctggagagcctgcaggacggcgcggcagagtccccgtacgcctacagtaacgaggtggggctggtgtccgagcacttctcgcaggccccgcagaggctgtccttctacagctggtacggcagtgccaggctcttccgcttccgcgtgcccccagatgctgtgcttctacgctggctcctgcaggtctcccgggagagcggcgctgcctgcaccgacgcggagatcaccgtgcacttccgttccggcgcccctccggtcatcaacccgctgggcaccagcttcccggacgacaccgcggtacagccctccttccaggtcggggtgccgctgagcaccacaccgagaagcaatgcctccgtcaacgtttcccacccggcccccggggactggttcgtggccgcccacctgcccccctcatcccagaagatcgagttgaagggcttggctcccacctgtgcctacgtcttccagcctgaactgctggtcacgcgggtggtcgagatttccatcatggagccggacgtgccccttcctcagaccctcctctcccatcccagctacctcaaggtctttgtccccgattacacgcgggagcttctgctggagctgcgggactgcgtgtccaatgggagcctgggctgccccgtgcgtctcaccgtgggcccggtcaccctgcctagcaacttccagaaggtgctcacctgcaccggtgccccctggccctgccgcctgctgctgccctcaccgccctgggaccggtggctgcaagtgacagctgagagcctggtggggcccctcgggacagtggctttcagtgctgtagctgccctcacagcttgcaggccacggagcgtgaccatccagccccttctgcagagcagccaaaaccagagcttcaatgcctcctctggtctgctgtccccgagccccgaccaccaggacctgggcaggagtggcagggtggaccgcagccccttctgcctcacaaactacccagtcacgcgggaggacatggacgtggtgtcggtgcacttccagcccctggacagggtctcggtgagggtgtgttcggacacgccctccgtgatgcggctgcgcctgaacaccggcatggacagcgggggttccctcaccatctccctgcgggccaacaagacagagatgcggaacgagaccgtcgtagtggcctgcgtgaatgctgcctcgcccttccttggcttcaatacttcgctcaactgcaccacagccttcttccagggctaccctttgtctctgagcgcctggtctcgcagggccaacctcatcatcccctacccagagacagacaactggtacctctccctgcagctcatgtgccctgagaatgctgaggactgtgagcaggctgtggtccacgtggagaccaccttgtacctggtgccctgtttgaacgattgtggaccctatggccagtgcctcctgctccgcagacacagctacctgtatgccagctgcagctgcaaggcaggctggcgtgggtggagctgcacggacaacagcacagcccagacggtggcccagcagagggcggccacactgctgctcacgctcagcaacctcatgttcctggcccccatcgccgtctcagtgcggcgattcttcctggtggaggcctccgtctacgcctacaccatgttcttctccacgttctaccacgcctgcgaccagcccggggaggcggtgctgtgcatcctcagctacgacacgctgcagtactgcgacttcttgggctccggggcggccatctgggtcaccatcctgtgcatggcacggctcaagacagtcctgaaatacgtgctgtttcttctgggtacactggtcatcgccatgtccttgcagctggaccgcaggggcatgtggaacatgctggggccctgcctctttgccttcgtgatcatggcctccatgtgggcttaccgctgcgggcaccggcgccagtgctaccccacctcgtggcagcgctgggccttctacctcctgcccggcgtctctatggcctctgtgggcatcgccatctacacctccatgatgactagcgacaactactactacacccacagcatctggcacatcctgctggccgggagcgcagccttgctgctgccgccacctgaccagcccgccgagccctgggcctgctcgcagaaattcccctgccactatcagatctgcaagaacgatcgggaggaactgtacgcagtgacgtga

SEQ ID NO: 205 - DNA, 864 bp, Homo sapiens
atgaaggacctgacacgcctctcccaggacctgcagcacagtggtgtacacctggactgtggtgggctccgactgagccgcccgcctgcaccgccacccggcgacctacagtacagcttcttctcctcacccagtttggccaacagcatccgtagccctgaggagcgggccaccccacacgccaagtcggagcggcccagccatcccctctacgagcctgagcctgagcctagggacagtccccagcctggccaaggccatagtcccggagccacggctgcggccacgggtctgcccccagagcctgagccagacagcactgattactcagaacttgctgacgccgacatccttagtgagctggcctccctcacttgcccagaggcccagctgctagaggcccaggccctcgagccaccatcgcccgagccggagcctcagctcctggacccccagccccgcttcctggacccgcaggcactagagccgctcggggaagctctggagctgccacccctgcaacctcttgctgatcctctggggctgccgggcctggctctccaggccctggacaccctgcctgactccttggagtcgcagctgcttgacccccaggcactcgaccccctgcccaagctgcttgacgtcccaggtcgccgtctggagccccagcagcccctggggcactgcccactggccgagcccttgcgcctggacttgtgctcaccgcacggcccccccgggcctgagggtcaccccaagtacgccttgcggcgcactgataggccaaagatcctgtgtcgccggcggaaagccggacggggacgcaaggcagacgccggacccgagggccgcctactgccc

SEQ ID NO: 206 - DNA, 4812 bp, Homo sapiens
atgcgtgtgaagccccagggcctggtggtgacttccagtgccgtgtgcagctctcctgactacctccgggaacccaagtactaccccggcggcccccccaccccccggcccctgcttcccacccggccccctgccagcccacctgacaaggccttctccacccacgccttctccgagaacccacgcccacccccacgccgggaccccagcacccggcgcccaccagtccttgccaagggggacgacccgctgcccccacgggcagcccgtcctgtctcacaggcccgctgccccacaccggtcggagacggcagcagctcccgacgctgctgggacaacgggcgggtgaacctgcgaccagtggtgcagctgattgacatcatgaaggacctgacacgcctctcccaggacctgcagcacagtggtgtacacctggactgtggtgggctccgactgagccgcccgcctgcaccgccacccggcgacctacagtacagcttcttctcctcacccagtttggccaacagcatccgtagccctgaggagcgggccaccccacacgccaagtcggagcggcccagccatcccctctacgagcctgagcctgagcctagggacagtccccagcctggccaaggccatagtcccggagccacggctgcggccacgggtctgcccccagagcctgagccagacagcactgattactcagaacttgctgacgccgacatccttagtgagctggcctccctcacttgcccagaggcccagctgctagaggcccaggccctcgagccaccatcgcccgagccggagcctcagctcctggacccccagccccgcttcctggacccgcaggcactagagccgctcggggaagctctggagctgccacccctgcaacctcttgctgatcctctggggctgccgggcctggctctccaggccctggacaccctgcctgactccttggagtcgcagctgcttgacccccaggcactcgaccccctgcccaagctgcttgacgtcccaggtcgccgtctggagccccagcagcccctggggcactgcccactggccgagcccttgcgcctggacttgtgctcaccgcacggcccccccgggcctgagggtcaccccaagtacgccttgcggcgcactgataggccaaagatcctgtgtcgccggcggaaagccggacggggacgcaaggcagacgccggacccgagggccgcctactgcccctgcctatgcccacggggctggtggctgccctggccgaacccccaccaccaccgcctcctccaccccctgccctgccaggcccaggcccggtctcagtcccagagttgaagccggaatcttcccagaccccagtggtctctacccgcaaaggcaagtgccggggcgtgcggcgcatggtggtgaagatggccaagatccccgtatcgctggggcggcggaacaagaccacatacaaagtgtcttccttgagcagcagcctgagcgtggagggcaaggagctgggcctgcgcgtgtcggctgagcccaccccgctgctgaagatgaagaacaatgggcggaacgtggtagtggtcttcccacccggtgagatgcccattattctcaaacgtaagcgcggccgccctcctaagaacctgctgctgggtcccggcaagcccaaggagccagctgtggtggcggccgaggcagccactgtggcagcggccaccatggccatgccagaggtaaaaaaacgacggcggcggaagcagaagctggcatctccccagccatcctatgcagcagacgccaacgacagcaaggccgagtactcagacgtcctggccaagctggccttcctgaaccgccagagccagtgcgctggacggtgctcaccgccccgctgctggacacccagtgagccggagtcggtgcaccaggcccccgacacccagagcatctcccacttcctgcatcgtgtgcagggcttccggcggcgtgggggcaaagcaggcggttttggtggccggggtgggggccatgcggccaagtcagcccgatgctccttcagtgacttctttgagggcatcggcaagaaaaagaaggtggtggccgtggcagccgctggggtcgggggcccgggccttactgagttggggcacccacgcaaacggggccggggggaggtagacgctgtgactgggaagccaaagcgcaagagacggtcccggaagaatgggactctgttcccagagcaggtgcccagtggcccaggctttggggaggcaggtgctgagtgggccggggataagggtggtggctgggcccctcaccatgggcacccaggcggacaagctggccgaaactgtgggtttcaggggaccgaggcccgggcctttgcctccactgggctggagagtggagcctcaggccgtggcagctactacagcacgggtgcaccctcaggccagaccgagctcagccaggagcgccaaaacctcttcaccggctactttcgctcgctgctcgattcggatgactcctccgatctcttggactttgccctctcagcctctcgcccagagtcccggaaggcatcgggcacctatgcagggccacccaccagtgccctgcctgcccagcggggcctggccaccttccctagccggggagccaaggccagcccagtggcagtgggtagcagcggggctggggcggacccctcctttcagcctgtcctgtccgcgcgccagaccttcccaccaggacgagcagcaagctatgggctaactccagccgcttcagactgccgggcagccgagaccttccccaagctggtgcccccgccctcagccatggcccgctcacctaccacccacccgcctgccaacacctacctgccccagtacggcggctatggggccggacaaagcgtattcgccccaactaagccctttacaggccaggactgcgctaacagcaaggactgcagcttcgcctatggcagtggcaacagcctccctgcctcacccagcagcgcccacagcgccggctatgccccaccgcctaccgggggcccctgcctgccaccaagcaaggcctccttcttcagcagctctgagggggcccccttctctggttcagcccccacgcccctgcgctgtgacagccgggccagcacagtctcgcccggtggctacatggtacccaagggcaccacagcctctgccacctctgcagcctctgccgcctcctcctcctcctcctccttccagccctcgcccgagaactgtcggcagtttgcgggggcttctcagtggcctttccggcagggctatggaggcctggactgggcctcagaggcctttagtcagctctacaatcccagttttgactgccacgtcagcgagcccaacgtgatcctggacatctccaactacacaccgcagaaggtgaagcagcagacggctgtgtcggagaccttctctgagtcatcctccgacagcacccagttcaatcagccggttggtggcggggggtttcggcgtgccaacagcgaggcctcaagtagtgagggccagtcgagcctgtccagcctggagaaactgatgatggactggaacgaggcatcatctgcccccggctacaactggaaccagagtgtcctctttcagagtagctccaagccgggccgtggacggcggaagaaggtggacctgttcgaggcctcacatctgggcttcccgacatccgcctctgccgctgcctcaggctacccatccaaacggagcactgggccccggcagccgcgaggtggacggggcggtggggcctgctcagccaagaaggagcggggtggcgcagcggccaaagccaagttcatccccaagccacagccagtcaacccactgttccaggacagtcctgacctcggcctggactactatagcggggacagcagcatgtcaccactgccctcacagtcgagggccttcggcgtgggagagcgagacccctgtgacttcataggaccctactccatgaacccgtccacgccttccgatggcacctttggccaaggcttccactgcgactcgcccagcctgggtgctcccgagcttgatggcaagcatttcccaccgctggcccacccacccacggtgtttgacgccggcctgcagaaggcatactcgcccacctgctcgcctacactgggcttcaaggaagagctgcggccaccgcccacaaagctggctgcctgcgagcccctcaagcatggactccagggggccagcctgggccacgcagctgcagcccaggcccacctgagctgccgggacctgccgctgggccagccccactacgattcccccagctgcaagggcacagcctattggtaccctccaggctcagctgcccgcagcccgccctatgaaggcaaggtgggtacagggctgctggctgacttcctgggcaggacggaggccgcgtgcctcagtgcccctcacctggctagcccaccagccacgcccaaggccgacaaggagccactggaaatggcccggccccctggcccaccccgtggccctgctgcagccgctgctggctatggctgcccactccttagtgacttgaccctgtcccccgtgccgagggactcgctgctgcccctgcaggacaccgcctacaggtacccaggctttatgccccaggcgcatcctggcctgggtgggggccccaagagcggcttcctggggcccatggcggaacctcaccccgaggacacattcaccgtcacatccctgtag

SEQ ID NO: 207 - DNA, 2187 bp, Homo sapiens
atgggccggttttatgagtgggaaccatttgcagaagtaaaaggcaatcgcaaatgtgagttgaactgccaggcaatgggctaccgcttctatgtacggcaagctgagaaagtcatcgatggcaccccctgtgaccagaacggcacggccatctgtgtgtctgggcagtgcaaggtgaactgcgggcttcatctggttattcaaacatcatcgcttcctgaaaaaaacaaagttgaattcaagctaaataaagacacatcgtcattccccggtagacttttacaacatgaccttgaaagaaactactcaagtaggcaaggtgatcatattaatttggtgagctcatcattgtcatcatttcctattcttcaacgttcttctgaagagaaaattctttactcagacaggttgagcctagaaagacaaaagctgaccgtatgtcctatcatcaatggggaagaccaccttcgtttgttgaactttcaacacaattttataactcggatacaaaatatttctaatctacagaagttaatatcgttggatttatatgataaccagattgaagaaattagtgggctttcgactctgagatgtcttcgtgtccttctgttggggaaaaacagaatcaagaaaatctcaaatctggagaatctaaaaagcttagatgtcttggatcttcatggaaatcagattaccaaaattgaaaatattaatcatttgtgtgagttgagagttttaaatcttgccaggaactttttaagtcatgttgataatcttaatgggctggattcactaactgaacttaacttgcgacacaatcaaatcactttcgtgagagatgtggataatttgccctgcctccaacatctctttctcagctttaacaatatatctagttttgacagtgtttcctgccttgctgactcttcttccctctcggacatcacctttgatggcaatcccatagctcaagagtcatggtacaaacacactgtccttcagaatatgatgcagctgcgccagctagatatgaagagaatcacggaagaagaaaggcgtatggcatctgttttagccaaaaaagaggaagagaagaagcgggaaagtcataaacaatctttgcttaaggagaagaaaaggttaacaattaacaacgtagctcgacagtgggacttgcaacaacaacgagtagccaatattgctacaaatgaagatagaaaagattctgactctcctcaggacccctgtcagattgatggaagcaccctctctgcattcccagaggaaacagggcctctagactcaggactcaacaatgctttacaaggtttatctgtcatagacacataccttgttgaagtggacggggatacactttccctatatggctcaggagcactggaatctctggataggaattggagtgttcaaacagcaggaatgatcacaacagtctccttcactttcatagaatttgatgaaatcgtccaagtgcttcctaaactgaagattaagtttcctaattctctgcaccttaaattcaaggaaacaaatcttgtaatgctgcagcaatttaacgcactagcccaactccgtcgtattgaccagttgacaattgatcctcaaggaaatccagttgtcaattttacactctggaaatactatgtactgtttaggctaagccatttcagtatgcagaaaataaatggaacagaggtgacacagaatgatatgataatggctgaaaggctctttggaatcctagcacatgtagcatcttctgagttaccccagtatcgtctgatttccattctgggtgatgccaggaaaaagcaatttcggtatctactagaatccaaaggaaaaaaacctggtattatcaacgaagaaaataatgacagcaaaagacttgtaggagaaaacacaaatcgtgctacattaaattatactacaagagacttttataatgaaaagctagaggaaataaaggaaaagaagaaattctgtaaaacatatatagaagaccttgtgaaggaagccacagaaatcaacatgaaaaatgaggctttgcagaagctttggccacagatgttcattgagcttgttagggatgcagtcatagaaattcgcaataaaaattcctatatgaagctctgcctacagcagataacagaccaaaaataa

SEQ ID NO: 208 - DNA, 1239 bp, Homo sapiens
atggtttcccatttcatggggtctctcagtgtcctgtgtttccttctgctgcttggattccagttcgtctgcccacagccctccactcaacacaggaaggaagaagaaaggcgtatggcatctgttttagccaaaaaagaggaagagaagaagcgggaaagtcataaacaatctttgcttaaggagaagaaaaggttaacaattaacaacgtagctcgacagtgggacttgcaacaacaacgagtagccaatattgctacaaatgaagatagaaaagattctgactctcctcaggacccctgtcagattgatggaagcaccctctctgcattcccagaggaaacagggcctctagactcaggactcaacaatgctttacaaggtttatctgtcatagacacataccttgttgaagtggacggggatacactttccctatatggctcaggagcactggaatctctggataggaattggagtgttcaaacagcaggaatgatcacaacagtctccttcactttcatagaatttgatgaaatcgtccaagtgcttcctaaactgaagattaagtttcctaattctctgcaccttaaattcaaggaaacaaatcttgtaatgctgcagcaatttaacgcactagcccaactccgtcgtattgaccagttgacaattgatcctcaaggaaatccagttgtcaattttacactctggaaatactatgtactgtttaggctaagccatttcagtatgcagaaaataaatggaacagaggtgacacagaatgatatgataatggctgaaaggctctttggaatcctagcacatgtagcatcttctgagttaccccagtatcgtctgatttccattctgggtgatgccaggaaaaagcaatttcggtatctactagaatccaaaggaaaaaaacctggtattatcaacgaagaaaataatgacagcaaaagacttgtaggagaaaacacaaatcgtgctacattaaattatactacaagagacttttataatgaaaagctagaggaaataaaggaaaagaagaaattctgtaaaacatatatagaagaccttgtgaaggaagccacagaaatcaacatgaaaaatgaggctttgcagaagctttggccacagatgttcattgagcttgttagggatgcagtcatagaaattcgcaataaaaattcctatatgaagctctgcctacagcagataacagaccaaaaataa

SEQ ID NO: 209 - DNA, 387 bp, Homo sapiens
atggtttcccatttcatggggtctctcaggaaaaagcaatttcggtatctactagaatccaaaggaaaaaaacctggtattatcaacgaagaaaataatgacagcaaaagacttgtaggagaaaacacaaatcgtgctacattaaattatactacaagagacttttataatgaaaagctagaggaaataaaggaaaagaagaaattctgtaaaacatatatagaagaccttgtgaaggaagccacagaaatcaacatgaaaaatgaggctttgcagaagctttggccacagatgttcattgagcttgttagggatgcagtcatagaaattcgcaataaaaattcctatatgaagctctgcctacagcagataacagaccaaaaataa

SEQ ID NO: 210 - DNA, 1356 bp, Homo sapiens
atggtttcccatttcatggggtctctcagtgtcctgtgtttccttctgctgcttggattccagttcgtctgcccacagccctccactcaacacaggaaggtcccgcagcggatggcggcggagggcgcccccgaggacgacggcggcggcggcgccccgggagtgtggggcgcctggggcccctggtcggcctgctcgcgtagctgcagcggcggcgtgatggagcagacgcggccctgcctgccccgctcctaccgcctgcgcggcggccagcggcctggcgcccctgcgcgcgccttcgcggaccacgtggtgtcggcggtgcgcacgtcggtgccactgcaccggagccgcgacgagacgccagcgctggccggtacggacgccagccgccagggccccacggtgctgcgaggcagccggcacccacagccccagggcctcgaagtcactggggacagaaggagcaggacccgtggtaccattggccctggcaagtatggctatggtaaggccccatatatcttaccactgcagacagacactgcacacacgccacagaggctccggagacagaagctctcatcccgccattccaggtcccagggagcatcttctgctaggcatggctacagttcaccagcccaccaggtcccccaacatgggcctttgtaccaaagtgacagtggccctcgctctggactgcaggctgcggaggcccccatctaccagctacctttgacccatgatcaaggctaccctgcagcttcaagtctctttcacagcccagaaacaagcaacaaccacggtgtggggacccatggggcaactcagagcttctctcagcctgcccgatctacagcaatctcatgcatcggggcctatcggcagtacaagctgtgcaacaccaacgtatgtccagaaagcagtagaagtatccgggaggtacagtgtgcatcctacaacaacaagccattcatgggccggttttatgagtgggaaccatttgcagaagtaaaaggcaatcgcaaatgtgagttgaactgccaggcaatgggctaccgcttctatgtacggcaagctgagaaagtcatcgatggcaccccctgtgaccagaacggcacggccatctgtgtgtctgggcagtgcaaggaaataaaggaaaagaagaaattctgtaaaacatatatagaagaccttgtgaaggaagccacagaaatcaacatgaaaaatgaggctttgcagaagctttggccacagatgttcattgagcttgttagggatgcagtcatagaaattcgcaataaaaattcctatatgaagctctgcctacagcagataacagaccaaaaataa

SEQ ID NO: 211 - DNA, 303 bp, Homo sapiens
atggtttcccatttcatggggtctctcagtgtcctgtgtttccttctgctgcttggattccagttcgtctgcccacagccctccactcaacacaggaaggaaataaaggaaaagaagaaattctgtaaaacatatatagaagaccttgtgaaggaagccacagaaatcaacatgaaaaatgaggctttgcagaagctttggccacagatgttcattgagcttgttagggatgcagtcatagaaattcgcaataaaaattcctatatgaagctctgcctacagcagataacagaccaaaaataa

SEQ ID NO: 212 - DNA, 1155 bp, Homo sapiens
atggtttcccatttcatggggtctctcagtgtcctgtgtttccttctgctgcttggattccagttcgtctgcccacagccctccactcaacacaggaaggagaagaaaaggttaacaattaacaacgtagctcgacagtgggacttgcaacaacaacgagtagccaatattgctacaaatgaagatagaaaagattctgactctcctcaggacccctgtcagattgatggaagcaccctctctgcattcccagaggaaacagggcctctagactcaggactcaacaatgctttacaaggtttatctgtcatagacacataccttgttgaagtggacggggatacactttccctatatggctcaggagcactggaatctctggataggaattggagtgttcaaacagcaggaatgatcacaacagtctccttcactttcatagaatttgatgaaatcgtccaagtgcttcctaaactgaagattaagtttcctaattctctgcaccttaaattcaaggaaacaaatcttgtaatgctgcagcaatttaacgcactagcccaactccgtcgtattgaccagttgacaattgatcctcaaggaaatccagttgtcaattttacactctggaaatactatgtactgtttaggctaagccatttcagtatgcagaaaataaatggaacagaggtgacacagaatgatatgataatggctgaaaggctctttggaatcctagcacatgtagcatcttctgagttaccccagtatcgtctgatttccattctgggtgatgccaggaaaaagcaatttcggtatctactagaatccaaaggaaaaaaacctggtattatcaacgaagaaaataatgacagcaaaagacttgtaggagaaaacacaaatcgtgctacattaaattatactacaagagacttttataatgaaaagctagaggaaataaaggaaaagaagaaattctgtaaaacatatatagaagaccttgtgaaggaagccacagaaatcaacatgaaaaatgaggctttgcagaagctttggccacagatgttcattgagcttgttagggatgcagtcatagaaattcgcaataaaaattcctatatgaagctctgcctacagcagataacagaccaaaaataa

SEQ ID NO: 213 - DNA, 1752 bp, Homo sapiens
atggtttcccatttcatggggtctctcagtgtcctgtgtttccttctgctgcttggattccagttcgtctgcccacagccctccactcaacacaggaaggtcccgcagcggatggcggcggagggcgcccccgaggacgacggcggcggcggcgccccgggagtgtggggcgcctggggcccctggtcggcctgctcgcgtagctgcagcggcggcgtgatggagcagacgcggccctgcctgccccgctcctaccgcctgcgcggcggccagcggcctggcgcccctgcgcgcgccttcgcggaccacgtggtgtcggcggtgcgcacgtcggtgccactgcaccggagccgcgacgagacgccagcgctggccggtacggacgccagccgccagggccccacggtgctgcgaggcagccggcacccacagccccagggcctcgaagtcactggggacagaagttttgacagtgtttcctgccttgctgactcttcttccctctcggacatcacctttgatggcaatcccatagctcaagagtcatggtacaaacacactgtccttcagaatatgatgcagctgcgccagctagatatgaagagaatcacggaagaagaaaggcgtatggcatctgttttagccaaaaaagaggaagagaagaagcgggaaagtcataaacaatctttgcttaaggagaagaaaaggttaacaattaacaacgtagctcgacagtgggacttgcaacaacaacgagtagccaatattgctacaaatgaagatagaaaagattctgactctcctcaggacccctgtcagattgatggaagcaccctctctgcattcccagaggaaacagggcctctagactcaggactcaacaatgctttacaaggtttatctgtcatagacacataccttgttgaagtggacggggatacactttccctatatggctcaggagcactggaatctctggataggaattggagtgttcaaacagcaggaatgatcacaacagtctccttcactttcatagaatttgatgaaatcgtccaagtgcttcctaaactgaagattaagtttcctaattctctgcaccttaaattcaaggaaacaaatcttgtaatgctgcagcaatttaacgcactagcccaactccgtcgtattgaccagttgacaattgatcctcaaggaaatccagttgtcaattttacactctggaaatactatgtactgtttaggctaagccatttcagtatgcagaaaataaatggaacagaggtgacacagaatgatatgataatggctgaaaggctctttggaatcctagcacatgtagcatcttctgagttaccccagtatcgtctgatttccattctgggtgatgccaggaaaaagcaatttcggtatctactagaatccaaaggaaaaaaacctggtattatcaacgaagaaaataatgacagcaaaagacttgtaggagaaaacacaaatcgtgctacattaaattatactacaagagacttttataatgaaaagctagaggaaataaaggaaaagaagaaattctgtaaaacatatatagaagaccttgtgaaggaagccacagaaatcaacatgaaaaatgaggctttgcagaagctttggccacagatgttcattgagcttgttagggatgcagtcatagaaattcgcaataaaaattcctatatgaagctctgcctacagcagataacagaccaaaaataa

SEQ ID NO: 214 - DNA, 378 bp, Homo sapiens
atgggccggttttatgagtgggaaccatttgcagaagtaaaaggcaatcgcaaatgtgagttgaactgccaggcaatgggctaccgcttctatgtacggcaagctgagaaagtcatcgatggcaccccctgtgaccagaacggcacggccatctgtgtgtctgggcagtgcaaggaaataaaggaaaagaagaaattctgtaaaacatatatagaagaccttgtgaaggaagccacagaaatcaacatgaaaaatgaggctttgcagaagctttggccacagatgttcattgagcttgttagggatgcagtcatagaaattcgcaataaaaattcctatatgaagctctgcctacagcagataacagaccaaaaataa

SEQ ID NO: 215 - DNA, 3165 bp, Homo sapiens
atggtttcccatttcatggggtctctcagtgtcctgtgtttccttctgctgcttggattccagttcgtctgcccacagccctccactcaacacaggaaggtcccgcagcggatggcggcggagggcgcccccgaggacgacggcggcggcggcgccccgggagtgtggggcgcctggggcccctggtcggcctgctcgcgtagctgcagcggcggcgtgatggagcagacgcggccctgcctgccccgctcctaccgcctgcgcggcggccagcggcctggcgcccctgcgcgcgccttcgcggaccacgtggtgtcggcggtgcgcacgtcggtgccactgcaccggagccgcgacgagacgccagcgctggccggtacggacgccagccgccagggccccacggtgctgcgaggcagccggcacccacagccccagggcctcgaagtcactggggacagaaggagcaggacccgtggtaccattggccctggcaagtatggctatggtaaggccccatatatcttaccactgcagacagacactgcacacacgccacagaggctccggagacagaagctctcatcccgccattccaggtcccagggagcatcttctgctaggcatggctacagttcaccagcccaccaggtcccccaacatgggcctttgtaccaaagtgacagtggccctcgctctggactgcaggctgcggaggcccccatctaccagctacctttgacccatgatcaaggctaccctgcagcttcaagtctctttcacagcccagaaacaagcaacaaccacggtgtggggacccatggggcaactcagagcttctctcagcctgcccgatctacagcaatctcatgcatcggggcctatcggcagtacaagctgtgcaacaccaacgtatgtccagaaagcagtagaagtatccgggaggtacagtgtgcatcctacaacaacaagccattcatgggccggttttatgagtgggaaccatttgcagaagtaaaaggcaatcgcaaatgtgagttgaactgccaggcaatgggctaccgcttctatgtacggcaagctgagaaagtcatcgatggcaccccctgtgaccagaacggcacggccatctgtgtgtctgggcagtgcaaggtgaactgcgggcttcatctggttattcaaacatcatcgcttcctgaaaaaaacaaagttgaattcaagctaaataaagacacatcgtcattccccggtagacttttacaacatgaccttgaaagaaactactcaagtaggcaaggtgatcatattaatttggtgagctcatcattgtcatcatttcctattcttcaacgttcttctgaagagaaaattctttactcagacaggttgagcctagaaagacaaaagctgaccgtatgtcctatcatcaatggggaagaccaccttcgtttgttgaactttcaacacaattttataactcggatacaaaatatttctaatctacagaagttaatatcgttggatttatatgataaccagattgaagaaattagtgggctttcgactctgagatgtcttcgtgtccttctgttggggaaaaacagaatcaagaaaatctcaaatctggagaatctaaaaagcttagatgtcttggatcttcatggaaatcagattaccaaaattgaaaatattaatcatttgtgtgagttgagagttttaaatcttgccaggaactttttaagtcatgttgataatcttaatgggctggattcactaactgaacttaacttgcgacacaatcaaatcactttcgtgagagatgtggataatttgccctgcctccaacatctctttctcagctttaacaatatatctagttttgacagtgtttcctgccttgctgactcttcttccctctcggacatcacctttgatggcaatcccatagctcaagagtcatggtacaaacacactgtccttcagaatatgatgcagctgcgccagctagatatgaagagaatcacggaagaagaaaggcgtatggcatctgttttagccaaaaaagaggaagagaagaagcgggaaagtcataaacaatctttgcttaaggagaagaaaaggttaacaattaacaacgtagctcgacagtgggacttgcaacaacaacgagtagccaatattgctacaaatgaagatagaaaagattctgactctcctcaggacccctgtcagattgatggaagcaccctctctgcattcccagaggaaacagggcctctagactcaggactcaacaatgctttacaaggtttatctgtcatagacacataccttgttgaagtggacggggatacactttccctatatggctcaggagcactggaatctctggataggaattggagtgttcaaacagcaggaatgatcacaacagtctccttcactttcatagaatttgatgaaatcgtccaagtgcttcctaaactgaagattaagtttcctaattctctgcaccttaaattcaaggaaacaaatcttgtaatgctgcagcaatttaacgcactagcccaactccgtcgtattgaccagttgacaattgatcctcaaggaaatccagttgtcaattttacactctggaaatactatgtactgtttaggctaagccatttcagtatgcagaaaataaatggaacagaggtgacacagaatgatatgataatggctgaaaggctctttggaatcctagcacatgtagcatcttctgagttaccccagtatcgtctgatttccattctgggtgatgccaggaaaaagcaatttcggtatctactagaatccaaaggaaaaaaacctggtattatcaacgaagaaaataatgacagcaaaagacttgtaggagaaaacacaaatcgtgctacattaaattatactacaagagacttttataatgaaaagctagaggaaataaaggaaaagaagaaattctgtaaaacatatatagaagaccttgtgaaggaagccacagaaatcaacatgaaaaatgaggctttgcagaagctttggccacagatgttcattgagcttgttagggatgcagtcatagaaattcgcaataaaaattcctatatgaagctctgcctacagcagataacagaccaaaaataa

SEQ ID NO: 216 - DNA, 3018 bp, Homo sapiens
atgtcgggatccacacagcctgtggcacagacgtggagggccactgagccccgctacccgccccacagcctttcctacccagtgcagatcgcccggacgcacacggacgtcgggctcctggagtaccagcaccactcccgcgactatgcctcccacctgtcgcccggctccatcatccagccccagcggcggaggccctccctgctgtctgagttccagcccgggaatgaacggtcccaggagctccacctgcggccagagtcccactcatacctgcccgagctggggaagtcagagatggagttcattgaaagcaagcgccctcggctagagctgctgcctgaccccctgctgcgaccgtcacccctgctggccacgggccagcctgcgggatctgaagacctcaccaaggaccgtagcctgacgggcaagctggaaccggtgtctccccccagccccccgcacactgaccctgagctggagctggtgccgccacggctgtccaaggaggagctgatccagaacatggaccgcgtggaccgagagatcaccatggtagagcagcagatctctaagctgaagaagaagcagcaacagctggaggaggaggctgccaagccgcccgagcctgagaagcccgtgtcaccgccgcccatcgagtcgaagcaccgcagcctggtgcagatcatctacgacgagaaccggaagaaggctgaagctgcacatcggattctggaaggcctggggccccaggtggagctgccgctgtacaaccagccctccgacacccggcagtatcatgagaacatcaaaataaaccaggcgatgcggaagaagctaatcttgtacttcaagaggaggaatcacgctcggaaacaatgggagcagaagttctgccagcgctatgaccagctcatggaggcctgggagaagaaggtggagcgcatcgagaacaacccccggcggcgggccaaggagagcaaggtgcgcgagtactacgagaagcagttccctgagatccgcaagcagcgcgagctgcaggagcgcatgcagagcagggtgggccagcggggcagtgggctgtccatgtcggccgcccgcagcgagcacgaggtgtcagagatcatcgatggcctctcagagcaggagaacctggagaagcagatgcgccagctggccgtgatcccgcccatgctgtacgacgctgaccagcagcgcatcaagttcatcaacatgaacgggcttatggccgaccccatgaaggtgtacaaagaccgccaggtcatgaacatgtggagtgagcaggagaaggagaccttccgggagaagttcatgcagcatcccaagaactttggcctgatcgcatcattcctggagaggaagacagtggctgagtgcgtcctctattactacctgactaagaagaatgagaactataagagcctggtgagacggagctatcggcgccgcggcaagagccagaacgtgcgcatcgaccccagtagcctgtccttcaacatgtggaaggagatccctatccccttctatctctccgtctacttctttgacgtcatgaaccccagcgagatcctgaagggcgagaagccgcaggtgcgggagcgcgggccctacgtgtacagggagttcaggcacaaaagcaacatcaccttcaacaacaacgacaccgtgtccttcctcgagtaccgcaccttccagttccagccctccaagtcccacggctcggagagcgactacatcgtcatgcccaacatcctggtcttgggtgcggcggtgatgatggagaataagcccatgaccctgaagctcatcatgaccttggcattcaccaccctcggcgaacgtgccttcatgaaccgcactgtgggtgagatcatgtggggctacaaggacccccttgtgaatctcatcaacaagtactttccaggcatgttccccttcaaggacaagttcggattatttgctgagctcaacaactccgactctgggctcttcacggtgttcacgggggtccagaacatcagcaggatccacctcgtggacaagtggaacgggctgagcaaggttgacttctggcattccgatcagtgcaacatgatcaatggaacttctgggcaaatgtggccgcccttcatgactcctgagtcctcgctggagttctacagcccggaggcctgccgatccatgaagctaatgtacaaggagtcaggggtgtttgaaggcatccccacctatcgcttcgtggctcccaaaaccctgtttgccaacgggtccatctacccacccaacgaaggcttctgcccgtgcctggagtctggaattcagaacgtcagcacctgcaggttcagtgcccccttgtttctctcccatcctcacttcctcaacgctgacccggttctggcagaagcggtgactggcctgcaccctaaccaggaggcacactccttgttcctggacatccacccggtcacgggaatccccatgaactgctctgtgaaactgcagctgagcctctacatgaaatctgtcgcaggcattggacaaactgggaagattgagcctgtggtcctgccgctgctctggtttgcagagagcggggccatggagggggagactcttcacacattctacactcagctggtgttgatgcccaaggtgatgcactatgcccagtacgtcctcctggcgctgggctgcgtcctgctgctggtccctgtcatctgccaaatccggagccaagtaggtgctggccagagggcagcccgggctgacagccattcgcttgcctgctgggggaaaggggcctcagatcggaccctctggccaaccgcagcctggagcccacctccagcagcagtcctgcgtctctgccggagtgggagcggtcactgctgggggctgcgcagcacgcttgcgtcttttgcatgccgcgttgccactactctgcctgttctggaaggcctgggaccctcccttggagggggcacaggtgggctttga

SEQ ID NO: 217 - DNA, 2298 bp, Homo sapiens
atgtcgggatccacacagcctgtggcacagacgtggagggccactgagccccgctacccgccccacagcctttcctacccagtgcagatcgcccggacgcacacggacgtcgggctcctggagtaccagcaccactcccgcgactatgcctcccacctgtcgcccggctccatcatccagccccagcggcggaggccctccctgctgtctgagttccagcccgggaatgaacggtcccaggagctccacctgcggccagagtcccactcatacctgcccgagctggggaagtcagagatggagttcattgaaagcaagcgccctcggctagagctgctgcctgaccccctgctgcgaccgtcacccctgctggccacgggccagcctgcgggatctgaagacctcaccaaggaccgtagcctgacgggcaagctggaaccggtgtctccccccagccccccgcacactgaccctgagctggagctggtgccgccacggctgtccaaggaggagctgatccagaacatggaccgcgtggaccgagagatcaccatggtagagcagcagatctctaagctgaagaagaagcagcaacagctggaggaggaggctgccaagccgcccgagcctgagaagcccgtgtcaccgccgcccatcgagtcgaagcaccgcagcctggtgcagatcatctacgacgagaaccggaagaaggctgaagctgcacatcggattctggaaggcctggggccccaggtggagctgaacgtgcgcatcgaccccagtagcctgtccttcaacatgtggaaggagatccctatccccttctatctctccgtctacttctttgacgtcatgaaccccagcgagatcctgaagggcgagaagccgcaggtgcgggagcgcgggccctacgtgtacagggagttcaggcacaaaagcaacatcaccttcaacaacaacgacaccgtgtccttcctcgagtaccgcaccttccagttccagccctccaagtcccacggctcggagagcgactacatcgtcatgcccaacatcctggtcttgggtgcggcggtgatgatggagaataagcccatgaccctgaagctcatcatgaccttggcattcaccaccctcggcgaacgtgccttcatgaaccgcactgtgggtgagatcatgtggggctacaaggacccccttgtgaatctcatcaacaagtactttccaggcatgttccccttcaaggacaagttcggattatttgctgagctcaacaactccgactctgggctcttcacggtgttcacgggggtccagaacatcagcaggatccacctcgtggacaagtggaacgggctgagcaaggttgacttctggcattccgatcagtgcaacatgatcaatggaacttctgggcaaatgtggccgcccttcatgactcctgagtcctcgctggagttctacagcccggaggcctgccgatccatgaagctaatgtacaaggagtcaggggtgtttgaaggcatccccacctatcgcttcgtggctcccaaaaccctgtttgccaacgggtccatctacccacccaacgaaggcttctgcccgtgcctggagtctggaattcagaacgtcagcacctgcaggttcagtgcccccttgtttctctcccatcctcacttcctcaacgctgacccggttctggcagaagcggtgactggcctgcaccctaaccaggaggcacactccttgttcctggacatccacccggtcacgggaatccccatgaactgctctgtgaaactgcagctgagcctctacatgaaatctgtcgcaggcattggacaaactgggaagattgagcctgtggtcctgccgctgctctggtttgcagagagcggggccatggagggggagactcttcacacattctacactcagctggtgttgatgcccaaggtgatgcactatgcccagtacgtcctcctggcgctgggctgcgtcctgctgctggtccctgtcatctgccaaatccggagccaagtaggtgctggccagagggcagcccgggctgacagccattcgcttgcctgctgggggaaaggggcctcagatcggaccctctggccaaccgcagcctggagcccacctccagcagcagtcctgcgtctctgccggagtgggagcggtcactgctgggggctgcgcagcacgcttgcgtcttttgcatgccgcgttgccactactctgcctgttctggaaggcctgggaccctcccttggagggggcacaggtgggctttga

SEQ ID NO: 218 - DNA, 2061 bp, Homo sapiens
atgtcgggatccacacagcctgtggcacagacgtggagggccactgagccccgctacccgccccacagcctttcctacccagtgcagatcgcccggacgcacacggacgtcgggctcctggagtaccagcaccactcccgcgactatgcctcccacctgtcgcccggctccatcatccagccccagcggcggaggccctccctgctgtctgagttccagcccgggaatgaacggtcccaggagctccacctgcggccagagtcccactcatacctgcccgagctggggaagtcagagatggagttcattgaaagcaagcgccctcggctagagctgctgcctgaccccctgctgcgaccgtcacccctgctggccacgggccagcctgcgggatctgaagacctcaccaaggaccgtagcctgacgggcaagctggaaccggtgtctccccccagccccccgcacactgaccctgagctggagctggtgccgccacggctgtccaaggaggagctgatccagaacatggaccgcgtggaccgagagatcaccatggtagagcagcagatctctaagctgaagaagaagcagcaacagctggaggaggaggctgccaagccgcccgagcctgagaagcccgtgtcaccgccgcccatcgagtcgaagcaccgcagcctggtgcagatcatctacgacgagaaccggaagaaggctgaagctgcacatcggattctggaaggcctggggccccaggtggagctgccgctgtacaaccagccctccgacacccggcagtatcatgagaacatcaaaatggagttcaggcacaaaagcaacatcaccttcaacaacaacgacaccgtgtccttcctcgagtaccgcaccttccagttccagccctccaagtcccacggctcggagagcgactacatcgtcatgcccaacatcctggtcttgggtgcggcggtgatgatggagaataagcccatgaccctgaagctcatcatgaccttggcattcaccaccctcggcgaacgtgccttcatgaaccgcactgtgggtgagatcatgtggggctacaaggacccccttgtgaatctcatcaacaagtactttccaggcatgttccccttcaaggacaagttcggattatttgctgagctcaacaactccgactctgggctcttcacggtgttcacgggggtccagaacatcagcaggatccacctcgtggacaagtggaacgggctgagcaaggttgacttctggcattccgatcagtgcaacatgatcaatggaacttctgggcaaatgtggccgcccttcatgactcctgagtcctcgctggagttctacagcccggaggcctgccgatccatgaagctaatgtacaaggagtcaggggtgtttgaaggcatccccacctatcgcttcgtggctcccaaaaccctgtttgccaacgggtccatctacccacccaacgaaggcttctgcccgtgcctggagtctggaattcagaacgtcagcacctgcaggttcagtgcccccttgtttctctcccatcctcacttcctcaacgctgacccggttctggcagaagcggtgactggcctgcaccctaaccaggaggcacactccttgttcctggacatccacccggtcacgggaatccccatgaactgctctgtgaaactgcagctgagcctctacatgaaatctgtcgcaggcattggacaaactgggaagattgagcctgtggtcctgccgctgctctggtttgcagagagcggggccatggagggggagactcttcacacattctacactcagctggtgttgatgcccaaggtgatgcactatgcccagtacgtcctcctggcgctgggctgcgtcctgctgctggtccctgtcatctgccaaatccggagccaagagaaatgctatttattttggagtagtagtaaaaagggctcaaaggataaggaggccattcaggcctattctgaatccctgatgacatcagctcccaagggctctgtgctgcaggaagcaaaactgtag

SEQ ID NO: 219 - DNA, 2241 bp, Homo sapiens
atgtcgggatccacacagcctgtggcacagacgtggagggccactgagccccgctacccgccccacagcctttcctacccagtgcagatcgcccggacgcacacggacgtcgggctcctggagtaccagcaccactcccgcgactatgcctcccacctgtcgcccggctccatcatccagccccagcggcggaggccctccctgctgtctgagttccagcccgggaatgaacggtcccaggagctccacctgcggccagagtcccactcatacctgcccgagctggggaagtcagagatggagttcattgaaagcaagcgccctcggctagagctgctgcctgaccccctgctgcgaccgtcacccctgctggccacgggccagcctgcgggatctgaagacctcaccaaggaccgtagcctgacgggcaagctggaaccggtgtctccccccagccccccgcacactgaccctgagctggagctggtgccgccacggctgtccaaggaggagctgatccagaacatggaccgcgtggaccgagagatcaccatggtagagcagcagatctctaagctgaagaagaagcagcaacagctggaggaggaggctgccaagccgcccgagcctgagaagcccgtgtcaccgccgcccatcgagtcgaagcaccgcagcctggtgcagatcatctacgacgagaaccggaacgtgcgcatcgaccccagtagcctgtccttcaacatgtggaaggagatccctatccccttctatctctccgtctacttctttgacgtcatgaaccccagcgagatcctgaagggcgagaagccgcaggtgcgggagcgcgggccctacgtgtacagggagttcaggcacaaaagcaacatcaccttcaacaacaacgacaccgtgtccttcctcgagtaccgcaccttccagttccagccctccaagtcccacggctcggagagcgactacatcgtcatgcccaacatcctggtcttgggtgcggcggtgatgatggagaataagcccatgaccctgaagctcatcatgaccttggcattcaccaccctcggcgaacgtgccttcatgaaccgcactgtgggtgagatcatgtggggctacaaggacccccttgtgaatctcatcaacaagtactttccaggcatgttccccttcaaggacaagttcggattatttgctgagctcaacaactccgactctgggctcttcacggtgttcacgggggtccagaacatcagcaggatccacctcgtggacaagtggaacgggctgagcaaggttgacttctggcattccgatcagtgcaacatgatcaatggaacttctgggcaaatgtggccgcccttcatgactcctgagtcctcgctggagttctacagcccggaggcctgccgatccatgaagctaatgtacaaggagtcaggggtgtttgaaggcatccccacctatcgcttcgtggctcccaaaaccctgtttgccaacgggtccatctacccacccaacgaaggcttctgcccgtgcctggagtctggaattcagaacgtcagcacctgcaggttcagtgcccccttgtttctctcccatcctcacttcctcaacgctgacccggttctggcagaagcggtgactggcctgcaccctaaccaggaggcacactccttgttcctggacatccacccggtcacgggaatccccatgaactgctctgtgaaactgcagctgagcctctacatgaaatctgtcgcaggcattggacaaactgggaagattgagcctgtggtcctgccgctgctctggtttgcagagagcggggccatggagggggagactcttcacacattctacactcagctggtgttgatgcccaaggtgatgcactatgcccagtacgtcctcctggcgctgggctgcgtcctgctgctggtccctgtcatctgccaaatccggagccaagtaggtgctggccagagggcagcccgggctgacagccattcgcttgcctgctgggggaaaggggcctcagatcggaccctctggccaaccgcagcctggagcccacctccagcagcagtcctgcgtctctgccggagtgggagcggtcactgctgggggctgcgcagcacgcttgcgtcttttgcatgccgcgttgccactactctgcctgttctggaaggcctgggaccctcccttggagggggcacaggtgggctttga

SEQ ID NO: 220 - DNA, 3015 bp, Homo sapiens
atgtcgggatccacacagcctgtggcacagacgtggagggccactgagccccgctacccgccccacagcctttcctacccagtgcagatcgcccggacgcacacggacgtcgggctcctggagtaccagcaccactcccgcgactatgcctcccacctgtcgcccggctccatcatccagccccagcggcggaggccctccctgctgtctgagttccagcccgggaatgaacggtcccaggagctccacctgcggccagagtcccactcatacctgcccgagctggggaagtcagagatggagttcattgaaagcaagcgccctcggctagagctgctgcctgaccccctgctgcgaccgtcacccctgctggccacgggccagcctgcgggatctgaagacctcaccaaggaccgtagcctgacgggcaagctggaaccggtgtctccccccagccccccgcacactgaccctgagctggagctggtgccgccacggctgtccaaggaggagctgatccagaacatggaccgcgtggaccgagagatcaccatggtagagcagcagatctctaagctgaagaagaagcagcaacagctggaggaggaggctgccaagccgcccgagcctgagaagcccgtgtcaccgccgcccatcgagtcgaagcaccgcagcctggtgcagatcatctacgacgagaaccggaagaaggctgaagctgcacatcggattctggaaggcctggggccccaggtggagctgccgctgtacaaccagccctccgacacccggcagtatcatgagaacatcaaaataaaccaggcgatgcggaagaagctaatcttgtacttcaagaggaggaatcacgctcggaaacaatgggagcagaagttctgccagcgctatgaccagctcatggaggcctgggagaagaaggtggagcgcatcgagaacaacccccggcggcgggccaaggagagcaaggtgcgcgagtactacgagaagcagttccctgagatccgcaagcagcgcgagctgcaggagcgcatgcagagggtgggccagcggggcagtgggctgtccatgtcggccgcccgcagcgagcacgaggtgtcagagatcatcgatggcctctcagagcaggagaacctggagaagcagatgcgccagctggccgtgatcccgcccatgctgtacgacgctgaccagcagcgcatcaagttcatcaacatgaacgggcttatggccgaccccatgaaggtgtacaaagaccgccaggtcatgaacatgtggagtgagcaggagaaggagaccttccgggagaagttcatgcagcatcccaagaactttggcctgatcgcatcattcctggagaggaagacagtggctgagtgcgtcctctattactacctgactaagaagaatgagaactataagagcctggtgagacggagctatcggcgccgcggcaagagccagaacgtgcgcatcgaccccagtagcctgtccttcaacatgtggaaggagatccctatccccttctatctctccgtctacttctttgacgtcatgaaccccagcgagatcctgaagggcgagaagccgcaggtgcgggagcgcgggccctacgtgtacagggagttcaggcacaaaagcaacatcaccttcaacaacaacgacaccgtgtccttcctcgagtaccgcaccttccagttccagccctccaagtcccacggctcggagagcgactacatcgtcatgcccaacatcctggtcttgggtgcggcggtgatgatggagaataagcccatgaccctgaagctcatcatgaccttggcattcaccaccctcggcgaacgtgccttcatgaaccgcactgtgggtgagatcatgtggggctacaaggacccccttgtgaatctcatcaacaagtactttccaggcatgttccccttcaaggacaagttcggattatttgctgagctcaacaactccgactctgggctcttcacggtgttcacgggggtccagaacatcagcaggatccacctcgtggacaagtggaacgggctgagcaaggttgacttctggcattccgatcagtgcaacatgatcaatggaacttctgggcaaatgtggccgcccttcatgactcctgagtcctcgctggagttctacagcccggaggcctgccgatccatgaagctaatgtacaaggagtcaggggtgtttgaaggcatccccacctatcgcttcgtggctcccaaaaccctgtttgccaacgggtccatctacccacccaacgaaggcttctgcccgtgcctggagtctggaattcagaacgtcagcacctgcaggttcagtgcccccttgtttctctcccatcctcacttcctcaacgctgacccggttctggcagaagcggtgactggcctgcaccctaaccaggaggcacactccttgttcctggacatccacccggtcacgggaatccccatgaactgctctgtgaaactgcagctgagcctctacatgaaatctgtcgcaggcattggacaaactgggaagattgagcctgtggtcctgccgctgctctggtttgcagagagcggggccatggagggggagactcttcacacattctacactcagctggtgttgatgcccaaggtgatgcactatgcccagtacgtcctcctggcgctgggctgcgtcctgctgctggtccctgtcatctgccaaatccggagccaagtaggtgctggccagagggcagcccgggctgacagccattcgcttgcctgctgggggaaaggggcctcagatcggaccctctggccaaccgcagcctggagcccacctccagcagcagtcctgcgtctctgccggagtgggagcggtcactgctgggggctgcgcagcacgcttgcgtcttttgcatgccgcgttgccactactctgcctgttctggaaggcctgggaccctcccttggagggggcacaggtgggctttga

SEQ ID NO: 221 - DNA, 2295 bp, Homo sapiens
atgtcgggatccacacagcctgtggcacagacgtggagggccactgagccccgctacccgccccacagcctttcctacccagtgcagatcgcccggacgcacacggacgtcgggctcctggagtaccagcaccactcccgcgactatgcctcccacctgtcgcccggctccatcatccagccccagcggcggaggccctccctgctgtctgagttccagcccgggaatgaacggtcccaggagctccacctgcggccagagtcccactcatacctgcccgagctggggaagtcagagatggagttcattgaaagcaagcgccctcggctagagctgctgcctgaccccctgctgcgaccgtcacccctgctggccacgggccagcctgcgggatctgaagacctcaccaaggaccgtagcctgacgggcaagctggaaccggtgtctccccccagccccccgcacactgaccctgagctggagctggtgccgccacggctgtccaaggaggagctgatccagaacatggaccgcgtggaccgagagatcaccatggtagagcagcagatctctaagctgaagaagaagcagcaacagctggaggaggaggctgccaagccgcccgagcctgagaagcccgtgtcaccgccgcccatcgagtcgaagcaccgcagcctggtgcagatcatctacgacgagaaccggaagaaggctgaagctgcacatcggattctggaaggcctggggccccaggtggagctgaacgtgcgcatcgaccccagtagcctgtccttcaacatgtggaaggagatccctatccccttctatctctccgtctacttctttgacgtcatgaaccccagcgagatcctgaagggcgagaagccgcaggtgcgggagcgcgggccctacgtgtacagggagttcaggcacaaaagcaacatcaccttcaacaacaacgacaccgtgtccttcctcgagtaccgcaccttccagttccagccctccaagtcccacggctcggagagcgactacatcgtcatgcccaacatcctggtcttgggtgcggcggtgatgatggagaataagcccatgaccctgaagctcatcatgaccttggcattcaccaccctcggcgaacgtgccttcatgaaccgcactgtgggtgagatcatgtggggctacaaggacccccttgtgaatctcatcaacaagtactttccaggcatgttccccttcaaggacaagttcggattatttgctgagctcaacaactccgactctgggctcttcacggtgttcacgggggtccagaacatcagcaggatccacctcgtggacaagtggaacgggctgagcaaggttgacttctggcattccgatcagtgcaacatgatcaatggaacttctgggcaaatgtggccgcccttcatgactcctgagtcctcgctggagttctacagcccggaggcctgccgatccatgaagctaatgtacaaggagtcaggggtgtttgaaggcatccccacctatcgcttcgtggctcccaaaaccctgtttgccaacgggtccatctacccacccaacgaaggcttctgcccgtgcctggagtctggaattcagaacgtcagcacctgcaggttcagtgcccccttgtttctctcccatcctcacttcctcaacgctgacccggttctggcagaagcggtgactggcctgcaccctaaccaggaggcacactccttgttcctggacatccacccggtcacgggaatccccatgaactgctctgtgaaactgcagctgagcctctacatgaaatctgtcgcaggcattggacaaactgggaagattgagcctgtggtcctgccgctgctctggtttgcagagagcggggccatggagggggagactcttcacacattctacactcagctggtgttgatgcccaaggtgatgcactatgcccagtacgtcctcctggcgctgggctgcgtcctgctgctggtccctgtcatctgccaaatccggagccaagtaggtgctggccagagggcagcccgggctgacagccattcgcttgcctgctgggggaaaggggcctcagatcggaccctctggccaaccgcagcctggagcccacctccagcagcagtcctgcgtctctgccggagtgggagcggtcactgctgggggctgcgcagcacgcttgcgtcttttgcatgccgcgttgccactactctgcctgttctggaaggcctgggaccctcccttggagggggcacagggtcctga

SEQ ID NO: 222 - DNA, 2082 bp, Homo sapiens
atgtcgggatccacacagcctgtggcacagacgtggagggccactgagccccgctacccgccccacagcctttcctacccagtgcagatcgcccggacgcacacggacgtcgggctcctggagtaccagcaccactcccgcgactatgcctcccacctgtcgcccggctccatcatccagccccagcggcggaggccctccctgctgtctgagttccagcccgggaatgaacggtcccaggagctccacctgcggccagagtcccactcatacctgcccgagctggggaagtcagagatggagttcattgaaagcaagcgccctcggctagagctgctgcctgaccccctgctgcgaccgtcacccctgctggccacgggccagcctgcgggatctgaagacctcaccaaggaccgtagcctgacgggcaagctggaaccggtgtctccccccagccccccgcacactgaccctgagctggagctggtgccgccacggctgtccaaggaggagctgatccagaacatggaccgcgtggaccgagagatcaccatggtagagcagcagatctctaagctgaagaagaagcagcaacagctggaggaggaggctgccaagccgcccgagcctgagaagcccgtgtcaccgccgcccatcgagtcgaagcaccgcagcctggtgcagatcatctacgacgagaaccggaagaaggctgaagctgcacatcggattctggaaggcctggggccccaggtggagctgaacgtgcgcatcgaccccagtagcctgtccttcaacatgtggaaggagatccctatccccttctatctctccgtctacttctttgacgtcatgaaccccagcgagatcctgaagggcgagaagccgcaggtgcgggagcgcgggccctacgtgtacagggagttcaggcacaaaagcaacatcaccttcaacaacaacgacaccgtgtccttcctcgagtaccgcaccttccagttccagccctccaagtcccacggctcggagagcgactacatcgtcatgcccaacatcctggtcttgggtgcggcggtgatgatggagaataagcccatgaccctgaagctcatcatgaccttggcattcaccaccctcggcgaacgtgccttcatgaaccgcactgtgggtgagatcatgtggggctacaaggacccccttgtgaatctcatcaacaagtactttccaggcatgttccccttcaaggacaagttcggattatttgctgagctcaacaactccgactctgggctcttcacggtgttcacgggggtccagaacatcagcaggatccacctcgtggacaagtggaacgggctgagcaaggttgacttctggcattccgatcagtgcaacatgatcaatggaacttctgggcaaatgtggccgcccttcatgactcctgagtcctcgctggagttctacagcccggaggcctgccgatccatgaagctaatgtacaaggagtcaggggtgtttgaaggcatccccacctatcgcttcgtggctcccaaaaccctgtttgccaacgggtccatctacccacccaacgaaggcttctgcccgtgcctggagtctggaattcagaacgtcagcacctgcaggttcagtgcccccttgtttctctcccatcctcacttcctcaacgctgacccggttctggcagaagcggtgactggcctgcaccctaaccaggaggcacactccttgttcctggacatccacccggtcacgggaatccccatgaactgctctgtgaaactgcagctgagcctctacatgaaatctgtcgcaggcattggacaaactgggaagattgagcctgtggtcctgccgctgctctggtttgcagagagcggggccatggagggggagactcttcacacattctacactcagctggtgttgatgcccaaggagaaatgctatttattttggagtagtagtaaaaagggctcaaaggataaggaggccattcaggcctattctgaatccctgatgacatcagctcccaagggctctgtgctgcaggaagcaaaactgtag

SEQ ID NO: 223 - DNA, 2157 bp, Homo sapiens
atgtcgggatccacacagcctgtggcacagacgtggagggccactgagccccgctacccgccccacagcctttcctacccagtgcagatcgcccggacgcacacggacgtcgggctcctggagtaccagcaccactcccgcgactatgcctcccacctgtcgcccggctccatcatccagccccagcggcggaggccctccctgctgtctgagttccagcccgggaatgaacggtcccaggagctccacctgcggccagagtcccactcatacctgcccgagctggggaagtcagagatggagttcattgaaagcaagcgccctcggctagagctgctgcctgaccccctgctgcgaccgtcacccctgctggccacgggccagcctgcgggatctgaagacctcaccaaggaccgtagcctgacgggcaagctggaaccggtgtctccccccagccccccgcacactgaccctgagctggagctggtgccgccacggctgtccaaggaggagctgatccagaacatggaccgcgtggaccgagagatcaccatggtagagcagcagatctctaagctgaagaagaagcagcaacagctggaggaggaggctgccaagccgcccgagcctgagaagcccgtgtcaccgccgcccatcgagtcgaagcaccgcagcctggtgcagatcatctacgacgagaaccggaagaaggctgaagctgcacatcggattctggaaggcctggggccccaggtggagctgaacgtgcgcatcgaccccagtagcctgtccttcaacatgtggaaggagatccctatccccttctatctctccgtctacttctttgacgtcatgaaccccagcgagatcctgaagggcgagaagccgcaggtgcgggagcgcgggccctacgtgtacagggagttcaggcacaaaagcaacatcaccttcaacaacaacgacaccgtgtccttcctcgagtaccgcaccttccagttccagccctccaagtcccacggctcggagagcgactacatcgtcatgcccaacatcctggtcttgggtgcggcggtgatgatggagaataagcccatgaccctgaagctcatcatgaccttggcattcaccaccctcggcgaacgtgccttcatgaaccgcactgtgggtgagatcatgtggggctacaaggacccccttgtgaatctcatcaacaagtactttccaggcatgttccccttcaaggacaagttcggattatttgctgagctcaacaactccgactctgggctcttcacggtgttcacgggggtccagaacatcagcaggatccacctcgtggacaagtggaacgggctgagcaaggttgacttctggcattccgatcagtgcaacatgatcaatggaacttctgggcaaatgtggccgcccttcatgactcctgagtcctcgctggagttctacagcccggaggcctgccgatccatgaagctaatgtacaaggagtcaggggtgtttgaaggcatccccacctatcgcttcgtggctcccaaaaccctgtttgccaacgggtccatctacccacccaacgaaggcttctgcccgtgcctggagtctggaattcagaacgtcagcacctgcaggttcagtgcccccttgtttctctcccatcctcacttcctcaacgctgacccggttctggcagaagcggtgactggcctgcaccctaaccaggaggcacactccttgttcctggacatccacccggtcacgggaatccccatgaactgctctgtgaaactgcagctgagcctctacatgaaatctgtcgcaggcattggacaaactgggaagattgagcctgtggtcctgccgctgctctggtttgcagagagcggggccatggagggggagactcttcacacattctacactcagctggtgttgatgcccaaggtgatgcactatgcccagtacgtcctcctggcgctgggctgcgtcctgctgctggtccctgtcatctgccaaatccggagccaaggtcctgaggacaccgtgagccagccaggcctggccgctgggcctgaccggccccccagcccctacaccccgcttctcccggactctcccagcggacagccccccagccccacagcctga

SEQ ID NO: 224 - DNA, 2190 bp, Homo sapiens
atgtcgggatccacacagcctgtggcacagacgtggagggccactgagccccgctacccgccccacagcctttcctacccagtgcagatcgcccggacgcacacggacgtcgggctcctggagtaccagcaccactcccgcgactatgcctcccacctgtcgcccggctccatcatccagccccagcggcggaggccctccctgctgtctgagttccagcccgggaatgaacggtcccaggagctccacctgcggccagagtcccactcatacctgcccgagctggggaagtcagagatggagttcattgaaagcaagcgccctcggctagagctgctgcctgaccccctgctgcgaccgtcacccctgctggccacgggccagcctgcgggatctgaagacctcaccaaggaccgtagcctgacgggcaagctggaaccggtgtctccccccagccccccgcacactgaccctgagctggagctggtgccgccacggctgtccaaggaggagctgatccagaacatggaccgcgtggaccgagagatcaccatggtagagcagcagatctctaagctgaagaagaagcagcaacagctggaggaggaggctgccaagccgcccgagcctgagaagcccgtgtcaccgccgcccatcgagtcgaagcaccgcagcctggtgcagatcatctacgacgagaaccggaagaaggctgaagctgcacatcggattctggaaggcctggggccccaggtggagctgccgctgtacaaccagccctccgacacccggcagtatcatgagaacatcaaaatggagttcaggcacaaaagcaacatcaccttcaacaacaacgacaccgtgtccttcctcgagtaccgcaccttccagttccagccctccaagtcccacggctcggagagcgactacatcgtcatgcccaacatcctggtcttgggtgcggcggtgatgatggagaataagcccatgaccctgaagctcatcatgaccttggcattcaccaccctcggcgaacgtgccttcatgaaccgcactgtgggtgagatcatgtggggctacaaggacccccttgtgaatctcatcaacaagtactttccaggcatgttccccttcaaggacaagttcggattatttgctgagctcaacaactccgactctgggctcttcacggtgttcacgggggtccagaacatcagcaggatccacctcgtggacaagtggaacgggctgagcaaggttgacttctggcattccgatcagtgcaacatgatcaatggaacttctgggcaaatgtggccgcccttcatgactcctgagtcctcgctggagttctacagcccggaggcctgccgatccatgaagctaatgtacaaggagtcaggggtgtttgaaggcatccccacctatcgcttcgtggctcccaaaaccctgtttgccaacgggtccatctacccacccaacgaaggcttctgcccgtgcctggagtctggaattcagaacgtcagcacctgcaggttcagtgcccccttgtttctctcccatcctcacttcctcaacgctgacccggttctggcagaagcggtgactggcctgcaccctaaccaggaggcacactccttgttcctggacatccacccggtcacgggaatccccatgaactgctctgtgaaactgcagctgagcctctacatgaaatctgtcgcaggcattggacaaactgggaagattgagcctgtggtcctgccgctgctctggtttgcagagagcggggccatggagggggagactcttcacacattctacactcagctggtgttgatgcccaaggtgatgcactatgcccagtacgtcctcctggcgctgggctgcgtcctgctgctggtccctgtcatctgccaaatccggagccaagtaggtgctggccagagggcagcccgggctgacagccattcgcttgcctgctgggggaaaggggcctcagatcggaccctctggccaaccgcagcctggagcccacctccagcagcagtcctgcgtctctgccggagtgggagcggtcactgctgggggctgcgcagcacgcttgcgtcttttgcatgccgcgttgccactactctgcctgttctggaaggcctgggaccctcccttggagggggcacagggtcctga

SEQ ID NO: 225 - DNA, 2883 bp, Homo sapiens
atgtcgggatccacacagcctgtggcacagacgtggagggccactgagccccgctacccgccccacagcctttcctacccagtgcagatcgcccggacgcacacggacgtcgggctcctggagtaccagcaccactcccgcgactatgcctcccacctgtcgcccggctccatcatccagccccagcggcggaggccctccctgctgtctgagttccagcccgggaatgaacggtcccaggagctccacctgcggccagagtcccactcatacctgcccgagctggggaagtcagagatggagttcattgaaagcaagcgccctcggctagagctgctgcctgaccccctgctgcgaccgtcacccctgctggccacgggccagcctgcgggatctgaagacctcaccaaggaccgtagcctgacgggcaagctggaaccggtgtctccccccagccccccgcacactgaccctgagctggagctggtgccgccacggctgtccaaggaggagctgatccagaacatggaccgcgtggaccgagagatcaccatggtagagcagcagatctctaagctgaagaagaagcagcaacagctggaggaggaggctgccaagccgcccgagcctgagaagcccgtgtcaccgccgcccatcgagtcgaagcaccgcagcctggtgcagatcatctacgacgagaaccggaagaaggctgaagctgcacatcggattctggaaggcctggggccccaggtggagctgccgctgtacaaccagccctccgacacccggcagtatcatgagaacatcaaaataaaccaggcgatgcggaagaagctaatcttgtacttcaagaggaggaatcacgctcggaaacaatgggagcagaagttctgccagcgctatgaccagctcatggaggcctgggagaagaaggtggagcgcatcgagaacaacccccggcggcgggccaaggagagcaaggtgcgcgagtactacgagaagcagttccctgagatccgcaagcagcgcgagctgcaggagcgcatgcagagggtgggccagcggggcagtgggctgtccatgtcggccgcccgcagcgagcacgaggtgtcagagatcatcgatggcctctcagagcaggagaacctggagaagcagatgcgccagctggccgtgatcccgcccatgctgtacgacgctgaccagcagcgcatcaagttcatcaacatgaacgggcttatggccgaccccatgaaggtgtacaaagaccgccaggtcatgaacatgtggagtgagcaggagaaggagaccttccgggagaagttcatgcagcatcccaagaactttggcctgatcgcatcattcctggagaggaagacagtggctgagtgcgtcctctattactacctgactaagaagaatgagaactataagagcctggtgagacggagctatcggcgccgcggcaagagccagaacgtgcgcatcgaccccagtagcctgtccttcaacatgtggaaggagatccctatccccttctatctctccgtctacttctttgacgtcatgaaccccagcgagatcctgaagggcgagaagccgcaggtgcgggagcgcgggccctacgtgtacagggagttcaggcacaaaagcaacatcaccttcaacaacaacgacaccgtgtccttcctcgagtaccgcaccttccagttccagccctccaagtcccacggctcggagagcgactacatcgtcatgcccaacatcctggtcttgggtgcggcggtgatgatggagaataagcccatgaccctgaagctcatcatgaccttggcattcaccaccctcggcgaacgtgccttcatgaaccgcactgtgggtgagatcatgtggggctacaaggacccccttgtgaatctcatcaacaagtactttccaggcatgttccccttcaaggacaagttcggattatttgctgagctcaacaactccgactctgggctcttcacggtgttcacgggggtccagaacatcagcaggatccacctcgtggacaagtggaacgggctgagcaaggttgacttctggcattccgatcagtgcaacatgatcaatggaacttctgggcaaatgtggccgcccttcatgactcctgagtcctcgctggagttctacagcccggaggcctgccgatccatgaagctaatgtacaaggagtcaggggtgtttgaaggcatccccacctatcgcttcgtggctcccaaaaccctgtttgccaacgggtccatctacccacccaacgaaggcttctgcccgtgcctggagtctggaattcagaacgtcagcacctgcaggttcagtgcccccttgtttctctcccatcctcacttcctcaacgctgacccggttctggcagaagcggtgactggcctgcaccctaaccaggaggcacactccttgttcctggacatccacccggtcacgggaatccccatgaactgctctgtgaaactgcagctgagcctctacatgaaatctgtcgcaggcattggacaaactgggaagattgagcctgtggtcctgccgctgctctggtttgcagagagcggggccatggagggggagactcttcacacattctacactcagctggtgttgatgcccaaggtgatgcactatgcccagtacgtcctcctggcgctgggctgcgtcctgctgctggtccctgtcatctgccaaatccggagccaagagaaatgctatttattttggagtagtagtaaaaagggctcaaaggataaggaggccattcaggcctattctgaatccctgatgacatcagctcccaagggctctgtgctgcaggaagcaaaactgtag

SEQ ID NO: 226 - DNA, 2100 bp, Homo sapiens
atgtcgggatccacacagcctgtggcacagacgtggagggccactgagccccgctacccgccccacagcctttcctacccagtgcagatcgcccggacgcacacggacgtcgggctcctggagtaccagcaccactcccgcgactatgcctcccacctgtcgcccggctccatcatccagccccagcggcggaggccctccctgctgtctgagttccagcccgggaatgaacggtcccaggagctccacctgcggccagagtcccactcatacctgcccgagctggggaagtcagagatggagttcattgaaagcaagcgccctcggctagagctgctgcctgaccccctgctgcgaccgtcacccctgctggccacgggccagcctgcgggatctgaagacctcaccaaggaccgtagcctgacgggcaagctggaaccggtgtctccccccagccccccgcacactgaccctgagctggagctggtgccgccacggctgtccaaggaggagctgatccagaacatggaccgcgtggaccgagagatcaccatggtagagcagcagatctctaagctgaagaagaagcagcaacagctggaggaggaggctgccaagccgcccgagcctgagaagcccgtgtcaccgccgcccatcgagtcgaagcaccgcagcctggtgcagatcatctacgacgagaaccggaacgtgcgcatcgaccccagtagcctgtccttcaacatgtggaaggagatccctatccccttctatctctccgtctacttctttgacgtcatgaaccccagcgagatcctgaagggcgagaagccgcaggtgcgggagcgcgggccctacgtgtacagggagttcaggcacaaaagcaacatcaccttcaacaacaacgacaccgtgtccttcctcgagtaccgcaccttccagttccagccctccaagtcccacggctcggagagcgactacatcgtcatgcccaacatcctggtcttgggtgcggcggtgatgatggagaataagcccatgaccctgaagctcatcatgaccttggcattcaccaccctcggcgaacgtgccttcatgaaccgcactgtgggtgagatcatgtggggctacaaggacccccttgtgaatctcatcaacaagtactttccaggcatgttccccttcaaggacaagttcggattatttgctgagctcaacaactccgactctgggctcttcacggtgttcacgggggtccagaacatcagcaggatccacctcgtggacaagtggaacgggctgagcaaggttgacttctggcattccgatcagtgcaacatgatcaatggaacttctgggcaaatgtggccgcccttcatgactcctgagtcctcgctggagttctacagcccggaggcctgccgatccatgaagctaatgtacaaggagtcaggggtgtttgaaggcatccccacctatcgcttcgtggctcccaaaaccctgtttgccaacgggtccatctacccacccaacgaaggcttctgcccgtgcctggagtctggaattcagaacgtcagcacctgcaggttcagtgcccccttgtttctctcccatcctcacttcctcaacgctgacccggttctggcagaagcggtgactggcctgcaccctaaccaggaggcacactccttgttcctggacatccacccggtcacgggaatccccatgaactgctctgtgaaactgcagctgagcctctacatgaaatctgtcgcaggcattggacaaactgggaagattgagcctgtggtcctgccgctgctctggtttgcagagagcggggccatggagggggagactcttcacacattctacactcagctggtgttgatgcccaaggtgatgcactatgcccagtacgtcctcctggcgctgggctgcgtcctgctgctggtccctgtcatctgccaaatccggagccaaggtcctgaggacaccgtgagccagccaggcctggccgctgggcctgaccggccccccagcccctacaccccgcttctcccggactctcccagcggacagccccccagccccacagcctga

SEQ ID NO: 227 - DNA, 2109 bp, Homo sapiens
atgtcgggatccacacagcctgtggcacagacgtggagggccactgagccccgctacccgccccacagcctttcctacccagtgcagatcgcccggacgcacacggacgtcgggctcctggagtaccagcaccactcccgcgactatgcctcccacctgtcgcccggctccatcatccagccccagcggcggaggccctccctgctgtctgagttccagcccgggaatgaacggtcccaggagctccacctgcggccagagtcccactcatacctgcccgagctggggaagtcagagatggagttcattgaaagcaagcgccctcggctagagctgctgcctgaccccctgctgcgaccgtcacccctgctggccacgggccagcctgcgggatctgaagacctcaccaaggaccgtagcctgacgggcaagctggaaccggtgtctccccccagccccccgcacactgaccctgagctggagctggtgccgccacggctgtccaaggaggagctgatccagaacatggaccgcgtggaccgagagatcaccatggtagagcagcagatctctaagctgaagaagaagcagcaacagctggaggaggaggctgccaagccgcccgagcctgagaagcccgtgtcaccgccgcccatcgagtcgaagcaccgcagcctggtgcagatcatctacgacgagaaccggaacgtgcgcatcgaccccagtagcctgtccttcaacatgtggaaggagatccctatccccttctatctctccgtctacttctttgacgtcatgaaccccagcgagatcctgaagggcgagaagccgcaggtgcgggagcgcgggccctacgtgtacagggagttcaggcacaaaagcaacatcaccttcaacaacaacgacaccgtgtccttcctcgagtaccgcaccttccagttccagccctccaagtcccacggctcggagagcgactacatcgtcatgcccaacatcctggtcttgggtgcggcggtgatgatggagaataagcccatgaccctgaagctcatcatgaccttggcattcaccaccctcggcgaacgtgccttcatgaaccgcactgtgggtgagatcatgtggggctacaaggacccccttgtgaatctcatcaacaagtactttccaggcatgttccccttcaaggacaagttcggattatttgctgagctcaacaactccgactctgggctcttcacggtgttcacgggggtccagaacatcagcaggatccacctcgtggacaagtggaacgggctgagcaaggttgacttctggcattccgatcagtgcaacatgatcaatggaacttctgggcaaatgtggccgcccttcatgactcctgagtcctcgctggagttctacagcccggaggcctgccgatccatgaagctaatgtacaaggagtcaggggtgtttgaaggcatccccacctatcgcttcgtggctcccaaaaccctgtttgccaacgggtccatctacccacccaacgaaggcttctgcccgtgcctggagtctggaattcagaacgtcagcacctgcaggttcagtgcccccttgtttctctcccatcctcacttcctcaacgctgacccggttctggcagaagcggtgactggcctgcaccctaaccaggaggcacactccttgttcctggacatccacccggtcacgggaatccccatgaactgctctgtgaaactgcagctgagcctctacatgaaatctgtcgcaggcattggacaaactgggaagattgagcctgtggtcctgccgctgctctggtttgcagagagcggggccatggagggggagactcttcacacattctacactcagctggtgttgatgcccaaggtgatgcactatgcccagtacgtcctcctggcgctgggctgcgtcctgctgctggtccctgtcatctgccaaatccggagccaagagaaatgctatttattttggagtagtagtaaaaagggctcaaaggataaggaggccattcaggcctattctgaatccctgatgacatcagctcccaagggctctgtgctgcaggaagcaaaactgtag

SEQ ID NO: 228 - DNA, 2799 bp, Homo sapiens
atgtcgggatccacacagcctgtggcacagacgtggagggccactgagccccgctacccgccccacagcctttcctacccagtgcagatcgcccggacgcacacggacgtcgggctcctggagtaccagcaccactcccgcgactatgcctcccacctgtcgcccggctccatcatccagccccagcggcggaggccctccctgctgtctgagttccagcccgggaatgaacggtcccaggagctccacctgcggccagagtcccactcatacctgcccgagctggggaagtcagagatggagttcattgaaagcaagcgccctcggctagagctgctgcctgaccccctgctgcgaccgtcacccctgctggccacgggccagcctgcgggatctgaagacctcaccaaggaccgtagcctgacgggcaagctggaaccggtgtctccccccagccccccgcacactgaccctgagctggagctggtgccgccacggctgtccaaggaggagctgatccagaacatggaccgcgtggaccgagagatcaccatggtagagcagcagatctctaagctgaagaagaagcagcaacagctggaggaggaggctgccaagccgcccgagcctgagaagcccgtgtcaccgccgcccatcgagtcgaagcaccgcagcctggtgcagatcatctacgacgagaaccggaagaaggctgaagctgcacatcggattctggaaggcctggggccccaggtggagctgccgctgtacaaccagccctccgacacccggcagtatcatgagaacatcaaaataaaccaggcgatgcggaagaagctaatcttgtacttcaagaggaggaatcacgctcggaaacaatgggagcagaagttctgccagcgctatgaccagctcatggaggcctgggagaagaaggtggagcgcatcgagaacaacccccggcggcgggccaaggagagcaaggtgcgcgagtactacgagaagcagttccctgagatccgcaagcagcgcgagctgcaggagcgcatgcagagggtgggccagcggggcagtgggctgtccatgtcggccgcccgcagcgagcacgaggtgtcagagatcatcgatggcctctcagagcaggagaacctggagaagcagatgcgccagctggccgtgatcccgcccatgctgtacgacgctgaccagcagcgcatcaagttcatcaacatgaacgggcttatggccgaccccatgaaggtgtacaaagaccgccaggtcatgaacatgtggagtgagcaggagaaggagaccttccgggagaagttcatgcagcatcccaagaactttggcctgatcgcatcattcctggagaggaagacagtggctgagtgcgtcctctattactacctgactaagaagaatgagaactataagagcctggtgagacggagctatcggcgccgcggcaagagccagaacgtgcgcatcgaccccagtagcctgtccttcaacatgtggaaggagatccctatccccttctatctctccgtctacttctttgacgtcatgaaccccagcgagatcctgaagggcgagaagccgcaggtgcgggagcgcgggccctacgtgtacagggagttcaggcacaaaagcaacatcaccttcaacaacaacgacaccgtgtccttcctcgagtaccgcaccttccagttccagccctccaagtcccacggctcggagagcgactacatcgtcatgcccaacatcctggtcttgggtgcggcggtgatgatggagaataagcccatgaccctgaagctcatcatgaccttggcattcaccaccctcggcgaacgtgccttcatgaaccgcactgtgggtgagatcatgtggggctacaaggacccccttgtgaatctcatcaacaagtactttccaggcatgttccccttcaaggacaagttcggattatttgctgagctcaacaactccgactctgggctcttcacggtgttcacgggggtccagaacatcagcaggatccacctcgtggacaagtggaacgggctgagcaaggttgacttctggcattccgatcagtgcaacatgatcaatggaacttctgggcaaatgtggccgcccttcatgactcctgagtcctcgctggagttctacagcccggaggcctgccgatccatgaagctaatgtacaaggagtcaggggtgtttgaaggcatccccacctatcgcttcgtggctcccaaaaccctgtttgccaacgggtccatctacccacccaacgaaggcttctgcccgtgcctggagtctggaattcagaacgtcagcacctgcaggttcagtgcccccttgtttctctcccatcctcacttcctcaacgctgacccggttctggcagaagcggtgactggcctgcaccctaaccaggaggcacactccttgttcctggacatccacccggtcacgggaatccccatgaactgctctgtgaaactgcagctgagcctctacatgaaatctgtcgcaggcattggacaaactgggaagattgagcctgtggtcctgccgctgctctggtttgcagagagcggggccatggagggggagactcttcacacattctacactcagctggtgttgatgcccaaggagaaatgctatttattttggagtagtagtaaaaagggctcaaaggataaggaggccattcaggcctattctgaatccctgatgacatcagctcccaagggctctgtgctgcaggaagcaaaactgtag

SEQ ID NO: 229 - DNA, 2193 bp, Homo sapiens
atgtcgggatccacacagcctgtggcacagacgtggagggccactgagccccgctacccgccccacagcctttcctacccagtgcagatcgcccggacgcacacggacgtcgggctcctggagtaccagcaccactcccgcgactatgcctcccacctgtcgcccggctccatcatccagccccagcggcggaggccctccctgctgtctgagttccagcccgggaatgaacggtcccaggagctccacctgcggccagagtcccactcatacctgcccgagctggggaagtcagagatggagttcattgaaagcaagcgccctcggctagagctgctgcctgaccccctgctgcgaccgtcacccctgctggccacgggccagcctgcgggatctgaagacctcaccaaggaccgtagcctgacgggcaagctggaaccggtgtctccccccagccccccgcacactgaccctgagctggagctggtgccgccacggctgtccaaggaggagctgatccagaacatggaccgcgtggaccgagagatcaccatggtagagcagcagatctctaagctgaagaagaagcagcaacagctggaggaggaggctgccaagccgcccgagcctgagaagcccgtgtcaccgccgcccatcgagtcgaagcaccgcagcctggtgcagatcatctacgacgagaaccggaagaaggctgaagctgcacatcggattctggaaggcctggggccccaggtggagctgccgctgtacaaccagccctccgacacccggcagtatcatgagaacatcaaaatggagttcaggcacaaaagcaacatcaccttcaacaacaacgacaccgtgtccttcctcgagtaccgcaccttccagttccagccctccaagtcccacggctcggagagcgactacatcgtcatgcccaacatcctggtcttgggtgcggcggtgatgatggagaataagcccatgaccctgaagctcatcatgaccttggcattcaccaccctcggcgaacgtgccttcatgaaccgcactgtgggtgagatcatgtggggctacaaggacccccttgtgaatctcatcaacaagtactttccaggcatgttccccttcaaggacaagttcggattatttgctgagctcaacaactccgactctgggctcttcacggtgttcacgggggtccagaacatcagcaggatccacctcgtggacaagtggaacgggctgagcaaggttgacttctggcattccgatcagtgcaacatgatcaatggaacttctgggcaaatgtggccgcccttcatgactcctgagtcctcgctggagttctacagcccggaggcctgccgatccatgaagctaatgtacaaggagtcaggggtgtttgaaggcatccccacctatcgcttcgtggctcccaaaaccctgtttgccaacgggtccatctacccacccaacgaaggcttctgcccgtgcctggagtctggaattcagaacgtcagcacctgcaggttcagtgcccccttgtttctctcccatcctcacttcctcaacgctgacccggttctggcagaagcggtgactggcctgcaccctaaccaggaggcacactccttgttcctggacatccacccggtcacgggaatccccatgaactgctctgtgaaactgcagctgagcctctacatgaaatctgtcgcaggcattggacaaactgggaagattgagcctgtggtcctgccgctgctctggtttgcagagagcggggccatggagggggagactcttcacacattctacactcagctggtgttgatgcccaaggtgatgcactatgcccagtacgtcctcctggcgctgggctgcgtcctgctgctggtccctgtcatctgccaaatccggagccaagtaggtgctggccagagggcagcccgggctgacagccattcgcttgcctgctgggggaaaggggcctcagatcggaccctctggccaaccgcagcctggagcccacctccagcagcagtcctgcgtctctgccggagtgggagcggtcactgctgggggctgcgcagcacgcttgcgtcttttgcatgccgcgttgccactactctgcctgttctggaaggcctgggaccctcccttggagggggcacaggtgggctttga

SEQ ID NO: 230 - DNA, 3012 bp, Homo sapiens
atgtcgggatccacacagcctgtggcacagacgtggagggccactgagccccgctacccgccccacagcctttcctacccagtgcagatcgcccggacgcacacggacgtcgggctcctggagtaccagcaccactcccgcgactatgcctcccacctgtcgcccggctccatcatccagccccagcggcggaggccctccctgctgtctgagttccagcccgggaatgaacggtcccaggagctccacctgcggccagagtcccactcatacctgcccgagctggggaagtcagagatggagttcattgaaagcaagcgccctcggctagagctgctgcctgaccccctgctgcgaccgtcacccctgctggccacgggccagcctgcgggatctgaagacctcaccaaggaccgtagcctgacgggcaagctggaaccggtgtctccccccagccccccgcacactgaccctgagctggagctggtgccgccacggctgtccaaggaggagctgatccagaacatggaccgcgtggaccgagagatcaccatggtagagcagcagatctctaagctgaagaagaagcagcaacagctggaggaggaggctgccaagccgcccgagcctgagaagcccgtgtcaccgccgcccatcgagtcgaagcaccgcagcctggtgcagatcatctacgacgagaaccggaagaaggctgaagctgcacatcggattctggaaggcctggggccccaggtggagctgccgctgtacaaccagccctccgacacccggcagtatcatgagaacatcaaaataaaccaggcgatgcggaagaagctaatcttgtacttcaagaggaggaatcacgctcggaaacaatgggagcagaagttctgccagcgctatgaccagctcatggaggcctgggagaagaaggtggagcgcatcgagaacaacccccggcggcgggccaaggagagcaaggtgcgcgagtactacgagaagcagttccctgagatccgcaagcagcgcgagctgcaggagcgcatgcagagggtgggccagcggggcagtgggctgtccatgtcggccgcccgcagcgagcacgaggtgtcagagatcatcgatggcctctcagagcaggagaacctggagaagcagatgcgccagctggccgtgatcccgcccatgctgtacgacgctgaccagcagcgcatcaagttcatcaacatgaacgggcttatggccgaccccatgaaggtgtacaaagaccgccaggtcatgaacatgtggagtgagcaggagaaggagaccttccgggagaagttcatgcagcatcccaagaactttggcctgatcgcatcattcctggagaggaagacagtggctgagtgcgtcctctattactacctgactaagaagaatgagaactataagagcctggtgagacggagctatcggcgccgcggcaagagccagaacgtgcgcatcgaccccagtagcctgtccttcaacatgtggaaggagatccctatccccttctatctctccgtctacttctttgacgtcatgaaccccagcgagatcctgaagggcgagaagccgcaggtgcgggagcgcgggccctacgtgtacagggagttcaggcacaaaagcaacatcaccttcaacaacaacgacaccgtgtccttcctcgagtaccgcaccttccagttccagccctccaagtcccacggctcggagagcgactacatcgtcatgcccaacatcctggtcttgggtgcggcggtgatgatggagaataagcccatgaccctgaagctcatcatgaccttggcattcaccaccctcggcgaacgtgccttcatgaaccgcactgtgggtgagatcatgtggggctacaaggacccccttgtgaatctcatcaacaagtactttccaggcatgttccccttcaaggacaagttcggattatttgctgagctcaacaactccgactctgggctcttcacggtgttcacgggggtccagaacatcagcaggatccacctcgtggacaagtggaacgggctgagcaaggttgacttctggcattccgatcagtgcaacatgatcaatggaacttctgggcaaatgtggccgcccttcatgactcctgagtcctcgctggagttctacagcccggaggcctgccgatccatgaagctaatgtacaaggagtcaggggtgtttgaaggcatccccacctatcgcttcgtggctcccaaaaccctgtttgccaacgggtccatctacccacccaacgaaggcttctgcccgtgcctggagtctggaattcagaacgtcagcacctgcaggttcagtgcccccttgtttctctcccatcctcacttcctcaacgctgacccggttctggcagaagcggtgactggcctgcaccctaaccaggaggcacactccttgttcctggacatccacccggtcacgggaatccccatgaactgctctgtgaaactgcagctgagcctctacatgaaatctgtcgcaggcattggacaaactgggaagattgagcctgtggtcctgccgctgctctggtttgcagagagcggggccatggagggggagactcttcacacattctacactcagctggtgttgatgcccaaggtgatgcactatgcccagtacgtcctcctggcgctgggctgcgtcctgctgctggtccctgtcatctgccaaatccggagccaagtaggtgctggccagagggcagcccgggctgacagccattcgcttgcctgctgggggaaaggggcctcagatcggaccctctggccaaccgcagcctggagcccacctccagcagcagtcctgcgtctctgccggagtgggagcggtcactgctgggggctgcgcagcacgcttgcgtcttttgcatgccgcgttgccactactctgcctgttctggaaggcctgggaccctcccttggagggggcacagggtcctga

SEQ ID NO: 231 - DNA, 2238 bp, Homo sapiens
atgtcgggatccacacagcctgtggcacagacgtggagggccactgagccccgctacccgccccacagcctttcctacccagtgcagatcgcccggacgcacacggacgtcgggctcctggagtaccagcaccactcccgcgactatgcctcccacctgtcgcccggctccatcatccagccccagcggcggaggccctccctgctgtctgagttccagcccgggaatgaacggtcccaggagctccacctgcggccagagtcccactcatacctgcccgagctggggaagtcagagatggagttcattgaaagcaagcgccctcggctagagctgctgcctgaccccctgctgcgaccgtcacccctgctggccacgggccagcctgcgggatctgaagacctcaccaaggaccgtagcctgacgggcaagctggaaccggtgtctccccccagccccccgcacactgaccctgagctggagctggtgccgccacggctgtccaaggaggagctgatccagaacatggaccgcgtggaccgagagatcaccatggtagagcagcagatctctaagctgaagaagaagcagcaacagctggaggaggaggctgccaagccgcccgagcctgagaagcccgtgtcaccgccgcccatcgagtcgaagcaccgcagcctggtgcagatcatctacgacgagaaccggaacgtgcgcatcgaccccagtagcctgtccttcaacatgtggaaggagatccctatccccttctatctctccgtctacttctttgacgtcatgaaccccagcgagatcctgaagggcgagaagccgcaggtgcgggagcgcgggccctacgtgtacagggagttcaggcacaaaagcaacatcaccttcaacaacaacgacaccgtgtccttcctcgagtaccgcaccttccagttccagccctccaagtcccacggctcggagagcgactacatcgtcatgcccaacatcctggtcttgggtgcggcggtgatgatggagaataagcccatgaccctgaagctcatcatgaccttggcattcaccaccctcggcgaacgtgccttcatgaaccgcactgtgggtgagatcatgtggggctacaaggacccccttgtgaatctcatcaacaagtactttccaggcatgttccccttcaaggacaagttcggattatttgctgagctcaacaactccgactctgggctcttcacggtgttcacgggggtccagaacatcagcaggatccacctcgtggacaagtggaacgggctgagcaaggttgacttctggcattccgatcagtgcaacatgatcaatggaacttctgggcaaatgtggccgcccttcatgactcctgagtcctcgctggagttctacagcccggaggcctgccgatccatgaagctaatgtacaaggagtcaggggtgtttgaaggcatccccacctatcgcttcgtggctcccaaaaccctgtttgccaacgggtccatctacccacccaacgaaggcttctgcccgtgcctggagtctggaattcagaacgtcagcacctgcaggttcagtgcccccttgtttctctcccatcctcacttcctcaacgctgacccggttctggcagaagcggtgactggcctgcaccctaaccaggaggcacactccttgttcctggacatccacccggtcacgggaatccccatgaactgctctgtgaaactgcagctgagcctctacatgaaatctgtcgcaggcattggacaaactgggaagattgagcctgtggtcctgccgctgctctggtttgcagagagcggggccatggagggggagactcttcacacattctacactcagctggtgttgatgcccaaggtgatgcactatgcccagtacgtcctcctggcgctgggctgcgtcctgctgctggtccctgtcatctgccaaatccggagccaagtaggtgctggccagagggcagcccgggctgacagccattcgcttgcctgctgggggaaaggggcctcagatcggaccctctggccaaccgcagcctggagcccacctccagcagcagtcctgcgtctctgccggagtgggagcggtcactgctgggggctgcgcagcacgcttgcgtcttttgcatgccgcgttgccactactctgcctgttctggaaggcctgggaccctcccttggagggggcacagggtcctga

SEQ ID NO: 232 - DNA, 2874 bp, Homo sapiens
atgtcgggatccacacagcctgtggcacagacgtggagggccactgagccccgctacccgccccacagcctttcctacccagtgcagatcgcccggacgcacacggacgtcgggctcctggagtaccagcaccactcccgcgactatgcctcccacctgtcgcccggctccatcatccagccccagcggcggaggccctccctgctgtctgagttccagcccgggaatgaacggtcccaggagctccacctgcggccagagtcccactcatacctgcccgagctggggaagtcagagatggagttcattgaaagcaagcgccctcggctagagctgctgcctgaccccctgctgcgaccgtcacccctgctggccacgggccagcctgcgggatctgaagacctcaccaaggaccgtagcctgacgggcaagctggaaccggtgtctccccccagccccccgcacactgaccctgagctggagctggtgccgccacggctgtccaaggaggagctgatccagaacatggaccgcgtggaccgagagatcaccatggtagagcagcagatctctaagctgaagaagaagcagcaacagctggaggaggaggctgccaagccgcccgagcctgagaagcccgtgtcaccgccgcccatcgagtcgaagcaccgcagcctggtgcagatcatctacgacgagaaccggaagaaggctgaagctgcacatcggattctggaaggcctggggccccaggtggagctgccgctgtacaaccagccctccgacacccggcagtatcatgagaacatcaaaataaaccaggcgatgcggaagaagctaatcttgtacttcaagaggaggaatcacgctcggaaacaatgggagcagaagttctgccagcgctatgaccagctcatggaggcctgggagaagaaggtggagcgcatcgagaacaacccccggcggcgggccaaggagagcaaggtgcgcgagtactacgagaagcagttccctgagatccgcaagcagcgcgagctgcaggagcgcatgcagagggtgggccagcggggcagtgggctgtccatgtcggccgcccgcagcgagcacgaggtgtcagagatcatcgatggcctctcagagcaggagaacctggagaagcagatgcgccagctggccgtgatcccgcccatgctgtacgacgctgaccagcagcgcatcaagttcatcaacatgaacgggcttatggccgaccccatgaaggtgtacaaagaccgccaggtcatgaacatgtggagtgagcaggagaaggagaccttccgggagaagttcatgcagcatcccaagaactttggcctgatcgcatcattcctggagaggaagacagtggctgagtgcgtcctctattactacctgactaagaagaatgagaactataagagcctggtgagacggagctatcggcgccgcggcaagagccagaacgtgcgcatcgaccccagtagcctgtccttcaacatgtggaaggagatccctatccccttctatctctccgtctacttctttgacgtcatgaaccccagcgagatcctgaagggcgagaagccgcaggtgcgggagcgcgggccctacgtgtacagggagttcaggcacaaaagcaacatcaccttcaacaacaacgacaccgtgtccttcctcgagtaccgcaccttccagttccagccctccaagtcccacggctcggagagcgactacatcgtcatgcccaacatcctggtcttgggtgcggcggtgatgatggagaataagcccatgaccctgaagctcatcatgaccttggcattcaccaccctcggcgaacgtgccttcatgaaccgcactgtgggtgagatcatgtggggctacaaggacccccttgtgaatctcatcaacaagtactttccaggcatgttccccttcaaggacaagttcggattatttgctgagctcaacaactccgactctgggctcttcacggtgttcacgggggtccagaacatcagcaggatccacctcgtggacaagtggaacgggctgagcaaggttgacttctggcattccgatcagtgcaacatgatcaatggaacttctgggcaaatgtggccgcccttcatgactcctgagtcctcgctggagttctacagcccggaggcctgccgatccatgaagctaatgtacaaggagtcaggggtgtttgaaggcatccccacctatcgcttcgtggctcccaaaaccctgtttgccaacgggtccatctacccacccaacgaaggcttctgcccgtgcctggagtctggaattcagaacgtcagcacctgcaggttcagtgcccccttgtttctctcccatcctcacttcctcaacgctgacccggttctggcagaagcggtgactggcctgcaccctaaccaggaggcacactccttgttcctggacatccacccggtcacgggaatccccatgaactgctctgtgaaactgcagctgagcctctacatgaaatctgtcgcaggcattggacaaactgggaagattgagcctgtggtcctgccgctgctctggtttgcagagagcggggccatggagggggagactcttcacacattctacactcagctggtgttgatgcccaaggtgatgcactatgcccagtacgtcctcctggcgctgggctgcgtcctgctgctggtccctgtcatctgccaaatccggagccaaggtcctgaggacaccgtgagccagccaggcctggccgctgggcctgaccggccccccagcccctacaccccgcttctcccggactctcccagcggacagccccccagccccacagcctga

SEQ ID NO: 233 - DNA, 2166 bp, Homo sapiens
atgtcgggatccacacagcctgtggcacagacgtggagggccactgagccccgctacccgccccacagcctttcctacccagtgcagatcgcccggacgcacacggacgtcgggctcctggagtaccagcaccactcccgcgactatgcctcccacctgtcgcccggctccatcatccagccccagcggcggaggccctccctgctgtctgagttccagcccgggaatgaacggtcccaggagctccacctgcggccagagtcccactcatacctgcccgagctggggaagtcagagatggagttcattgaaagcaagcgccctcggctagagctgctgcctgaccccctgctgcgaccgtcacccctgctggccacgggccagcctgcgggatctgaagacctcaccaaggaccgtagcctgacgggcaagctggaaccggtgtctccccccagccccccgcacactgaccctgagctggagctggtgccgccacggctgtccaaggaggagctgatccagaacatggaccgcgtggaccgagagatcaccatggtagagcagcagatctctaagctgaagaagaagcagcaacagctggaggaggaggctgccaagccgcccgagcctgagaagcccgtgtcaccgccgcccatcgagtcgaagcaccgcagcctggtgcagatcatctacgacgagaaccggaagaaggctgaagctgcacatcggattctggaaggcctggggccccaggtggagctgaacgtgcgcatcgaccccagtagcctgtccttcaacatgtggaaggagatccctatccccttctatctctccgtctacttctttgacgtcatgaaccccagcgagatcctgaagggcgagaagccgcaggtgcgggagcgcgggccctacgtgtacagggagttcaggcacaaaagcaacatcaccttcaacaacaacgacaccgtgtccttcctcgagtaccgcaccttccagttccagccctccaagtcccacggctcggagagcgactacatcgtcatgcccaacatcctggtcttgggtgcggcggtgatgatggagaataagcccatgaccctgaagctcatcatgaccttggcattcaccaccctcggcgaacgtgccttcatgaaccgcactgtgggtgagatcatgtggggctacaaggacccccttgtgaatctcatcaacaagtactttccaggcatgttccccttcaaggacaagttcggattatttgctgagctcaacaactccgactctgggctcttcacggtgttcacgggggtccagaacatcagcaggatccacctcgtggacaagtggaacgggctgagcaaggttgacttctggcattccgatcagtgcaacatgatcaatggaacttctgggcaaatgtggccgcccttcatgactcctgagtcctcgctggagttctacagcccggaggcctgccgatccatgaagctaatgtacaaggagtcaggggtgtttgaaggcatccccacctatcgcttcgtggctcccaaaaccctgtttgccaacgggtccatctacccacccaacgaaggcttctgcccgtgcctggagtctggaattcagaacgtcagcacctgcaggttcagtgcccccttgtttctctcccatcctcacttcctcaacgctgacccggttctggcagaagcggtgactggcctgcaccctaaccaggaggcacactccttgttcctggacatccacccggtcacgggaatccccatgaactgctctgtgaaactgcagctgagcctctacatgaaatctgtcgcaggcattggacaaactgggaagattgagcctgtggtcctgccgctgctctggtttgcagagagcggggccatggagggggagactcttcacacattctacactcagctggtgttgatgcccaaggtgatgcactatgcccagtacgtcctcctggcgctgggctgcgtcctgctgctggtccctgtcatctgccaaatccggagccaagagaaatgctatttattttggagtagtagtaaaaagggctcaaaggataaggaggccattcaggcctattctgaatccctgatgacatcagctcccaagggctctgtgctgcaggaagcaaaactgtag

SEQ ID NO: 234 - DNA, 1884 bp, Homo sapiens
atgtcgggatccacacagcctgtggcacagacgtggagggccactgagccccgctacccgccccacagcctttcctacccagtgcagatcgcccggacgcacacggacgtcgggctcctggagtaccagcaccactcccgcgactatgcctcccacctgtcgcccggctccatcatccagccccagcggcggaggccctccctgctgtctgagttccagcccgggaatgaacggtcccaggagctccacctgcggccagagtcccactcatacctgcccgagctggggaagtcagagatggagttcattgaaagcaagcgccctcggctagagctgctgcctgaccccctgctgcgaccgtcacccctgctggccacgggccagcctgcgggatctgaagacctcaccaaggaccgtagcctgacgggcaagctggaaccggtgtctccccccagccccccgcacactgaccctgagctggagctggtgccgccacggctgtccaaggaggagctgatccagaacatggaccgcgtggaccgagagatcaccatggtagagcagcagatctctaagctgaagaagaagcagcaacagctggaggaggaggctgccaagccgcccgagcctgagaagcccgtgtcaccgccgcccatcgagtcgaagcaccgcagcctggtgcagatcatctacgacgagaaccggaagaaggctgaagctgcacatcggattctggaaggcctggggccccaggtggagctgccgctgtacaaccagccctccgacacccggcagtatcatgagaacatcaaaataaaccaggcgatgcggaagaagctaatcttgtacttcaagaggaggaatcacgctcggaaacaatgggagcagaagttctgccagcgctatgaccagctcatggaggcctgggagaagaaggtggagcgcatcgagaacaacccccggcggcgggccaaggagagcaaggtgcgcgagtactacgagaagcagttccctgagatccgcaagcagcgcgagctgcaggagcgcatgcagagcagggtgggccagcggggcagtgggctgtccatgtcggccgcccgcagcgagcacgaggtgtcagagatcatcgatggcctctcagagcaggagaacctggagaagcagatgcgccagctggccgtgatcccgcccatgctgtacgacgctgaccagcagcgcatcaagttcatcaacatgaacgggcttatggccgaccccatgaaggtgtacaaagaccgccaggtcatgaacatgtggagtgagcaggagaaggagaccttccgggagaagttcatgcagcatcccaagaactttggcctgatcgcatcattcctggagaggaagacagtggctgagtgcgtcctctattactacctgactaagaagaatgagaactataagagcctggtgagacggagctatcggcgccgcggcaagagccagcagcagcaacaacagcagcagcagcagcagcagcagcagcagcagcagcccatgccccgcagcagccaggaggagaaagatgagaaggagaaggaaaaggaggcggagaaggaggaggagaagccggaggtggagaacgacaaggaagacctcctcaaggagaagacagacgacacctcaggggaggacaacgacgagaaggaggctgtggcctccaaaggccgcaaaactgccaacagccagggaagacgcaaaggccgcatcacccgctcaatggctaatgaggccaacagcgaggaggccatcaccccccagcagagcgccgagctggcctccatggagctgaatgagagttctcgctggacagaagaagaaatggaaacagccaagaaagggtcctga

SEQ ID NO: 235 - DNA, 2877 bp, Homo sapiens
atgtcgggatccacacagcctgtggcacagacgtggagggccactgagccccgctacccgccccacagcctttcctacccagtgcagatcgcccggacgcacacggacgtcgggctcctggagtaccagcaccactcccgcgactatgcctcccacctgtcgcccggctccatcatccagccccagcggcggaggccctccctgctgtctgagttccagcccgggaatgaacggtcccaggagctccacctgcggccagagtcccactcatacctgcccgagctggggaagtcagagatggagttcattgaaagcaagcgccctcggctagagctgctgcctgaccccctgctgcgaccgtcacccctgctggccacgggccagcctgcgggatctgaagacctcaccaaggaccgtagcctgacgggcaagctggaaccggtgtctccccccagccccccgcacactgaccctgagctggagctggtgccgccacggctgtccaaggaggagctgatccagaacatggaccgcgtggaccgagagatcaccatggtagagcagcagatctctaagctgaagaagaagcagcaacagctggaggaggaggctgccaagccgcccgagcctgagaagcccgtgtcaccgccgcccatcgagtcgaagcaccgcagcctggtgcagatcatctacgacgagaaccggaagaaggctgaagctgcacatcggattctggaaggcctggggccccaggtggagctgccgctgtacaaccagccctccgacacccggcagtatcatgagaacatcaaaataaaccaggcgatgcggaagaagctaatcttgtacttcaagaggaggaatcacgctcggaaacaatgggagcagaagttctgccagcgctatgaccagctcatggaggcctgggagaagaaggtggagcgcatcgagaacaacccccggcggcgggccaaggagagcaaggtgcgcgagtactacgagaagcagttccctgagatccgcaagcagcgcgagctgcaggagcgcatgcagagcagggtgggccagcggggcagtgggctgtccatgtcggccgcccgcagcgagcacgaggtgtcagagatcatcgatggcctctcagagcaggagaacctggagaagcagatgcgccagctggccgtgatcccgcccatgctgtacgacgctgaccagcagcgcatcaagttcatcaacatgaacgggcttatggccgaccccatgaaggtgtacaaagaccgccaggtcatgaacatgtggagtgagcaggagaaggagaccttccgggagaagttcatgcagcatcccaagaactttggcctgatcgcatcattcctggagaggaagacagtggctgagtgcgtcctctattactacctgactaagaagaatgagaactataagagcctggtgagacggagctatcggcgccgcggcaagagccagaacgtgcgcatcgaccccagtagcctgtccttcaacatgtggaaggagatccctatccccttctatctctccgtctacttctttgacgtcatgaaccccagcgagatcctgaagggcgagaagccgcaggtgcgggagcgcgggccctacgtgtacagggagttcaggcacaaaagcaacatcaccttcaacaacaacgacaccgtgtccttcctcgagtaccgcaccttccagttccagccctccaagtcccacggctcggagagcgactacatcgtcatgcccaacatcctggtcttgggtgcggcggtgatgatggagaataagcccatgaccctgaagctcatcatgaccttggcattcaccaccctcggcgaacgtgccttcatgaaccgcactgtgggtgagatcatgtggggctacaaggacccccttgtgaatctcatcaacaagtactttccaggcatgttccccttcaaggacaagttcggattatttgctgagctcaacaactccgactctgggctcttcacggtgttcacgggggtccagaacatcagcaggatccacctcgtggacaagtggaacgggctgagcaaggttgacttctggcattccgatcagtgcaacatgatcaatggaacttctgggcaaatgtggccgcccttcatgactcctgagtcctcgctggagttctacagcccggaggcctgccgatccatgaagctaatgtacaaggagtcaggggtgtttgaaggcatccccacctatcgcttcgtggctcccaaaaccctgtttgccaacgggtccatctacccacccaacgaaggcttctgcccgtgcctggagtctggaattcagaacgtcagcacctgcaggttcagtgcccccttgtttctctcccatcctcacttcctcaacgctgacccggttctggcagaagcggtgactggcctgcaccctaaccaggaggcacactccttgttcctggacatccacccggtcacgggaatccccatgaactgctctgtgaaactgcagctgagcctctacatgaaatctgtcgcaggcattggacaaactgggaagattgagcctgtggtcctgccgctgctctggtttgcagagagcggggccatggagggggagactcttcacacattctacactcagctggtgttgatgcccaaggtgatgcactatgcccagtacgtcctcctggcgctgggctgcgtcctgctgctggtccctgtcatctgccaaatccggagccaaggtcctgaggacaccgtgagccagccaggcctggccgctgggcctgaccggccccccagcccctacaccccgcttctcccggactctcccagcggacagccccccagccccacagcctga

SEQ ID NO: 236 - DNA, 2886 bp, Homo sapiens
atgtcgggatccacacagcctgtggcacagacgtggagggccactgagccccgctacccgccccacagcctttcctacccagtgcagatcgcccggacgcacacggacgtcgggctcctggagtaccagcaccactcccgcgactatgcctcccacctgtcgcccggctccatcatccagccccagcggcggaggccctccctgctgtctgagttccagcccgggaatgaacggtcccaggagctccacctgcggccagagtcccactcatacctgcccgagctggggaagtcagagatggagttcattgaaagcaagcgccctcggctagagctgctgcctgaccccctgctgcgaccgtcacccctgctggccacgggccagcctgcgggatctgaagacctcaccaaggaccgtagcctgacgggcaagctggaaccggtgtctccccccagccccccgcacactgaccctgagctggagctggtgccgccacggctgtccaaggaggagctgatccagaacatggaccgcgtggaccgagagatcaccatggtagagcagcagatctctaagctgaagaagaagcagcaacagctggaggaggaggctgccaagccgcccgagcctgagaagcccgtgtcaccgccgcccatcgagtcgaagcaccgcagcctggtgcagatcatctacgacgagaaccggaagaaggctgaagctgcacatcggattctggaaggcctggggccccaggtggagctgccgctgtacaaccagccctccgacacccggcagtatcatgagaacatcaaaataaaccaggcgatgcggaagaagctaatcttgtacttcaagaggaggaatcacgctcggaaacaatgggagcagaagttctgccagcgctatgaccagctcatggaggcctgggagaagaaggtggagcgcatcgagaacaacccccggcggcgggccaaggagagcaaggtgcgcgagtactacgagaagcagttccctgagatccgcaagcagcgcgagctgcaggagcgcatgcagagcagggtgggccagcggggcagtgggctgtccatgtcggccgcccgcagcgagcacgaggtgtcagagatcatcgatggcctctcagagcaggagaacctggagaagcagatgcgccagctggccgtgatcccgcccatgctgtacgacgctgaccagcagcgcatcaagttcatcaacatgaacgggcttatggccgaccccatgaaggtgtacaaagaccgccaggtcatgaacatgtggagtgagcaggagaaggagaccttccgggagaagttcatgcagcatcccaagaactttggcctgatcgcatcattcctggagaggaagacagtggctgagtgcgtcctctattactacctgactaagaagaatgagaactataagagcctggtgagacggagctatcggcgccgcggcaagagccagaacgtgcgcatcgaccccagtagcctgtccttcaacatgtggaaggagatccctatccccttctatctctccgtctacttctttgacgtcatgaaccccagcgagatcctgaagggcgagaagccgcaggtgcgggagcgcgggccctacgtgtacagggagttcaggcacaaaagcaacatcaccttcaacaacaacgacaccgtgtccttcctcgagtaccgcaccttccagttccagccctccaagtcccacggctcggagagcgactacatcgtcatgcccaacatcctggtcttgggtgcggcggtgatgatggagaataagcccatgaccctgaagctcatcatgaccttggcattcaccaccctcggcgaacgtgccttcatgaaccgcactgtgggtgagatcatgtggggctacaaggacccccttgtgaatctcatcaacaagtactttccaggcatgttccccttcaaggacaagttcggattatttgctgagctcaacaactccgactctgggctcttcacggtgttcacgggggtccagaacatcagcaggatccacctcgtggacaagtggaacgggctgagcaaggttgacttctggcattccgatcagtgcaacatgatcaatggaacttctgggcaaatgtggccgcccttcatgactcctgagtcctcgctggagttctacagcccggaggcctgccgatccatgaagctaatgtacaaggagtcaggggtgtttgaaggcatccccacctatcgcttcgtggctcccaaaaccctgtttgccaacgggtccatctacccacccaacgaaggcttctgcccgtgcctggagtctggaattcagaacgtcagcacctgcaggttcagtgcccccttgtttctctcccatcctcacttcctcaacgctgacccggttctggcagaagcggtgactggcctgcaccctaaccaggaggcacactccttgttcctggacatccacccggtcacgggaatccccatgaactgctctgtgaaactgcagctgagcctctacatgaaatctgtcgcaggcattggacaaactgggaagattgagcctgtggtcctgccgctgctctggtttgcagagagcggggccatggagggggagactcttcacacattctacactcagctggtgttgatgcccaaggtgatgcactatgcccagtacgtcctcctggcgctgggctgcgtcctgctgctggtccctgtcatctgccaaatccggagccaagagaaatgctatttattttggagtagtagtaaaaagggctcaaaggataaggaggccattcaggcctattctgaatccctgatgacatcagctcccaagggctctgtgctgcaggaagcaaaactgtag

SEQ ID NO: 237 - DNA, 531 bp, Homo sapiens
atgtcgggatccacacagcctgtggcacagacgtggagggccactgagccccgctacccgccccacagcctttcctacccagtgcagatcgcccggacgcacacggacgtcgggctcctggagtaccagcaccactcccgcgactatgcctcccacctgtcgcccggctccatcatccagccccagcggcggaggccctccctgctgtctgagttccagcccgggaatgaacggtcccaggagctccacctgcggccagagtcccactcatacctgcccgagctggggaagtcagagatggagttcattgaaagcaagcgccctcggctagagctgctgcctgaccccctgctgcgaccgtcacccctgctggccacgggccagcctgcgggatctgaagacctcaccaagggtcctgaggacaccgtgagccagccaggcctggccgctgggcctgaccggccccccagcccctacaccccgcttctcccggactctcccagcggacagccccccagccccacagcctga

SEQ ID NO: 238 - DNA, 1881 bp, Homo sapiens
atgtcgggatccacacagcctgtggcacagacgtggagggccactgagccccgctacccgccccacagcctttcctacccagtgcagatcgcccggacgcacacggacgtcgggctcctggagtaccagcaccactcccgcgactatgcctcccacctgtcgcccggctccatcatccagccccagcggcggaggccctccctgctgtctgagttccagcccgggaatgaacggtcccaggagctccacctgcggccagagtcccactcatacctgcccgagctggggaagtcagagatggagttcattgaaagcaagcgccctcggctagagctgctgcctgaccccctgctgcgaccgtcacccctgctggccacgggccagcctgcgggatctgaagacctcaccaaggaccgtagcctgacgggcaagctggaaccggtgtctccccccagccccccgcacactgaccctgagctggagctggtgccgccacggctgtccaaggaggagctgatccagaacatggaccgcgtggaccgagagatcaccatggtagagcagcagatctctaagctgaagaagaagcagcaacagctggaggaggaggctgccaagccgcccgagcctgagaagcccgtgtcaccgccgcccatcgagtcgaagcaccgcagcctggtgcagatcatctacgacgagaaccggaagaaggctgaagctgcacatcggattctggaaggcctggggccccaggtggagctgccgctgtacaaccagccctccgacacccggcagtatcatgagaacatcaaaataaaccaggcgatgcggaagaagctaatcttgtacttcaagaggaggaatcacgctcggaaacaatgggagcagaagttctgccagcgctatgaccagctcatggaggcctgggagaagaaggtggagcgcatcgagaacaacccccggcggcgggccaaggagagcaaggtgcgcgagtactacgagaagcagttccctgagatccgcaagcagcgcgagctgcaggagcgcatgcagagggtgggccagcggggcagtgggctgtccatgtcggccgcccgcagcgagcacgaggtgtcagagatcatcgatggcctctcagagcaggagaacctggagaagcagatgcgccagctggccgtgatcccgcccatgctgtacgacgctgaccagcagcgcatcaagttcatcaacatgaacgggcttatggccgaccccatgaaggtgtacaaagaccgccaggtcatgaacatgtggagtgagcaggagaaggagaccttccgggagaagttcatgcagcatcccaagaactttggcctgatcgcatcattcctggagaggaagacagtggctgagtgcgtcctctattactacctgactaagaagaatgagaactataagagcctggtgagacggagctatcggcgccgcggcaagagccagcagcagcaacaacagcagcagcagcagcagcagcagcagcagcagcagcccatgccccgcagcagccaggaggagaaagatgagaaggagaaggaaaaggaggcggagaaggaggaggagaagccggaggtggagaacgacaaggaagacctcctcaaggagaagacagacgacacctcaggggaggacaacgacgagaaggaggctgtggcctccaaaggccgcaaaactgccaacagccagggaagacgcaaaggccgcatcacccgctcaatggctaatgaggccaacagcgaggaggccatcaccccccagcagagcgccgagctggcctccatggagctgaatgagagttctcgctggacagaagaagaaatggaaacagccaagaaagggtcctga

SEQ ID NO: 239 - DNA, 2802 bp, Homo sapiens
atgtcgggatccacacagcctgtggcacagacgtggagggccactgagccccgctacccgccccacagcctttcctacccagtgcagatcgcccggacgcacacggacgtcgggctcctggagtaccagcaccactcccgcgactatgcctcccacctgtcgcccggctccatcatccagccccagcggcggaggccctccctgctgtctgagttccagcccgggaatgaacggtcccaggagctccacctgcggccagagtcccactcatacctgcccgagctggggaagtcagagatggagttcattgaaagcaagcgccctcggctagagctgctgcctgaccccctgctgcgaccgtcacccctgctggccacgggccagcctgcgggatctgaagacctcaccaaggaccgtagcctgacgggcaagctggaaccggtgtctccccccagccccccgcacactgaccctgagctggagctggtgccgccacggctgtccaaggaggagctgatccagaacatggaccgcgtggaccgagagatcaccatggtagagcagcagatctctaagctgaagaagaagcagcaacagctggaggaggaggctgccaagccgcccgagcctgagaagcccgtgtcaccgccgcccatcgagtcgaagcaccgcagcctggtgcagatcatctacgacgagaaccggaagaaggctgaagctgcacatcggattctggaaggcctggggccccaggtggagctgccgctgtacaaccagccctccgacacccggcagtatcatgagaacatcaaaataaaccaggcgatgcggaagaagctaatcttgtacttcaagaggaggaatcacgctcggaaacaatgggagcagaagttctgccagcgctatgaccagctcatggaggcctgggagaagaaggtggagcgcatcgagaacaacccccggcggcgggccaaggagagcaaggtgcgcgagtactacgagaagcagttccctgagatccgcaagcagcgcgagctgcaggagcgcatgcagagcagggtgggccagcggggcagtgggctgtccatgtcggccgcccgcagcgagcacgaggtgtcagagatcatcgatggcctctcagagcaggagaacctggagaagcagatgcgccagctggccgtgatcccgcccatgctgtacgacgctgaccagcagcgcatcaagttcatcaacatgaacgggcttatggccgaccccatgaaggtgtacaaagaccgccaggtcatgaacatgtggagtgagcaggagaaggagaccttccgggagaagttcatgcagcatcccaagaactttggcctgatcgcatcattcctggagaggaagacagtggctgagtgcgtcctctattactacctgactaagaagaatgagaactataagagcctggtgagacggagctatcggcgccgcggcaagagccagaacgtgcgcatcgaccccagtagcctgtccttcaacatgtggaaggagatccctatccccttctatctctccgtctacttctttgacgtcatgaaccccagcgagatcctgaagggcgagaagccgcaggtgcgggagcgcgggccctacgtgtacagggagttcaggcacaaaagcaacatcaccttcaacaacaacgacaccgtgtccttcctcgagtaccgcaccttccagttccagccctccaagtcccacggctcggagagcgactacatcgtcatgcccaacatcctggtcttgggtgcggcggtgatgatggagaataagcccatgaccctgaagctcatcatgaccttggcattcaccaccctcggcgaacgtgccttcatgaaccgcactgtgggtgagatcatgtggggctacaaggacccccttgtgaatctcatcaacaagtactttccaggcatgttccccttcaaggacaagttcggattatttgctgagctcaacaactccgactctgggctcttcacggtgttcacgggggtccagaacatcagcaggatccacctcgtggacaagtggaacgggctgagcaaggttgacttctggcattccgatcagtgcaacatgatcaatggaacttctgggcaaatgtggccgcccttcatgactcctgagtcctcgctggagttctacagcccggaggcctgccgatccatgaagctaatgtacaaggagtcaggggtgtttgaaggcatccccacctatcgcttcgtggctcccaaaaccctgtttgccaacgggtccatctacccacccaacgaaggcttctgcccgtgcctggagtctggaattcagaacgtcagcacctgcaggttcagtgcccccttgtttctctcccatcctcacttcctcaacgctgacccggttctggcagaagcggtgactggcctgcaccctaaccaggaggcacactccttgttcctggacatccacccggtcacgggaatccccatgaactgctctgtgaaactgcagctgagcctctacatgaaatctgtcgcaggcattggacaaactgggaagattgagcctgtggtcctgccgctgctctggtttgcagagagcggggccatggagggggagactcttcacacattctacactcagctggtgttgatgcccaaggagaaatgctatttattttggagtagtagtaaaaagggctcaaaggataaggaggccattcaggcctattctgaatccctgatgacatcagctcccaagggctctgtgctgcaggaagcaaaactgtag

SEQ ID NO: 240 - DNA, 1977 bp, Homo sapiens
atgtcgggatccacacagcctgtggcacagacgtggagggccactgagccccgctacccgccccacagcctttcctacccagtgcagatcgcccggacgcacacggacgtcgggctcctggagtaccagcaccactcccgcgactatgcctcccacctgtcgcccggctccatcatccagccccagcggcggaggccctccctgctgtctgagttccagcccgggaatgaacggtcccaggagctccacctgcggccagagtcccactcatacctgcccgagctggggaagtcagagatggagttcattgaaagcaagcgccctcggctagagctgctgcctgaccccctgctgcgaccgtcacccctgctggccacgggccagcctgcgggatctgaagacctcaccaaggaccgtagcctgacgggcaagctggaaccggtgtctccccccagccccccgcacactgaccctgagctggagctggtgccgccacggctgtccaaggaggagctgatccagaacatggaccgcgtggaccgagagatcaccatggtagagcagcagatctctaagctgaagaagaagcagcaacagctggaggaggaggctgccaagccgcccgagcctgagaagcccgtgtcaccgccgcccatcgagtcgaagcaccgcagcctggtgcagatcatctacgacgagaaccggaagaaggctgaagctgcacatcggattctggaaggcctggggccccaggtggagctgccgctgtacaaccagccctccgacacccggcagtatcatgagaacatcaaaatggagttcaggcacaaaagcaacatcaccttcaacaacaacgacaccgtgtccttcctcgagtaccgcaccttccagttccagccctccaagtcccacggctcggagagcgactacatcgtcatgcccaacatcctggtcttgggtgcggcggtgatgatggagaataagcccatgaccctgaagctcatcatgaccttggcattcaccaccctcggcgaacgtgccttcatgaaccgcactgtgggtgagatcatgtggggctacaaggacccccttgtgaatctcatcaacaagtactttccaggcatgttccccttcaaggacaagttcggattatttgctgagctcaacaactccgactctgggctcttcacggtgttcacgggggtccagaacatcagcaggatccacctcgtggacaagtggaacgggctgagcaaggttgacttctggcattccgatcagtgcaacatgatcaatggaacttctgggcaaatgtggccgcccttcatgactcctgagtcctcgctggagttctacagcccggaggcctgccgatccatgaagctaatgtacaaggagtcaggggtgtttgaaggcatccccacctatcgcttcgtggctcccaaaaccctgtttgccaacgggtccatctacccacccaacgaaggcttctgcccgtgcctggagtctggaattcagaacgtcagcacctgcaggttcagtgcccccttgtttctctcccatcctcacttcctcaacgctgacccggttctggcagaagcggtgactggcctgcaccctaaccaggaggcacactccttgttcctggacatccacccggtcacgggaatccccatgaactgctctgtgaaactgcagctgagcctctacatgaaatctgtcgcaggcattggacaaactgggaagattgagcctgtggtcctgccgctgctctggtttgcagagagcggggccatggagggggagactcttcacacattctacactcagctggtgttgatgcccaaggagaaatgctatttattttggagtagtagtaaaaagggctcaaaggataaggaggccattcaggcctattctgaatccctgatgacatcagctcccaagggctctgtgctgcaggaagcaaaactgtag

SEQ ID NO: 241 - DNA, 411 bp, Homo sapiens
atgtcgggatccacacagcctgtggcacagacgtggagggccactgagccccgctacccgccccacagcctttcctacccagtgcagatcgcccggacgcacacggacgtcgggctcctggagtaccagcaccactcccgcgactatgcctcccacctgtcgcccggctccatcatccagccccagcggcggaggccctccctgctgtctgagttccagcccgggaatgaacggtcccaggagctccacctgcggccagagtcccactcatacctgcccgagctggggaagtcagagatggagttcattgaaagcaagcgccctcggctagagctgctgcctgaccccctgctgcgaccgtcacccctgctggccacgggccagcctgcgggatctgaagacctcaccaag

SEQ ID NO: 242 - DNA, 2025 bp, Homo sapiens
atgtcgggatccacacagcctgtggcacagacgtggagggccactgagccccgctacccgccccacagcctttcctacccagtgcagatcgcccggacgcacacggacgtcgggctcctggagtaccagcaccactcccgcgactatgcctcccacctgtcgcccggctccatcatccagccccagcggcggaggccctccctgctgtctgagttccagcccgggaatgaacggtcccaggagctccacctgcggccagagtcccactcatacctgcccgagctggggaagtcagagatggagttcattgaaagcaagcgccctcggctagagctgctgcctgaccccctgctgcgaccgtcacccctgctggccacgggccagcctgcgggatctgaagacctcaccaaggaccgtagcctgacgggcaagctggaaccggtgtctccccccagccccccgcacactgaccctgagctggagctggtgccgccacggctgtccaaggaggagctgatccagaacatggaccgcgtggaccgagagatcaccatggtagagcagcagatctctaagctgaagaagaagcagcaacagctggaggaggaggctgccaagccgcccgagcctgagaagcccgtgtcaccgccgcccatcgagtcgaagcaccgcagcctggtgcagatcatctacgacgagaaccggaacgtgcgcatcgaccccagtagcctgtccttcaacatgtggaaggagatccctatccccttctatctctccgtctacttctttgacgtcatgaaccccagcgagatcctgaagggcgagaagccgcaggtgcgggagcgcgggccctacgtgtacagggagttcaggcacaaaagcaacatcaccttcaacaacaacgacaccgtgtccttcctcgagtaccgcaccttccagttccagccctccaagtcccacggctcggagagcgactacatcgtcatgcccaacatcctggtcttgggtgcggcggtgatgatggagaataagcccatgaccctgaagctcatcatgaccttggcattcaccaccctcggcgaacgtgccttcatgaaccgcactgtgggtgagatcatgtggggctacaaggacccccttgtgaatctcatcaacaagtactttccaggcatgttccccttcaaggacaagttcggattatttgctgagctcaacaactccgactctgggctcttcacggtgttcacgggggtccagaacatcagcaggatccacctcgtggacaagtggaacgggctgagcaaggttgacttctggcattccgatcagtgcaacatgatcaatggaacttctgggcaaatgtggccgcccttcatgactcctgagtcctcgctggagttctacagcccggaggcctgccgatccatgaagctaatgtacaaggagtcaggggtgtttgaaggcatccccacctatcgcttcgtggctcccaaaaccctgtttgccaacgggtccatctacccacccaacgaaggcttctgcccgtgcctggagtctggaattcagaacgtcagcacctgcaggttcagtgcccccttgtttctctcccatcctcacttcctcaacgctgacccggttctggcagaagcggtgactggcctgcaccctaaccaggaggcacactccttgttcctggacatccacccggtcacgggaatccccatgaactgctctgtgaaactgcagctgagcctctacatgaaatctgtcgcaggcattggacaaactgggaagattgagcctgtggtcctgccgctgctctggtttgcagagagcggggccatggagggggagactcttcacacattctacactcagctggtgttgatgcccaaggagaaatgctatttattttggagtagtagtaaaaagggctcaaaggataaggaggccattcaggcctattctgaatccctgatgacatcagctcccaagggctctgtgctgcaggaagcaaaactgtag

SEQ ID NO: 243 - DNA, 2052 bp, Homo sapiens
atgtcgggatccacacagcctgtggcacagacgtggagggccactgagccccgctacccgccccacagcctttcctacccagtgcagatcgcccggacgcacacggacgtcgggctcctggagtaccagcaccactcccgcgactatgcctcccacctgtcgcccggctccatcatccagccccagcggcggaggccctccctgctgtctgagttccagcccgggaatgaacggtcccaggagctccacctgcggccagagtcccactcatacctgcccgagctggggaagtcagagatggagttcattgaaagcaagcgccctcggctagagctgctgcctgaccccctgctgcgaccgtcacccctgctggccacgggccagcctgcgggatctgaagacctcaccaaggaccgtagcctgacgggcaagctggaaccggtgtctccccccagccccccgcacactgaccctgagctggagctggtgccgccacggctgtccaaggaggagctgatccagaacatggaccgcgtggaccgagagatcaccatggtagagcagcagatctctaagctgaagaagaagcagcaacagctggaggaggaggctgccaagccgcccgagcctgagaagcccgtgtcaccgccgcccatcgagtcgaagcaccgcagcctggtgcagatcatctacgacgagaaccggaagaaggctgaagctgcacatcggattctggaaggcctggggccccaggtggagctgccgctgtacaaccagccctccgacacccggcagtatcatgagaacatcaaaatggagttcaggcacaaaagcaacatcaccttcaacaacaacgacaccgtgtccttcctcgagtaccgcaccttccagttccagccctccaagtcccacggctcggagagcgactacatcgtcatgcccaacatcctggtcttgggtgcggcggtgatgatggagaataagcccatgaccctgaagctcatcatgaccttggcattcaccaccctcggcgaacgtgccttcatgaaccgcactgtgggtgagatcatgtggggctacaaggacccccttgtgaatctcatcaacaagtactttccaggcatgttccccttcaaggacaagttcggattatttgctgagctcaacaactccgactctgggctcttcacggtgttcacgggggtccagaacatcagcaggatccacctcgtggacaagtggaacgggctgagcaaggttgacttctggcattccgatcagtgcaacatgatcaatggaacttctgggcaaatgtggccgcccttcatgactcctgagtcctcgctggagttctacagcccggaggcctgccgatccatgaagctaatgtacaaggagtcaggggtgtttgaaggcatccccacctatcgcttcgtggctcccaaaaccctgtttgccaacgggtccatctacccacccaacgaaggcttctgcccgtgcctggagtctggaattcagaacgtcagcacctgcaggttcagtgcccccttgtttctctcccatcctcacttcctcaacgctgacccggttctggcagaagcggtgactggcctgcaccctaaccaggaggcacactccttgttcctggacatccacccggtcacgggaatccccatgaactgctctgtgaaactgcagctgagcctctacatgaaatctgtcgcaggcattggacaaactgggaagattgagcctgtggtcctgccgctgctctggtttgcagagagcggggccatggagggggagactcttcacacattctacactcagctggtgttgatgcccaaggtgatgcactatgcccagtacgtcctcctggcgctgggctgcgtcctgctgctggtccctgtcatctgccaaatccggagccaaggtcctgaggacaccgtgagccagccaggcctggccgctgggcctgaccggccccccagcccctacaccccgcttctcccggactctcccagcggacagccccccagccccacagcctga

SEQ ID NO: 244 - DNA, 165 bp, Homo sapiens
atgaattcggtagctgggaataaagagaggcttgcggtctccaccaggggcaagaaatacggggcttttgatattatgagagtgacacatggcagagaacacagcctgattgaagatttgattctacttttagaagaatgcgacgccaacatcagagcatcctaa

SEQ ID NO: 245 - DNA, 4779 bp, Homo sapiens
atgatggattggaaagcagtagctgcccagaagttaaatctgtcttctaaaaagaagaaacatcggccttccacttcttccgctgccgaaccaccgctctttgcaaccagcttcagtgggattctgcagacctcccctcccccagccccaccctgcctgctgagggctgtcaacaaggtgaaggacaccccggggctgggcaaggtgaaagtcatgcttcgcatctgttccaccttggctcgagatacttcagaatccagctctttcttaaaggtggacccacggaagaagcagatcaccttgtacgatcccctgacttgtggaggtcaaaatgccttccaaaagagaggcaaccaggttcctccaaagatgtttgccttcgatgcagtttttccacaagacgcttctcaggctgaagtgtgtgcaggcaccgtggcagaggtgatccagtctgtggtcaacggggcagatggctgcgtgttctgtttcggccacgccaaactgggaaaatcctacaccatgatcggaaaggatgattccatgcagaacctgggcatcattccctgtgccatctcttggctcttcaagctcataaacgaacgcaaggaaaagaccggcgcccgtttctcagtccgggtttccgccgtggaagtgtgggggaaggaggagaacctgcgggacctgctgtcggaggtggccacgggcagcctgcaggacggccagtccccgggcgtgtacctctgtgaggaccccatctgcggcacgcagctgcagaaccagagcgagctgcgggcccccaccgcagagaaggctgcctttttcctggatgccgccattgcctcccgcaggagccaccaacaggactgtgatgaggacgaccaccgcaactcacacgtgttcttcacactgcacatctaccagtaccggatggagaagagcgggaaagggggaatgtctggaggtcgcagccgcctgcatctcattgatctcggcagctgtgtgaaagctcttagcaaaaatcgagaaggaggctcagggctgtgtctctcgctgtctgctctgggcaatgtcatcctggctctcgtcaatggcagcaaacacattccatacaaagagagcaagctcgccatgttgctgcgggagtctctggggaacatgaactgccgtaccaccatgatcgcgcacatctcggccgcggtcgggagctacgcggagaccctgtccaccatccagattgcatcgagagtcttgaggatgaagaaaaagaagacgaagtacacatccagctcgtccggcggggagagctcctgcgaagaaggccgcatgcgcaggcccacccagctgagacccttccacaccagggccacggtggaccctgacttccccatcgctcacctgtccagcgaccccgactactcctccagcagcgagcagtcctgcgacaccgtcatctacatcgggcccaacggcacggccctctctgacaaggagctcaccgacaacgagggccccccagactttgtccctatcgtgccagccctgcagaagacccggggcgacagccggcccgcagaggcaggagaggctgcagccggcaagtcagaaagggactgcctgaagtgcaacacgtttgccgagctgcaggagaggctggactgcatcgacggcagcgaggagcccagcagctttcctttcgaagaactgcctgctcagtttgggccagagcaggcaagcagaggcccccggttaagccaagcagcgggggcaagcccactctctgagtctgataaggaagataatgggtccgaaggtcagctgaccaacagagaaggccctgaactcccagcctccaagatgcagaggagtcactcacctgtgcccgccgcggcacccgcccacagccccagcccggcctcacccaggagcgtcccgggcagcagtagccagcacagcgcctccccactcgtgcagagccccagcctccagagcagccgggagagcctcaactcctgcggcttcgtggaaggcaagcccaggcccatgggctccccccggctgggcatcgccagcctgtccaagacctcggagtacaagccacccagctctccttcccagagatgcaaagtctacacccagaagggggtcctgccgtctcccgccccactgcctccctcgagcaaggattccggcgtggcgtctagggagtccttgctgcagcccgaggtgcgtacgcccccggttggaatgagcccccaggttttgaaaaaatccatgtctgctgggagcgaagggttcccggaaactcctgtcgatgatgagcagcaggcagctactccttcagagtccaagaaggagatcctgagcaccacgatggtgacggtgcagcagccactggagctgaacggtgaggacgagctggtgttcacgctggtggaggagctgaccatcagcggggtcctggacagcggccgccccaccagcatcatcagcttcaacagcgactgctctgcacgggccctggcctcgggctcgcggcccgtcagcatcatcagcagcatcagcgaggacctggagtgctactccagcacggcccccgtctccgaggtcagcatcacacagttcttgcccctcccgaagatgagcctggatgagaaggcccaggacgcagggagcagacgctcttccatcagctcctggctgagcgagatgagcgcgggcagtgagggtgagcagtcgtgccacagtttcatagcccagacgtgttttgggcacggggaggcaatggcagaacctgtggcctcggagtttgtcagcagcctccagaacaccgctgtggtgtgcagagagaagcccaaggccagccccgacaacttgctcatcctgtctgagatgggagatgactctttcaacaaagcagcccccatcaaaggctgcaaaatatccacagtgagcaaggccatggtcaccatctccaacacggccaatctgagcagctgcgaggggtacatccccatgaagaccaatatcacagtttacccctgcattgccatgagcccccggaacatccaagagccggaggcccccaccgccacccccaaagcaggccccacattagcccagtcccgggagagtaaggaaaacagtgcaaagaaagagatgaaatttgaggacccgtggctgaaacgagaagaggaagtgaaaaaagagacggctcatcccaatgaagaagggatgatgaggtgtgagactgccacgggcccctcgaatgctgagaccagagcagagcaggagcaggacggaaagcccagtccgggagacaggctcagcagcagcagcggagaggtgtcggcctccccggtcactgacaacttcaggagggtcgtggatgggtgtgagatggccctgcccggtttggccacccagagccccgtgcatcccaacaaaagcgtcaagtccagcagccttcccagggcctttcagaaggccagccggcaggaggagccggacagcctctcctattactgcgctgctgagaccaacggggtgggtgcagcctcgggcaccccgccctccaaggctaccctggaggggaaggtggcttcccccaagcactgtgttctggctcggcccaaagggactccccctctgccccctgtccgaaagtccagcctggaccagaagaaccgggccagccctcagcacagtgccagcggcagcggcaccagcagccccctgaaccaaccagccgccttcccggcgggcctcccagacgagcctagcggcaagacgaaggacgccagcagcagcagcaagctcttcagtgccaagctggagcagctggccagcagaagcaactcgctgggcagggcgacagtcagccactacgaatgcctctccctggagcgggccgagagcctgtcctccgtgagctcccggctgcacgcgggcaaggacggcaccatgccccgcgcggggaggagcctgggccgcagcgccgggacctcgccccccagctccggggcctcgcccaaggccggccagtccaagatctccgccgtgagcagactcctcctggccagccccagagcgcgcggcccgtccgcctccaccaccaaaaccctcagcttctccaccaagtccctgccgcaggcggtgggccagggctccagctcgccccccggtgggaagcacacgccctggtccacgcagtccctcagcaggaacaggagctcgggcctggcctccaagcttcccctgcgggccgtcagcgggcgcatctcggagctgctgcagggtggcgcgggcgcccggggcttgcagctgcgggccgggcccgaggcggaggcgcgcgggggggccctggccgaggacgagcccgcggccgcgcacctgctcccgtcgccctacagcaagatcacgcccccgcggaggccccaccgctgcagcagcggccacggcagcgacaacagcagcgtgctgagcggggagctcccgccggccatggggaagacggccctgttctaccacagcggcggcagcagcggctacgagagcgtgatgcgggacagcgaggccaccggcagcgcgtcctcggcgcaggactccacgagcgagaacagcagctccgtgggcggcaggtgccggagcctcaagaccccgaagaaacgctccaatccagcttttgatattatgagagtgacacatggcagagaacacagcctgattgaagatttgattctacttttagaagaatgcgacgccaacatcagagcatcctaa

SEQ ID NO: 246 - DNA, 567 bp, Homo sapiens
atgaattcggtagctgggaataaagagaggcttgcggtctccaccaggggcaagaaatacggggtgaatgaagtctgctcgcccaccaagcccgcagcgcccttctccccggaaagctggtaccggaaagcatacgaggagtcgcgcgccggcagccggcccactcctgagggcgcgggctcagcgctcggctcctcggggaccccgtctcccggctcgggcacctcgtccccgagctcgttcaccggctccccgggacccgcctcccccggcatcggcactagttcgccgggctccttgggcggctctccgggcttcggcacaggctccccgggctccggcagcggcggcggctcctcccccggctcggaccgcggcgtctggtgcgagaactgcaacgcccgcctggtggagctcaagaggcaggccctgaggttgctcctcccggggcccttcccgggcaaggcttttgatattatgagagtgacacatggcagagaacacagcctgattgaagatttgattctacttttagaagaatgcgacgccaacatcagagcatcctaa

SEQ ID NO: 247 - DNA, 1050 bp, Homo sapiens
atgaattcggtagctgggaataaagagaggcttgcggtctccaccaggggcaagaaatacggggtgaatgaagtctgctcgcccaccaagcccgcagcgcccttctccccggaaagctggtaccggaaagcatacgaggagtcgcgcgccggcagccggcccactcctgagggcgcgggctcagcgctcggctcctcggggaccccgtctcccggctcgggcacctcgtccccgagctcgttcaccggctccccgggacccgcctcccccggcatcggcactagttcgccgggctccttgggcggctctccgggcttcggcacaggctccccgggctccggcagcggcggcggctcctcccccggctcggaccgcggcgtctggtgcgagaactgcaacgcccgcctggtggagctcaagaggcaggccctgaggttgctcctcccggggcccttcccgggcaagctcaccatctgctacctggatatgctgatgaccagtgaggagcgccggaagcagctgagggaccagtactgctttgaatgtgactgtttccgttgccaaacccaggacaaggatgctgatatgctaactggtgatgagcaagtatggaaggaagttcaagaatccctgaaaaaaattgaagaactgaaggcacactggaagtgggagcaggttctggccatgtgccaggcaatcataagcagcaattctgaacggcttcccgatatcaacatctaccagctgaaggtgctcgactgcgccatggatgcctgcatcaacctcggcctgttggaggaagccttgttctatggtactcggaccatggagccatacaggatttttttcccaggaagccatcccgtcagaggggttcaagtgatgaaagttggcaaactgcagctacatcaaggcatgtttccccaagcaatgaagaatctgagactggcttttgatattatgagagtgacacatggcagagaacacagcctgattgaagatttgattctacttttagaagaatgcgacgccaacatcagagcatcctaa

SEQ ID NO: 248 - DNA, 939 bp, Homo sapiens
atgaattcggtagctgggaataaagagaggcttgcggtctccaccaggggcaagaaatacggggtgaatgaagtctgctcgcccaccaagcccgcagcgcccttctccccggaaagctggtaccggaaagcatacgaggagtcgcgcgccggcagccggcccactcctgagggcgcgggctcagcgctcggctcctcggggaccccgtctcccggctcgggcacctcgtccccgagctcgttcaccggctccccgggacccgcctcccccggcatcggcactagttcgccgggctccttgggcggctctccgggcttcggcacaggctccccgggctccggcagcggcggcggctcctcccccggctcggaccgcggcgtctggtgcgagaactgcaacgcccgcctggtggagctcaagaggcaggccctgaggttgctcctcccggggcccttcccgggcaaggatgctgatatgctaactggtgatgagcaagtatggaaggaagttcaagaatccctgaaaaaaattgaagaactgaaggcacactggaagtgggagcaggttctggccatgtgccaggcaatcataagcagcaattctgaacggcttcccgatatcaacatctaccagctgaaggtgctcgactgcgccatggatgcctgcatcaacctcggcctgttggaggaagccttgttctatggtactcggaccatggagccatacaggatttttttcccaggaagccatcccgtcagaggggttcaagtgatgaaagttggcaaactgcagctacatcaaggcatgtttccccaagcaatgaagaatctgagactggcttttgatattatgagagtgacacatggcagagaacacagcctgattgaagatttgattctacttttagaagaatgcgacgccaacatcagagcatcctaa

SEQ ID NO: 249 - DNA, 2106 bp, Homo sapiens
atgaattcggtagctgggaataaagagaggcttgcggtctccaccaggggcaagaaatacggggtgaatgaagtctgctcgcccaccaagcccgcagcgcccttctccccggaaagctggtaccggaaagcatacgaggagtcgcgcgccggcagccggcccactcctgagggcgcgggctcagcgctcggctcctcggggaccccgtctcccggctcgggcacctcgtccccgagctcgttcaccggctccccgggacccgcctcccccggcatcggcactagttcgccgggctccttgggcggctctccgggcttcggcacaggctccccgggctccggcagcggcggcggctcctcccccggctcggaccgcggcgtctggtgcgagaactgcaacgcccgcctggtggagctcaagaggcaggccctgaggttgctcctcccggggcccttcccgggcaaggaccctgctttctcggctgtgattcacgacaaactccaggtccccaacaccatccggaaggcatggaacgaccgggacaaccgctgtgacatttgcgccactcacctgaaccagttgaagcaggaggccatccagatggtgctgacgttggagcaggcagccggcagtgagcactacgacgcctcgccctgctccccgccaccgctctccaacatccccaccctggtggggtcccggcacgtgggtgggctccagcagcccagagactgggcctttgtgcccgccccctgtgccacctccaactacacaggcttcgccaacaagcacggcagcaaacccagcagccttggggtcagcaatggggcggaaaagaagagcgggtccccaacccaccaggccaaggtcagcctccagatggccaccagtccaagcaatgggaacatcctcaattcggtggccatccaggctcaccagtacctggatggcacctggtccctgtcgagaaccaacggggtcaccctgtacccataccagatctcccagctgatgacagagagtagccgggagggactaacagaagcagtgctgaaccgctacaatgcagacaagccttccgcctgcagtgtcccagcctcgcagggctcctgcgtggccagcgagacttccacaggcacatcggtggccgcctccttctttgcacgagctgcccagaagttaaatctgtcttctaaaaagaagaaacatcggccttccacttcttccgctgccgaaccaccgctctttgcaaccagcttcagtgggattctgcagacctcccctcccccagccccaccctgcctgctgagggctgtcaacaaggtgaaggacaccccggggctgggcaaggtgatctgcaactctttcaccatctgtaatgcggagatgcaggaagttggtgttggcctatatcccagtatctctttgctcaatcacagctgtgaccccaactgttcgattgtgttcaatgggccccacctcttactgcgagcagtccgagacatcgaggtgggagaggagctcaccatctgctacctggatatgctgatgaccagtgaggagcgccggaagcagctgagggaccagtactgctttgaatgtgactgtttccgttgccaaacccaggacaaggatgctgatatgctaactggtgatgagcaagtatggaaggaagttcaagaatccctgaaaaaaattgaagaactgaaggcacactggaagtgggagcaggttctggccatgtgccaggcaatcataagcagcaattctgaacggcttcccgatatcaacatctaccagctgaaggtgctcgactgcgccatggatgcctgcatcaacctcggcctgttggaggaagccttgttctatggtactcggaccatggagccatacaggatttttttcccaggaagccatcccgtcagaggggttcaagtgatgaaagttggcaaactgcagctacatcaaggcatgtttccccaagcaatgaagaatctgagactggcttttgatattatgagagtgacacatggcagagaacacagcctgattgaagatttgattctacttttagaagaatgcgacgccaacatcagagcatcctaa

SEQ ID NO: 250 - DNA, 1221 bp, Homo sapiens
atgaattcggtagctgggaataaagagaggcttgcggtctccaccaggggcaagaaatacggggtgaatgaagtctgctcgcccaccaagcccgcagcgcccttctccccggaaagctggtaccggaaagcatacgaggagtcgcgcgccggcagccggcccactcctgagggcgcgggctcagcgctcggctcctcggggaccccgtctcccggctcgggcacctcgtccccgagctcgttcaccggctccccgggacccgcctcccccggcatcggcactagttcgccgggctccttgggcggctctccgggcttcggcacaggctccccgggctccggcagcggcggcggctcctcccccggctcggaccgcggcgtctggtgcgagaactgcaacgcccgcctggtggagctcaagaggcaggccctgaggttgctcctcccggggcccttcccgggcaaggtgatctgcaactctttcaccatctgtaatgcggagatgcaggaagttggtgttggcctatatcccagtatctctttgctcaatcacagctgtgaccccaactgttcgattgtgttcaatgggccccacctcttactgcgagcagtccgagacatcgaggtgggagaggagctcaccatctgctacctggatatgctgatgaccagtgaggagcgccggaagcagctgagggaccagtactgctttgaatgtgactgtttccgttgccaaacccaggacaaggatgctgatatgctaactggtgatgagcaagtatggaaggaagttcaagaatccctgaaaaaaattgaagaactgaaggcacactggaagtgggagcaggttctggccatgtgccaggcaatcataagcagcaattctgaacggcttcccgatatcaacatctaccagctgaaggtgctcgactgcgccatggatgcctgcatcaacctcggcctgttggaggaagccttgttctatggtactcggaccatggagccatacaggatttttttcccaggaagccatcccgtcagaggggttcaagtgatgaaagttggcaaactgcagctacatcaaggcatgtttccccaagcaatgaagaatctgagactggcttttgatattatgagagtgacacatggcagagaacacagcctgattgaagatttgattctacttttagaagaatgcgacgccaacatcagagcatcctaa

SEQ ID NO: 251 - DNA, 1377 bp, Homo sapiens
atgaattcggtagctgggaataaagagaggcttgcggtctccaccaggggcaagaaatacggggtgaatgaagtctgctcgcccaccaagcccgcagcgcccttctccccggaaagctggtaccggaaagcatacgaggagtcgcgcgccggcagccggcccactcctgagggcgcgggctcagcgctcggctcctcggggaccccgtctcccggctcgggcacctcgtccccgagctcgttcaccggctccccgggacccgcctcccccggcatcggcactagttcgccgggctccttgggcggctctccgggcttcggcacaggctccccgggctccggcagcggcggcggctcctcccccggctcggaccgcggcgtctggtgcgagaactgcaacgcccgcctggtggagctcaagaggcaggccctgaggttgctcctcccggggcccttcccgggcaaggaccctgctttctcggctgtgattcacgacaaactccaggtccccaacaccatccggaaggcatggaacgaccgggacaaccgctgtgacatttgcgccactcacctgaaccagttgaagcaggaggccatccagatggtgctgacgttggagcaggcagccggcagtgagcactacgacgcctcgccctgctccccgccaccgctctccaacatccccaccctggtggggtcccggcacgtgggtgggctccagcagcccagagactgggcctttgtgcccgccccctgtgccacctccaactacacaggcttcgccaacaagcacggcagcaaacccagcagccttggggtcagcaatggggcggaaaagaagagcgggtccccaacccaccaggccaaggtcagcctccagatggccaccagtccaagcaatgggaacatcctcaattcggtggccatccaggctcaccagtacctggatggcacctggtccctgtcgagaaccaacggggtcaccctgtacccataccagatctcccagctgatgacagagagtagccgggagggactaacagaagcagtgctgaaccgctacaatgcagacaagccttccgcctgcagtgtcccagcctcgcagggctcctgcgtggccagcgagacttccacaggcacatcggtggccgcctccttctttgcacggatttttttcccaggaagccatcccgtcagaggggttcaagtgatgaaagttggcaaactgcagctacatcaaggcatgtttccccaagcaatgaagaatctgagactggcttttgatattatgagagtgacacatggcagagaacacagcctgattgaagatttgattctacttttagaagaatgcgacgccaacatcagagcatcctaa

SEQ ID NO: 252 - DNA, 873 bp, Homo sapiens
atggtgctgacgttggagcaggcagccggcagtgagcactacgacgcctcgccctgctccccgccaccgctctccaacatccccaccctggtggggtcccggcacgtgggtgggctccagcagcccagagactgggcctttgtgcccgccccctgtgccacctccaactacacaggcttcgccaacaagcacggcagcaaacccagcagccttggggtcagcaatggggcggaaaagaagagcgggtccccaacccaccaggccaaggtcagcctccagatggccaccagtccaagcaatgggaacatcctcaattcggtggccatccaggctcaccagtacctggatggcacctggtccctgtcgagaaccaacggggtcaccctgtacccataccaggatgctgatatgctaactggtgatgagcaagtatggaaggaagttcaagaatccctgaaaaaaattgaagaactgaaggcacactggaagtgggagcaggttctggccatgtgccaggcaatcataagcagcaattctgaacggcttcccgatatcaacatctaccagctgaaggtgctcgactgcgccatggatgcctgcatcaacctcggcctgttggaggaagccttgttctatggtactcggaccatggagccatacaggatttttttcccaggaagccatcccgtcagaggggttcaagtgatgaaagttggcaaactgcagctacatcaaggcatgtttccccaagcaatgaagaatctgagactggcttttgatattatgagagtgacacatggcagagaacacagcctgattgaagatttgattctacttttagaagaatgcgacgccaacatcagagcatcctaa

SEQ ID NO: 253 - DNA, 1824 bp, Homo sapiens
atgaattcggtagctgggaataaagagaggcttgcggtctccaccaggggcaagaaatacggggtgaatgaagtctgctcgcccaccaagcccgcagcgcccttctccccggaaagctggtaccggaaagcatacgaggagtcgcgcgccggcagccggcccactcctgagggcgcgggctcagcgctcggctcctcggggaccccgtctcccggctcgggcacctcgtccccgagctcgttcaccggctccccgggacccgcctcccccggcatcggcactagttcgccgggctccttgggcggctctccgggcttcggcacaggctccccgggctccggcagcggcggcggctcctcccccggctcggaccgcggcgtctggtgcgagaactgcaacgcccgcctggtggagctcaagaggcaggccctgaggttgctcctcccggggcccttcccgggcaaggaccctgctttctcggctgtgattcacgacaaactccaggtccccaacaccatccggaaggcatggaacgaccgggacaaccgctgtgacatttgcgccactcacctgaaccagttgaagcaggaggccatccagatggtgctgacgttggagcaggcagccggcagtgagcactacgacgcctcgccctgctccccgccaccgctctccaacatccccaccctggtggggtcccggcacgtgggtgggctccagcagcccagagactgggcctttgtgcccgccccctgtgccacctccaactacacaggcttcgccaacaagcacggcagcaaacccagcagccttggggtcagcaatggggcggaaaagaagagcgggtccccaacccaccaggccaaggtcagcctccagatggccaccagtccaagcaatgggaacatcctcaattcggtggccatccaggctcaccagtacctggatggcacctggtccctgtcgagaaccaacggggtcaccctgtacccataccagatctcccagctgatgacagagagtagccgggagggactaacagaagcagtgctgaaccgctacaatgcagacaagccttccgcctgcagtgtcccagcctcgcagggctcctgcgtggccagcgagacttccacaggcacatcggtggccgcctccttctttgcacgagctgcccagaagttaaatctgtcttctaaaaagaagaaacatcggccttccacttcttccgctgccgaaccaccgctctttgcaaccagcttcagtgggattctgcagacctcccctcccccagccccaccctgcctgctgagggctgtcaacaaggtgaaggacaccccggggctgggcaaggatgctgatatgctaactggtgatgagcaagtatggaaggaagttcaagaatccctgaaaaaaattgaagaactgaaggcacactggaagtgggagcaggttctggccatgtgccaggcaatcataagcagcaattctgaacggcttcccgatatcaacatctaccagctgaaggtgctcgactgcgccatggatgcctgcatcaacctcggcctgttggaggaagccttgttctatggtactcggaccatggagccatacaggatttttttcccaggaagccatcccgtcagaggggttcaagtgatgaaagttggcaaactgcagctacatcaaggcatgtttccccaagcaatgaagaatctgagactggcttttgatattatgagagtgacacatggcagagaacacagcctgattgaagatttgattctacttttagaagaatgcgacgccaacatcagagcatcctaa

SEQ ID NO: 254 - DNA, 3651 bp, Homo sapiens
atgttgctgcgggagtctctggggaacatgaactgccgtaccaccatgatcgcgcacatctcggccgcggtcgggagctacgcggagaccctgtccaccatccagattgcatcgagagtcttgaggatgaagaaaaagaagacgaagtacacatccagctcgtccggcggggagagctcctgcgaagaaggccgcatgcgcaggcccacccagctgagacccttccacaccagggccacggtggaccctgacttccccatcgctcacctgtccagcgaccccgactactcctccagcagcgagcagtcctgcgacaccgtcatctacatcgggcccaacggcacggccctctctgacaaggagctcaccgacaacgagggccccccagactttgtccctatcgtgccagccctgcagaagacccggggcgacagccggcccgcagaggcaggagaggctgcagccggcaagtcagaaagggactgcctgaagtgcaacacgtttgccgagctgcaggagaggctggactgcatcgacggcagcgaggagcccagcagctttcctttcgaagaactgcctgctcagtttgggccagagcaggcaagcagaggcccccggttaagccaagcagcgggggcaagcccactctctgagtctgataaggaagataatgggtccgaaggtcagctgaccaacagagaaggccctgaactcccagcctccaagatgcagaggagtcactcacctgtgcccgccgcggcacccgcccacagccccagcccggcctcacccaggagcgtcccgggcagcagtagccagcacagcgcctccccactcgtgcagagccccagcctccagagcagccgggagagcctcaactcctgcggcttcgtggaaggcaagcccaggcccatgggctccccccggctgggcatcgccagcctgtccaagacctcggagtacaagccacccagctctccttcccagagatgcaaagtctacacccagaagggggtcctgccgtctcccgccccactgcctccctcgagcaaggattccggcgtggcgtctagggagtccttgctgcagcccgaggtgcgtacgcccccggttggaatgagcccccaggttttgaaaaaatccatgtctgctgggagcgaagggttcccggaaactcctgtcgatgatgagcagcaggcagctactccttcagagtccaagaaggagatcctgagcaccacgatggtgacggtgcagcagccactggagctgaacggtgaggacgagctggtgttcacgctggtggaggagctgaccatcagcggggtcctggacagcggccgccccaccagcatcatcagcttcaacagcgactgctctgcacgggccctggcctcgggctcgcggcccgtcagcatcatcagcagcatcagcgaggacctggagtgctactccagcacggcccccgtctccgaggtcagcatcacacagttcttgcccctcccgaagatgagcctggatgagaaggcccaggacgcagggagcagacgctcttccatcagctcctggctgagcgagatgagcgcgggcagtgagggtgagcagtcgtgccacagtttcatagcccagacgtgttttgggcacggggaggcaatggcagaacctgtggcctcggagtttgtcagcagcctccagaacaccgctgtggtgtgcagagagaagcccaaggccagccccgacaacttgctcatcctgtctgagatgggagatgactctttcaacaaagcagcccccatcaaaggctgcaaaatatccacagtgagcaaggccatggtcaccatctccaacacggccaatctgagcagctgcgaggggtacatccccatgaagaccaatatcacagtttacccctgcattgccatgagcccccggaacatccaagagccggaggcccccaccgccacccccaaagcaggccccacattagcccagtcccgggagagtaaggaaaacagtgcaaagaaagagatgaaatttgaggacccgtggctgaaacgagaagaggaagtgaaaaaagagacggctcatcccaatgaagaagggatgatgaggtgtgagactgccacgggcccctcgaatgctgagaccagagcagagcaggagcaggacggaaagcccagtccgggagacaggctcagcagcagcagcggagaggtgtcggcctccccggtcactgacaacttcaggagggtcgtggatgggtgtgagatggccctgcccggtttggccacccagagccccgtgcatcccaacaaaagcgtcaagtccagcagccttcccagggcctttcagaaggccagccggcaggaggagccggacagcctctcctattactgcgctgctgagaccaacggggtgggtgcagcctcgggcaccccgccctccaaggctaccctggaggggaaggtggcttcccccaagcactgtgttctggctcggcccaaagggactccccctctgccccctgtccgaaagtccagcctggaccagaagaaccgggccagccctcagcacagtgccagcggcagcggcaccagcagccccctgaaccaaccagccgccttcccggcgggcctcccagacgagcctagcggcaagacgaaggacgccagcagcagcagcaagctcttcagtgccaagctggagcagctggccagcagaagcaactcgctgggcagggcgacagtcagccactacgaatgcctctccctggagcgggccgagagcctgtcctccgtgagctcccggctgcacgcgggcaaggacggcaccatgccccgcgcggggaggagcctgggccgcagcgccgggacctcgccccccagctccggggcctcgcccaaggccggccagtccaagatctccgccgtgagcagactcctcctggccagccccagagcgcgcggcccgtccgcctccaccaccaaaaccctcagcttctccaccaagtccctgccgcaggcggtgggccagggctccagctcgccccccggtgggaagcacacgccctggtccacgcagtccctcagcaggaacaggagctcgggcctggcctccaagcttcccctgcgggccgtcagcgggcgcatctcggagctgctgcagggtggcgcgggcgcccggggcttgcagctgcgggccgggcccgaggcggaggcgcgcgggggggccctggccgaggacgagcccgcggccgcgcacctgctcccgtcgccctacagcaagatcacgcccccgcggaggccccaccgctgcagcagcggccacggcagcgacaacagcagcgtgctgagcggggagctcccgccggccatggggaagacggccctgttctaccacagcggcggcagcagcggctacgagagcgtgatgcgggacagcgaggccaccggcagcgcgtcctcggcgcaggactccacgagcgagaacagcagctccgtgggcggcaggtgccggagcctcaagaccccgaagaaacgctccaatccagcttttgatattatgagagtgacacatggcagagaacacagcctgattgaagatttgattctacttttagaagaatgcgacgccaacatcagagcatcctaa

SEQ ID NO: 255 - DNA, 1935 bp, Homo sapiens
atgaattcggtagctgggaataaagagaggcttgcggtctccaccaggggcaagaaatacggggtgaatgaagtctgctcgcccaccaagcccgcagcgcccttctccccggaaagctggtaccggaaagcatacgaggagtcgcgcgccggcagccggcccactcctgagggcgcgggctcagcgctcggctcctcggggaccccgtctcccggctcgggcacctcgtccccgagctcgttcaccggctccccgggacccgcctcccccggcatcggcactagttcgccgggctccttgggcggctctccgggcttcggcacaggctccccgggctccggcagcggcggcggctcctcccccggctcggaccgcggcgtctggtgcgagaactgcaacgcccgcctggtggagctcaagaggcaggccctgaggttgctcctcccggggcccttcccgggcaaggaccctgctttctcggctgtgattcacgacaaactccaggtccccaacaccatccggaaggcatggaacgaccgggacaaccgctgtgacatttgcgccactcacctgaaccagttgaagcaggaggccatccagatggtgctgacgttggagcaggcagccggcagtgagcactacgacgcctcgccctgctccccgccaccgctctccaacatccccaccctggtggggtcccggcacgtgggtgggctccagcagcccagagactgggcctttgtgcccgccccctgtgccacctccaactacacaggcttcgccaacaagcacggcagcaaacccagcagccttggggtcagcaatggggcggaaaagaagagcgggtccccaacccaccaggccaaggtcagcctccagatggccaccagtccaagcaatgggaacatcctcaattcggtggccatccaggctcaccagtacctggatggcacctggtccctgtcgagaaccaacggggtcaccctgtacccataccagatctcccagctgatgacagagagtagccgggagggactaacagaagcagtgctgaaccgctacaatgcagacaagccttccgcctgcagtgtcccagcctcgcagggctcctgcgtggccagcgagacttccacaggcacatcggtggccgcctccttctttgcacgagctgcccagaagttaaatctgtcttctaaaaagaagaaacatcggccttccacttcttccgctgccgaaccaccgctctttgcaaccagcttcagtgggattctgcagacctcccctcccccagccccaccctgcctgctgagggctgtcaacaaggtgaaggacaccccggggctgggcaagctcaccatctgctacctggatatgctgatgaccagtgaggagcgccggaagcagctgagggaccagtactgctttgaatgtgactgtttccgttgccaaacccaggacaaggatgctgatatgctaactggtgatgagcaagtatggaaggaagttcaagaatccctgaaaaaaattgaagaactgaaggcacactggaagtgggagcaggttctggccatgtgccaggcaatcataagcagcaattctgaacggcttcccgatatcaacatctaccagctgaaggtgctcgactgcgccatggatgcctgcatcaacctcggcctgttggaggaagccttgttctatggtactcggaccatggagccatacaggatttttttcccaggaagccatcccgtcagaggggttcaagtgatgaaagttggcaaactgcagctacatcaaggcatgtttccccaagcaatgaagaatctgagactggcttttgatattatgagagtgacacatggcagagaacacagcctgattgaagatttgattctacttttagaagaatgcgacgccaacatcagagcatcctaa

SEQ ID NO: 256 - DNA, 1473 bp, Homo sapiens
atgaattcggtagctgggaataaagagaggcttgcggtctccaccaggggcaagaaatacggggtgaatgaagtctgctcgcccaccaagcccgcagcgcccttctccccggaaagctggtaccggaaagcatacgaggagtcgcgcgccggcagccggcccactcctgagggcgcgggctcagcgctcggctcctcggggaccccgtctcccggctcgggcacctcgtccccgagctcgttcaccggctccccgggacccgcctcccccggcatcggcactagttcgccgggctccttgggcggctctccgggcttcggcacaggctccccgggctccggcagcggcggcggctcctcccccggctcggaccgcggcgtctggtgcgagaactgcaacgcccgcctggtggagctcaagaggcaggccctgaggttgctcctcccggggcccttcccgggcaaggaccctgctttctcggctgtgattcacgacaaactccaggtccccaacaccatccggaaggcatggaacgaccgggacaaccgctgtgacatttgcgccactcacctgaaccagttgaagcaggaggccatccagatggtgctgacgttggagcaggcagccggcagtgagcactacgacgcctcgccctgctccccgccaccgctctccaacatccccaccctggtggggtcccggcacgtgggtgggctccagcagcccagagactgggcctttgtgcccgccccctgtgccacctccaactacacaggcttcgccaacaagcacggcagcaaacccagcagccttggggtcagcaatggggcggaaaagaagagcgggtccccaacccaccaggccaaggtcagcctccagatggccaccagtccaagcaatgggaacatcctcaattcggtggccatccaggctcaccagtacctggatggcacctggtccctgtcgagaaccaacggggtcaccctgtacccataccaggatgctgatatgctaactggtgatgagcaagtatggaaggaagttcaagaatccctgaaaaaaattgaagaactgaaggcacactggaagtgggagcaggttctggccatgtgccaggcaatcataagcagcaattctgaacggcttcccgatatcaacatctaccagctgaaggtgctcgactgcgccatggatgcctgcatcaacctcggcctgttggaggaagccttgttctatggtactcggaccatggagccatacaggatttttttcccaggaagccatcccgtcagaggggttcaagtgatgaaagttggcaaactgcagctacatcaaggcatgtttccccaagcaatgaagaatctgagactggcttttgatattatgagagtgacacatggcagagaacacagcctgattgaagatttgattctacttttagaagaatgcgacgccaacatcagagcatcctaa

SEQ ID NO: 257 - DNA, 819 bp, Homo sapiens
atgaattcggtagctgggaataaagagaggcttgcggtctccaccaggggcaagaaatacggggtgatctgcaactctttcaccatctgtaatgcggagatgcaggaagttggtgttggcctatatcccagtatctctttgctcaatcacagctgtgaccccaactgttcgattgtgttcaatgggccccacctcttactgcgagcagtccgagacatcgaggtgggagaggagctcaccatctgctacctggatatgctgatgaccagtgaggagcgccggaagcagctgagggaccagtactgctttgaatgtgactgtttccgttgccaaacccaggacaaggatgctgatatgctaactggtgatgagcaagtatggaaggaagttcaagaatccctgaaaaaaattgaagaactgaaggcacactggaagtgggagcaggttctggccatgtgccaggcaatcataagcagcaattctgaacggcttcccgatatcaacatctaccagctgaaggtgctcgactgcgccatggatgcctgcatcaacctcggcctgttggaggaagccttgttctatggtactcggaccatggagccatacaggatttttttcccaggaagccatcccgtcagaggggttcaagtgatgaaagttggcaaactgcagctacatcaaggcatgtttccccaagcaatgaagaatctgagactggcttttgatattatgagagtgacacatggcagagaacacagcctgattgaagatttgattctacttttagaagaatgcgacgccaacatcagagcatcctaa

SEQ ID NO: 258 - DNA, 960 bp, Homo sapiens
atgatggattggaaagcagtagctgcccagaagttaaatctgtcttctaaaaagaagaaacatcggccttccacttcttccgctgccgaaccaccgctctttgcaaccagcttcagtgggattctgcagacctcccctcccccagccccaccctgcctgctgagggctgtcaacaaggtgaaggacaccccggggctgggcaaggtgatctgcaactctttcaccatctgtaatgcggagatgcaggaagttggtgttggcctatatcccagtatctctttgctcaatcacagctgtgaccccaactgttcgattgtgttcaatgggccccacctcttactgcgagcagtccgagacatcgaggtgggagaggagctcaccatctgctacctggatatgctgatgaccagtgaggagcgccggaagcagctgagggaccagtactgctttgaatgtgactgtttccgttgccaaacccaggacaaggatgctgatatgctaactggtgatgagcaagtatggaaggaagttcaagaatccctgaaaaaaattgaagaactgaaggcacactggaagtgggagcaggttctggccatgtgccaggcaatcataagcagcaattctgaacggcttcccgatatcaacatctaccagctgaaggtgctcgactgcgccatggatgcctgcatcaacctcggcctgttggaggaagccttgttctatggtactcggaccatggagccatacaggatttttttcccaggaagccatcccgtcagaggggttcaagtgatgaaagttggcaaactgcagctacatcaaggcatgtttccccaagcaatgaagaatctgagactggcttttgatattatgagagtgacacatggcagagaacacagcctgattgaagatttgattctacttttagaagaatgcgacgccaacatcagagcatcctaa

SEQ ID NO: 259 - DNA, 789 bp, Homo sapiens
atgatggattggaaagcagtagctgcccagaagttaaatctgtcttctaaaaagaagaaacatcggccttccacttcttccgctgccgaaccaccgctctttgcaaccagcttcagtgggattctgcagacctcccctcccccagccccaccctgcctgctgagggctgtcaacaaggtgaaggacaccccggggctgggcaagctcaccatctgctacctggatatgctgatgaccagtgaggagcgccggaagcagctgagggaccagtactgctttgaatgtgactgtttccgttgccaaacccaggacaaggatgctgatatgctaactggtgatgagcaagtatggaaggaagttcaagaatccctgaaaaaaattgaagaactgaaggcacactggaagtgggagcaggttctggccatgtgccaggcaatcataagcagcaattctgaacggcttcccgatatcaacatctaccagctgaaggtgctcgactgcgccatggatgcctgcatcaacctcggcctgttggaggaagccttgttctatggtactcggaccatggagccatacaggatttttttcccaggaagccatcccgtcagaggggttcaagtgatgaaagttggcaaactgcagctacatcaaggcatgtttccccaagcaatgaagaatctgagactggcttttgatattatgagagtgacacatggcagagaacacagcctgattgaagatttgattctacttttagaagaatgcgacgccaacatcagagcatcctaa

SEQ ID NO: 260 - DNA, 678 bp, Homo sapiens
atgatggattggaaagcagtagctgcccagaagttaaatctgtcttctaaaaagaagaaacatcggccttccacttcttccgctgccgaaccaccgctctttgcaaccagcttcagtgggattctgcagacctcccctcccccagccccaccctgcctgctgagggctgtcaacaaggtgaaggacaccccggggctgggcaaggatgctgatatgctaactggtgatgagcaagtatggaaggaagttcaagaatccctgaaaaaaattgaagaactgaaggcacactggaagtgggagcaggttctggccatgtgccaggcaatcataagcagcaattctgaacggcttcccgatatcaacatctaccagctgaaggtgctcgactgcgccatggatgcctgcatcaacctcggcctgttggaggaagccttgttctatggtactcggaccatggagccatacaggatttttttcccaggaagccatcccgtcagaggggttcaagtgatgaaagttggcaaactgcagctacatcaaggcatgtttccccaagcaatgaagaatctgagactggcttttgatattatgagagtgacacatggcagagaacacagcctgattgaagatttgattctacttttagaagaatgcgacgccaacatcagagcatcctaa

SEQ ID NO: 261 - DNA, 741 bp, Homo sapiens
atggtgcgcatgaatgtcctggcagatgctctcaagagtatcaacaatgccgaaaagagaggcaaacgccaggtgcttattaggccgtgctccaaagtcatcgtccggtttctcactgtgatgatgaagcatggttacattggcgaatttgaaatcattgatgaccacagagctgggaaaattgttgtgaacctcacaggcaggctaaacaagtgtggggtgatcagccccagatttgacgtgcaactcaaagacctggaaaaatggcagaataatctgcttccatcccgccagtttgggattatctactatctagatccatctgttctgtccggcgtttcctgttttgttatgtttttgtgcttggctgactaccttgttcccattctagcgcctagaatttttggctccaataaatggaccactgaacaacagcaaagattccatgaaatttgcagcaatctagtaaaaactcgacgcagagctgtgggttggtggaaacgcctcttcacactaaaggaagaaaaacctaagatgtacttcatgaccatgatcgtttcccttgctgcggttgcttgggtgggacaacaagtccacaacctgcttctcacctacctgatagtgacttccttactattgcttcctggactaaaccaacatggaatcattttgaagtacattggaatggccaagagggagataaacaaacttctcaaacaaaaagaaaagaaaaacgaatga

SEQ ID NO: 262 - DNA, 621 bp, Homo sapiens
atggtgcgcatgaatgtcctggcagatgctctcaagagtatcaacaatgccgaaaagagaggcaaacgccaggtgcttattaggccgtgctccaaagtcatcgtccggtttctcactgtgatgatgaagcatggttacattggcgaatttgaaatcattgatgaccacagagctgggaaaattgttgtgaacctcacaggcaggctaaacaagtgtggggtgatcagccccagatttgacgtgcaactcaaagacctggaaaaatggcagaataatctgcttccatcccgccagtttgggaccactgaacaacagcaaagattccatgaaatttgcagcaatctagtaaaaactcgacgcagagctgtgggttggtggaaacgcctcttcacactaaaggaagaaaaacctaagatgtacttcatgaccatgatcgtttcccttgctgcggttgcttgggtgggacaacaagtccacaacctgcttctcacctacctgatagtgacttccttactattgcttcctggactaaaccaacatggaatcattttgaagtacattggaatggccaagagggagataaacaaacttctcaaacaaaaagaaaagaaaaacgaatga

SEQ ID NO: 263 - DNA, 789 bp, Homo sapiens
atggtgcgcatgaatgtcctggcagatgctctcaagagtatcaacaatgccgaaaagagaggcaaacgccaggtgcttattaggccgtgctccaaagtcatcgtccggtttctcactgtgatgatgaagcatggttacattggcgaatttgaaatcattgatgaccacagagctgggaaaattgttgtgaacctcacaggcaggctaaacaaggctgcagagactgcaagtctggaagaacagctgcaaggatggggagaagtgatgctgatggctgataaagtcctccgatgggaaagagcctggtttccacctgccatcatgggtgtggtttctttggtgtttctgattatctactatctagatccatctgttctgtccggcgtttcctgttttgttatgtttttgtgcttggctgactaccttgttcccattctagcgcctagaatttttggctccaataaatggaccactgaacaacagcaaagattccatgaaatttgcagcaatctagtaaaaactcgacgcagagctgtgggttggtggaaacgcctcttcacactaaaggaagaaaaacctaagatgtacttcatgaccatgatcgtttcccttgctgcggttgcttgggtgggacaacaagtccacaacctgcttctcacctacctgatagtgacttccttactattgcttcctggactaaaccaacatggaatcattttgaagtacattggaatggccaagagggagataaacaaacttctcaaacaaaaagaaaagaaaaacgaatga

SEQ ID NO: 264 - DNA, 417 bp, Homo sapiens
atggtgcgcatgaatgtcctggcagatgctctcaagagtatcaacaatgccgaaaagagaggcaaacgccaggtgcttattaggccgtgctccaaagtcatcgtccggtttctcactgtgatgatgaagcatggttacattggcgaatttgaaatcattgatgaccacagagctgggaaaattgttgtgaacctcacaggcaggctaaacaagtacttcatgaccatgatcgtttcccttgctgcggttgcttgggtgggacaacaagtccacaacctgcttctcacctacctgatagtgacttccttactattgcttcctggactaaaccaacatggaatcattttgaagtacattggaatggccaagagggagataaacaaacttctcaaacaaaaagaaaagaaaaacgaatga

SEQ ID NO: 265 - DNA, 525 bp, Homo sapiens
atgctgatggctgataaagtcctccgatgggaaagagcctggtttccacctgccatcatgggtgtggtttctttggtgtttctgattatctactatctagatccatctgttctgtccggcgtttcctgttttgttatgtttttgtgcttggctgactaccttgttcccattctagcgcctagaatttttggctccaataaatggaccactgaacaacagcaaagattccatgaaatttgcagcaatctagtaaaaactcgacgcagagctgtgggttggtggaaacgcctcttcacactaaaggaagaaaaacctaagatgtacttcatgaccatgatcgtttcccttgctgcggttgcttgggtgggacaacaagtccacaacctgcttctcacctacctgatagtgacttccttactattgcttcctggactaaaccaacatggaatcattttgaagtacattggaatggccaagagggagataaacaaacttctcaaacaaaaagaaaagaaaaacgaatga

SEQ ID NO: 266 - DNA, 2784 bp, Homo sapiens
atgaagattttccagcgcaagatgcggtactggttgcttccaccttttttggcaattgtttatttctgcaccattgtccaaggtcaagtggctccacccacaaggttaagatataatgtaatatctcatgacagtatacagatttcatggaaggctccaagagggaaatttggtggttacaaacttcttgtgactccaacttcaggtggaaaaactaaccagctgaatctgcagaacactgcaactaaagcaattattcaaggccttatgccagaccagaattacacagttcaaattattgcatacaataaagataaagaaagcaagccagctcaaggccaattcagaattaaagatttagaaaaaagaaaggatccaaagcccagagtcaaagttgtggacagaggaaatgggagtagaccatcttcaccagaagaagtgaaatttgtctgtcaaactccagcaattgctgacattgtaatcctggtcgatggttcatggagtattggaagattcaacttcagactggttcggcatttcttggaaaacctggttacagcattcgatgtgggctcagagaagacacgaattggtcttgcacagtatagtggtgaccccagaatagaatggcacttgaatgcatttagcacaaaagatgaagtgattgaagctgtccgaaacctcccatataaaggaggaaatacactaacaggtcttgctttgaactacatttttgaaaatagcttcaaaccagaagcaggatcaaggactggagtatccaaaattggcattttaatcacagatggaaaatcccaagatgacattattccaccatctagaaatcttcgtgagtctggtgtagaactgtttgccataggggtgaaaaacgcggatgtgaatgagctgcaggagatcgcctctgaaccagacagcactcatgtgtacaatgttgccgaattcgatctgatgcacacagttgtggagagtctgaccaggactctctgctctagagtggaagaacaggacagagaaattaaagcctcagcccatgccatcactgggccgcctacggagttgattacttctgaagtcactgccagaagctttatggttaactggactcatgccccaggaaatgtggaaaaatacagagttgtgtattatcctaccaggggtggaaaaccagacgaggtggtggtagatggaactgtatcttccacagtgttgaaaaacttgatgtctttaactgaatatcagatagcagtctttgcaatctatgcccacactgctagtgaaggcctacggggaactgaaactacacttgctttaccgatggcttctgaccttctactgtacgacgtgactgagaacagcatgcgagtcaaatgggatgcagtgcctggggcctcaggttacctgatcctttatgctcctctaacagagggcctggctggggatgaaaaagagatgaaaattggagagacccacacagatattgaattgagtgggttgttgcccaatacagaatacacagtcacagtttatgccatgtttggagaagaggccagtgatcctgttacgggacaagaaacaacattggctttaagtccaccaagaaacctgagaatctccaatgttggctctaacagtgctcgattaacctgggacccaacttcaagacagatcaatggttatcgaattgtatataacaatgcagatgggactgaaatcaatgaggttgaagtcgatcctattactaccttccctctgaagggcttgacacctctcacagagtatactattgctattttctccatctatgatgaaggacagtcagagcctctgactggagtttttaccaccgaggaagttccagcccagcaatacttagaaattgatgaggtgacgacagacagttttagggtgacctggcatcccctctcagctgatgaagggctacacaaattgatgtggattccagtctatggggggaagactgaggaggttgtcctgaaagaagagcaggactcacatgttattgaaggcctggagcccggtacggagtatgaagtttcactattggccgtacttgatgatggaagcgagagtgaggtggtgactgctgtcgggaccacacttgacagtttttggacagaaccagctacaaccatagtgcctaccacatctgtgacttcagttttccagacgggaatcagaaacctagttgtaggtgatgaaactacttctagcctgcgggtaaaatgggacatttctgacagcgatgtgcagcagtttagggtgacctacatgacagctcaaggggaccctgaggaagaagtcataggaacggttatggtgcctggaagccagaacaacctccttctgaagcctctgcttcctgatactgaatacaaagtcacagtgactcccatctacacggatggcgaaggcgtcagcgtctccgctcctggaaaaaccttgctgaagagacctgtcacctctgaggaactccttactcccggggctccgtatgcaaggaagacattcacgattgttggtgacgcggttggctggggttttgtggtgcgaggaagtaagccatgccacatccaggctgtagaccccagtggccctgcagccgcagcaggaatgaaggtctgtcagtttgtcgtctctgtcaacgggctcaatgtcctgcatgtagactaccggaccgtgagcaatctgattctgacgggcccacggacgattgtcatggaagtcatggaggagttagagtgctga

SEQ ID NO: 267 - DNA, 1818 bp, Homo sapiens
atgcacacagttgtggagagtctgaccaggactctctgctctagagtggaagaacaggacagagaaattaaagcctcagcccatgccatcactgggccgcctacggagttgattacttctgaagtcactgccagaagctttatggttaactggactcatgccccaggaaatgtggaaaaatacagagttgtgtattatcctaccaggggtggaaaaccagacgaggtggtggtagatggaactgtatcttccacagtgttgaaaaacttgatgtctttaactgaatatcagatagcagtctttgcaatctatgcccacactgctagtgaaggcctacggggaactgaaactacacttgctttaccgatggcttctgaccttctactgtacgacgtgactgagaacagcatgcgagtcaaatgggatgcagtgcctggggcctcaggttacctgatcctttatgctcctctaacagagggcctggctggggatgaaaaagagatgaaaattggagagacccacacagatattgaattgagtgggttgttgcccaatacagaatacacagtcacagtttatgccatgtttggagaagaggccagtgatcctgttacgggacaagaaacaacattggctttaagtccaccaagaaacctgagaatctccaatgttggctctaacagtgctcgattaacctgggacccaacttcaagacagatcaatggttatcgaattgtatataacaatgcagatgggactgaaatcaatgaggttgaagtcgatcctattactaccttccctctgaagggcttgacacctctcacagagtatactattgctattttctccatctatgatgaaggacagtcagagcctctgactggagtttttaccaccgaggaagttccagcccagcaatacttagaaattgatgaggtgacgacagacagttttagggtgacctggcatcccctctcagctgatgaagggctacacaaattgatgtggattccagtctatggggggaagactgaggaggttgtcctgaaagaagagcaggactcacatgttattgaaggcctggagcccggtacggagtatgaagtttcactattggccgtacttgatgatggaagcgagagtgaggtggtgactgctgtcgggaccacacttgacagtttttggacagaaccagctacaaccatagtgcctaccacatctgtgacttcagttttccagacgggaatcagaaacctagttgtaggtgatgaaactacttctagcctgcgggtaaaatgggacatttctgacagcgatgtgcagcagtttagggtgacctacatgacagctcaaggggaccctgaggaagaagtcataggaacggttatggtgcctggaagccagaacaacctccttctgaagcctctgcttcctgatactgaatacaaagtcacagtgactcccatctacacggatggcgaaggcgtcagcgtctccgctcctggaaaaaccttgctgaagagacctgtcacctctgaggaactccttactcccggggctccgtatgcaaggaagacattcacgattgttggtgacgcggttggctggggttttgtggtgcgaggaagtaagccatgccacatccaggctgtagaccccagtggccctgcagccgcagcaggaatgaaggtctgtcagtttgtcgtctctgtcaacgggctcaatgtcctgcatgtagactaccggaccgtgagcaatctgattctgacgggcccacggacgattgtcatggaagtcatggaggagttagagtgctga

SEQ ID NO: 268 - DNA, 1866 bp, Homo sapiens
atgaagattttccagcgcaagatgcggtactggttgcttccaccttttttggcaattgtttatttctgcaccattgtccaaggtcaagtggctccacccacaaggttaagatataatgtaatatctcatgacagtatacagatttcatggaaggctccaagagggaaatttggtggttacaaacttcttgtgactccaacttcaggtggaaaaactaaccagctgaatctgcagaacactgcaactaaagcaattattcaaggccttatgccagaccagaattacacagttcaaattattgcatacaataaagataaagaaagcaagccagctcaaggccaattcagaattaaagatttagaaaaaagaaaggatccaaagcccagagtcaaagttgtggacagaggaaatgggagtagaccatcttcaccagaagaagtgaaatttgtctgtcaaactccagcaattgctgacattgtaatcctggtcgatggttcatggagtattggaagattcaacttcagactggttcggcatttcttggaaaacctggttacagcattcgatgtgggctcagagaagacacgaattggtcttgcacagtatagtggtgaccccagaatagaatggcacttgaatgcatttagcacaaaagatgaagtgattgaagctgtccgaaacctcccatataaaggaggaaatacactaacaggtcttgctttgaactacatttttgaaaatagcttcaaaccagaagcaggatcaaggactggagtatccaaaattggcattttaatcacagatggaaaatcccaagatgacattattccaccatctagaaatcttcgtgagtctggtgtagaactgtttgccataggggtgaaaaacgcggatgtgaatgagctgcaggagatcgcctctgaaccagacagcactcatgtgtacaatgttgccgaattcgatctgatgcacacagttgtggagagtctgaccaggactctctgctctagagtggaagaacaggacagagaaattaaagcctcagcccatgccatcactgggccgcctacggagttgattacttctgaagtcactgccagaagctttatggttaactggactcatgccccaggaaatgtggaaaaatacagagttgtgtattatcctaccaggggtggaaaaccagacgaggtggtggtagatggaactgtatcttccacagtgttgaaaaacttgatgtctttaactgaatatcagatagcagtctttgcaatctatgcccacactgctagtgaaggcctacggggaactgaaactacacttgctttaccgatggcttctgaccttctactgtacgacgtgactgagaacagcatgcgagtcaaatgggatgcagtgcctggggcctcaggttacctgatcctttatgctcctctaacagagggcctggctggggatgaaaaagagatgaaaattggagagacccacacagatattgaattgagtgggttgttgcccaatacagaatacacagtcacagtttatgccatgtttggagaagaggccagtgatcctgttacgggacaagaaacaacattggctttaagtccaccaagaaacctgagaatctccaatgttggctctaacagtgctcgattaacctgggacccaacttcaagacagatcaatggttatcgaattgtatataacaatgcagatgggactgaaatcaatgaggtctgtcagtttgtcgtctctgtcaacgggctcaatgtcctgcatgtagactaccggaccgtgagcaatctgattctgacgggcccacggacgattgtcatggaagtcatggaggagttagagtgctga

SEQ ID NO: 269 - DNA, 831 bp, Homo sapiens
atgaagattttccagcgcaagatgcggtactggttgcttccaccttttttggcaattgtttatttctgcaccattgtccaaggtcaagtggctccacccacaaggttaagatataatgtaatatctcatgacagtatacagatttcatggaaggctccaagagggaaatttggtggttacaaacttcttgtgactccaacttcagtgtccaacaagcacccatttgtggacagcaatcttctctaccagttcagaatgaacttccggcggaggcgaagactgatggagctgctcaatgaaaagtccccctcctcccaggaaactcatgacagtcccttctgcctgaggaagcagagccatgacaatcggaaatctaccagctttatgtcagtgagccccagcaaggagatcaagatcgtgtctgcagtgaggagaagcagcatgagcagctgtggcagcagcggctacttcagcagcagccccaccctcagcagcagcccccctgtgctctgcaaccccaagtccgtgctgaagagacctgtcacctctgaggaactccttactcccggggctccgtatgcaaggaagacattcacgattgttggtgacgcggttggctggggttttgtggtgcgaggaagtaagccatgccacatccaggctgtagaccccagtggccctgcagccgcagcaggaatgaaggtctgtcagtttgtcgtctctgtcaacgggctcaatgtcctgcatgtagactaccggaccgtgagcaatctgattctgacgggcccacggacgattgtcatggaagtcatggaggagttagagtgctga

SEQ ID NO: 270 - DNA, 714 bp, Homo sapiens
atgaagattttccagcgcaagatgcggtactggttgcttccaccttttttggcaattgtttatttctgcaccattgtccaaggtcaagtgtccaacaagcacccatttgtggacagcaatcttctctaccagttcagaatgaacttccggcggaggcgaagactgatggagctgctcaatgaaaagtccccctcctcccaggaaactcatgacagtcccttctgcctgaggaagcagagccatgacaatcggaaatctaccagctttatgtcagtgagccccagcaaggagatcaagatcgtgtctgcagtgaggagaagcagcatgagcagctgtggcagcagcggctacttcagcagcagccccaccctcagcagcagcccccctgtgctctgcaaccccaagtccgtgctgaagagacctgtcacctctgaggaactccttactcccggggctccgtatgcaaggaagacattcacgattgttggtgacgcggttggctggggttttgtggtgcgaggaagtaagccatgccacatccaggctgtagaccccagtggccctgcagccgcagcaggaatgaaggtctgtcagtttgtcgtctctgtcaacgggctcaatgtcctgcatgtagactaccggaccgtgagcaatctgattctgacgggcccacggacgattgtcatggaagtcatggaggagttagagtgctga

SEQ ID NO: 271 - DNA, 1503 bp, Homo sapiens
atgaagattttccagcgcaagatgcggtactggttgcttccaccttttttggcaattgtttatttctgcaccattgtccaaggtcaagtggctccacccacaaggttaagatataatgtaatatctcatgacagtatacagatttcatggaaggctccaagagggaaatttggtggttacaaacttcttgtgactccaacttcaggtggaaaaactaaccagctgaatctgcagaacactgcaactaaagcaattattcaaggccttatgccagaccagaattacacagttcaaattattgcatacaataaagataaagaaagcaagccagctcaaggccaattcagaattaaagatttagaaaaaagaaaggatccaaagcccagagtcaaagttgtggacagaggaaatgggagtagaccatcttcaccagaagaagtgaaatttgtctgtcaaactccagcaattgctgacattgtaatcctggtcgatggttcatggagtattggaagattcaacttcagactggttcggcatttcttggaaaacctggttacagcattcgatgtgggctcagagaagacacgaattggtcttgcacagtatagtggtgaccccagaatagaatggcacttgaatgcatttagcacaaaagatgaagtgattgaagctgtccgaaacctcccatataaaggaggaaatacactaacaggtcttgctttgaactacatttttgaaaatagcttcaaaccagaagcaggatcaaggactggagtatccaaaattggcattttaatcacagatggaaaatcccaagatgacattattccaccatctagaaatcttcgtgagtctggtgtagaactgtttgccatagtgtccaacaagcacccatttgtggacagcaatcttctctaccagttcagaatgaacttccggcggaggcgaagactgatggagctgctcaatgaaaagtccccctcctcccaggaaactcatgacagtcccttctgcctgaggaagcagagccatgacaatcggaaatctaccagctttatgtcagtgagccccagcaaggagatcaagatcgtgtctgcagtgaggagaagcagcatgagcagctgtggcagcagcggctacttcagcagcagccccaccctcagcagcagcccccctgtgctctgcaaccccaagtccgtgctgaagagacctgtcacctctgaggaactccttactcccggggctccgtatgcaaggaagacattcacgattgttggtgacgcggttggctggggttttgtggtgcgaggaagtaagccatgccacatccaggctgtagaccccagtggccctgcagccgcagcaggaatgaaggtctgtcagtttgtcgtctctgtcaacgggctcaatgtcctgcatgtagactaccggaccgtgagcaatctgattctgacgggcccacggacgattgtcatggaagtcatggaggagttagagtgctga

SEQ ID NO: 272 - DNA, 1062 bp, Homo sapiens
atgaagattttccagcgcaagatgcggtactggttgcttccaccttttttggcaattgtttatttctgcaccattgtccaaggtcaagtggctccacccacaaggttaagatataatgtaatatctcatgacagtatacagatttcatggaaggctccaagagggaaatttggtggttacaaacttcttgtgactccaacttcaggtggaaaaactaaccagctgaatctgcagaacactgcaactaaagcaattattcaaggccttatgccagaccagaattacacagttcaaattattgcatacaataaagataaagaaagcaagccagctcaaggccaattcagaattaaagatttagaaaaaagaaaggatccaaagcccagagtcaaagttgtggacagaggaaatgggagtagaccatcttcaccagaagtgtccaacaagcacccatttgtggacagcaatcttctctaccagttcagaatgaacttccggcggaggcgaagactgatggagctgctcaatgaaaagtccccctcctcccaggaaactcatgacagtcccttctgcctgaggaagcagagccatgacaatcggaaatctaccagctttatgtcagtgagccccagcaaggagatcaagatcgtgtctgcagtgaggagaagcagcatgagcagctgtggcagcagcggctacttcagcagcagccccaccctcagcagcagcccccctgtgctctgcaaccccaagtccgtgctgaagagacctgtcacctctgaggaactccttactcccggggctccgtatgcaaggaagacattcacgattgttggtgacgcggttggctggggttttgtggtgcgaggaagtaagccatgccacatccaggctgtagaccccagtggccctgcagccgcagcaggaatgaaggtctgtcagtttgtcgtctctgtcaacgggctcaatgtcctgcatgtagactaccggaccgtgagcaatctgattctgacgggcccacggacgattgtcatggaagtcatggaggagttagagtgctga

SEQ ID NO: 273 - DNA, 900 bp, Homo sapiens
atgcacacagttgtggagagtctgaccaggactctctgctctagagtggaagaacaggacagagaaattaaagcctcagcccatgccatcactgggccgcctacggagttgattacttctgaagtcactgccagaagctttatggttaactggactcatgccccaggaaatgtggaaaaatacagagttgtgtattatcctaccaggggtggaaaaccagacgaggtggtggtagatggaactgtatcttccacagtgttgaaaaacttgatgtctttaactgaatatcagatagcagtctttgcaatctatgcccacactgctagtgaaggcctacggggaactgaaactacacttgctttaccgatggcttctgaccttctactgtacgacgtgactgagaacagcatgcgagtcaaatgggatgcagtgcctggggcctcaggttacctgatcctttatgctcctctaacagagggcctggctggggatgaaaaagagatgaaaattggagagacccacacagatattgaattgagtgggttgttgcccaatacagaatacacagtcacagtttatgccatgtttggagaagaggccagtgatcctgttacgggacaagaaacaacattggctttaagtccaccaagaaacctgagaatctccaatgttggctctaacagtgctcgattaacctgggacccaacttcaagacagatcaatggttatcgaattgtatataacaatgcagatgggactgaaatcaatgaggtctgtcagtttgtcgtctctgtcaacgggctcaatgtcctgcatgtagactaccggaccgtgagcaatctgattctgacgggcccacggacgattgtcatggaagtcatggaggagttagagtgctga

SEQ ID NO: 274 - DNA, 1512 bp, Homo sapiens
atgcacacagttgtggagagtctgaccaggactctctgctctagagtggaagaacaggacagagaaattaaagcctcagcccatgccatcactgggccgcctacggagttgattacttctgaagtcactgccagaagctttatggttaactggactcatgccccaggaaatgtggaaaaatacagagttgtgtattatcctaccaggggtggaaaaccagacgaggtggtggtagatggaactgtatcttccacagtgttgaaaaacttgatgtctttaactgaatatcagatagcagtctttgcaatctatgcccacactgctagtgaaggcctacggggaactgaaactacacttgctttaccgatggcttctgaccttctactgtacgacgtgactgagaacagcatgcgagtcaaatgggatgcagtgcctggggcctcaggttacctgatcctttatgctcctctaacagagggcctggctggggatgaaaaagagatgaaaattggagagacccacacagatattgaattgagtgggttgttgcccaatacagaatacacagtcacagtttatgccatgtttggagaagaggccagtgatcctgttacgggacaagaaacaacattggctttaagtccaccaagaaacctgagaatctccaatgttggctctaacagtgctcgattaacctgggacccaacttcaagacagatcaatggttatcgaattgtatataacaatgcagatgggactgaaatcaatgaggttgaagtcgatcctattactaccttccctctgaagggcttgacacctctcacagagtatactattgctattttctccatctatgatgaaggacagtcagagcctctgactggagtttttaccaccgaggaagttccagcccagcaatacttagaaattgatgaggtgacgacagacagttttagggtgacctggcatcccctctcagctgatgaagggctacacaaattgatgtggattccagtctatggggggaagactgaggaggttgtcctgaaagaagagcaggactcacatgttattgaaggcctggagcccggtacggagtatgaagtttcactattggccgtacttgatgatggaagcgagagtgaggtggtgactgctgtcgggaccacacttgacagtttttggacagaaccagctacaaccatagtgcctaccacatctgtgacttcagttttccagacgggaatcagaaacctagttgtaggtgatgaaactacttctagcctgcgggtaaaatgggacatttctgacagcgatgtgcagcagtttagggtgacctacatgacagctcaaggggaccctgaggaagaagtcataggaacggtctgtcagtttgtcgtctctgtcaacgggctcaatgtcctgcatgtagactaccggaccgtgagcaatctgattctgacgggcccacggacgattgtcatggaagtcatggaggagttagagtgctga

SEQ ID NO: 275 - DNA, 2478 bp, Homo sapiens
atgaagattttccagcgcaagatgcggtactggttgcttccaccttttttggcaattgtttatttctgcaccattgtccaaggtcaagtggctccacccacaaggttaagatataatgtaatatctcatgacagtatacagatttcatggaaggctccaagagggaaatttggtggttacaaacttcttgtgactccaacttcaggtggaaaaactaaccagctgaatctgcagaacactgcaactaaagcaattattcaaggccttatgccagaccagaattacacagttcaaattattgcatacaataaagataaagaaagcaagccagctcaaggccaattcagaattaaagatttagaaaaaagaaaggatccaaagcccagagtcaaagttgtggacagaggaaatgggagtagaccatcttcaccagaagaagtgaaatttgtctgtcaaactccagcaattgctgacattgtaatcctggtcgatggttcatggagtattggaagattcaacttcagactggttcggcatttcttggaaaacctggttacagcattcgatgtgggctcagagaagacacgaattggtcttgcacagtatagtggtgaccccagaatagaatggcacttgaatgcatttagcacaaaagatgaagtgattgaagctgtccgaaacctcccatataaaggaggaaatacactaacaggtcttgctttgaactacatttttgaaaatagcttcaaaccagaagcaggatcaaggactggagtatccaaaattggcattttaatcacagatggaaaatcccaagatgacattattccaccatctagaaatcttcgtgagtctggtgtagaactgtttgccataggggtgaaaaacgcggatgtgaatgagctgcaggagatcgcctctgaaccagacagcactcatgtgtacaatgttgccgaattcgatctgatgcacacagttgtggagagtctgaccaggactctctgctctagagtggaagaacaggacagagaaattaaagcctcagcccatgccatcactgggccgcctacggagttgattacttctgaagtcactgccagaagctttatggttaactggactcatgccccaggaaatgtggaaaaatacagagttgtgtattatcctaccaggggtggaaaaccagacgaggtggtggtagatggaactgtatcttccacagtgttgaaaaacttgatgtctttaactgaatatcagatagcagtctttgcaatctatgcccacactgctagtgaaggcctacggggaactgaaactacacttgctttaccgatggcttctgaccttctactgtacgacgtgactgagaacagcatgcgagtcaaatgggatgcagtgcctggggcctcaggttacctgatcctttatgctcctctaacagagggcctggctggggatgaaaaagagatgaaaattggagagacccacacagatattgaattgagtgggttgttgcccaatacagaatacacagtcacagtttatgccatgtttggagaagaggccagtgatcctgttacgggacaagaaacaacattggctttaagtccaccaagaaacctgagaatctccaatgttggctctaacagtgctcgattaacctgggacccaacttcaagacagatcaatggttatcgaattgtatataacaatgcagatgggactgaaatcaatgaggttgaagtcgatcctattactaccttccctctgaagggcttgacacctctcacagagtatactattgctattttctccatctatgatgaaggacagtcagagcctctgactggagtttttaccaccgaggaagttccagcccagcaatacttagaaattgatgaggtgacgacagacagttttagggtgacctggcatcccctctcagctgatgaagggctacacaaattgatgtggattccagtctatggggggaagactgaggaggttgtcctgaaagaagagcaggactcacatgttattgaaggcctggagcccggtacggagtatgaagtttcactattggccgtacttgatgatggaagcgagagtgaggtggtgactgctgtcgggaccacacttgacagtttttggacagaaccagctacaaccatagtgcctaccacatctgtgacttcagttttccagacgggaatcagaaacctagttgtaggtgatgaaactacttctagcctgcgggtaaaatgggacatttctgacagcgatgtgcagcagtttagggtgacctacatgacagctcaaggggaccctgaggaagaagtcataggaacggtctgtcagtttgtcgtctctgtcaacgggctcaatgtcctgcatgtagactaccggaccgtgagcaatctgattctgacgggcccacggacgattgtcatggaagtcatggaggagttagagtgctga

SEQ ID NO: 276 - DNA, 1002 bp, Homo sapiens
atggtcggggaaatggaaacgaaggagaagccgaagcccaccccagattacctgatgcagctgatgaacgacaagaagctcatgagcagcctgcccaacttctgcgggatcttcaaccacctcgagcggctgctggacgaagaaattagcagagtacggaaagacatgtacaatgacacattaaatggcagtacagagaaaaggagtgcagaattgcctgatgctgtgggacctattgttcagttacaagagaaactttatgtgcctgtaaaagaatacccagattttaattttgttgggagaatccttggacctagaggacttacagccaaacaacttgaagcagaaaccggatgtaaaatcatggtccgaggcaaaggctcaatgagggataaaaaaaaggtagaaattgagaagctggattaccatcattatctgcctctgttttttgatgggctttgtgaaatgacatttccctatgagttttttgctcggcaaggaatccacgacatgctggaacacggtgggaacaagatcctacctgtccttccacagctcattatcccgataaaaaatgccttgaacctccgaaaccgacaggtcatctgtgtcactctcaaggtcctccagcatctggttgtgtcagctgagatggtgggcaaggccttggtgccttattaccgtcaaatcctccctgtcctgaacatctttaagaatatgaatgggtcttactctttgcccaggctggagtgcagtggcgcgatcatggctcgttgcaacctcgaccacctgggctcaagtgatcctcccacctcagcctctcaagtagctgagattatagtgaactccggagacggcattgactacagccagcagaagagggagaacattggggacttgatccaggagacactggaggccttcgagcgctacggaggagaaaatgcctttatcaacattaagtacgtggtcccaacctacgagtcttgcttgctaaactaa

SEQ ID NO: 277 - DNA, 303 bp, Homo sapiens
atggtcggggaaatggaaacgaaggagaagccgaagcccaccccagattacctgatgcagctgatgaacgacaagaagctcatgagcagcctgcccaacttctgcgggatcttcaaccacctcgagcggctgctggacgaagtgaactccggagacggcattgactacagccagcagaagagggagaacattggggacttgatccaggagacactggaggccttcgagcgctacggaggagaaaatgcctttatcaacattaagtacgtggtcccaacctacgagtcttgcttgctaaactaa

SEQ ID NO: 278 - DNA, 885 bp, Homo sapiens
atggtcggggaaatggaaacgaaggagaagccgaagcccaccccagattacctgatgcagctgatgaacgacaagaagctcatgagcagcctgcccaacttctgcgggatcttcaaccacctcgagcggctgctggacgaagaaattagcagagtacggaaagacatgtacaatgacacattaaatggcagtacagagaaaaggagtgcagaattgcctgatgctgtgggacctattgttcagttacaagagaaactttatgtgcctgtaaaagaatacccagattttaattttgttgggagaatccttggacctagaggacttacagccaaacaacttgaagcagaaaccggatgtaaaatcatggtccgaggcaaaggctcaatgagggataaaaaaaaggtagaaattgagaagctggattaccatcattatctgcctctgttttttgatgggctttgtgaaatgacatttccctatgagttttttgctcggcaaggaatccacgacatgctggaacacggtgggaacaagatcctacctgtccttccacagctcattatcccgataaaaaatgccttgaacctccgaaaccgacaggtcatctgtgtcactctcaaggtcctccagcatctggttgtgtcagctgagatggtgggcaaggccttggtgccttattaccgtcaaatcctccctgtcctgaacatctttaagaatatgaatgtgaactccggagacggcattgactacagccagcagaagagggagaacattggggacttgatccaggagacactggaggccttcgagcgctacggaggagaaaatgcctttatcaacattaagtacgtggtcccaacctacgagtcttgcttgctaaactaa

SEQ ID NO: 279 - DNA, 768 bp, Homo sapiens
atggtcggggaaatggaaacgaaggagaagccgaagcccaccccagattacctgatgcagctgatgaacgacaagaagctcatgagcagcctgcccaacttctgcgggatcttcaaccacctcgagcggctgctggacgaagaaattagcagagtacggaaagacatgtacaatgacacattaaatggcagtacagagaaaaggagtgcagaattgcctgatgctgtgggacctattgttcagttacaagagaaactttatgtgcctgtaaaagaatacccagatgtagaaattgagaagctggattaccatcattatctgcctctgttttttgatgggctttgtgaaatgacatttccctatgagttttttgctcggcaaggaatccacgacatgctggaacacggtgggaacaagatcctacctgtccttccacagctcattatcccgataaaaaatgccttgaacctccgaaaccgacaggtcatctgtgtcactctcaaggtcctccagcatctggttgtgtcagctgagatggtgggcaaggccttggtgccttattaccgtcaaatcctccctgtcctgaacatctttaagaatatgaatgtgaactccggagacggcattgactacagccagcagaagagggagaacattggggacttgatccaggagacactggaggccttcgagcgctacggaggagaaaatgcctttatcaacattaagtacgtggtcccaacctacgagtcttgcttgctaaactaa

SEQ ID NO: 280 - DNA, 1182 bp, Homo sapiens
atggcaaaagatgccggtctaattgaagccaacggagaactcaaggtcttcatagaccagaaccttagtcccgggaaaggcgtggtgtccctcgtggccgttcacccctccaccgtcaacccgctcgggaagcagctcttgccaaaaacctttggacagtccaatgtcaacattgcccagcaagtggtgtggaagatttccttacaagggccgtgttacatgacactgttaatgattgcatttggcttgctgtgggggcatctcttgcggatcaaacccacgcagagcgtcttcatttccacgtgtctgtccttgtcaagcacacccctcgtgtccaggttcctcatgggcagtgctcggggtgacaaagaaggcgacattgactacagcaccgtgctcctcggcatgctggtgacgcaggacgtgcagctcgggctcttcatggccgtcatgccgactctcatacaggcgggcgccagtgcatcttctagcattgtcgtggaagttctccgaatcctggttttgattggtcagattcttttttcactagcggcggtttttcttttatgtcttgttataaagaagtatctcattggaccctattatcggaagctgcacatggaaagcaaggggaacaaagaaatcctgatcttgggaatatctgcctttatcttcttaatgttaacggtcacggagctgctggacgtctccatggagctgggctgtttcctggctggagcgctcgtctcctctcagggccccgtggtcaccgaggagatcgccacctccatcgaacccatccgcgacttcctggccatcgttttcttcgcctccatagggctccacgtgttccccacgtttgtggcgtacgagctcacggtgctggtgttcctcaccttgtcagtggtggtgatgaagtttctcctggcggcgctggtcctgtctctcattctgccgaggagcagccagtacatcaagtggatcgtctctgcggggcttgcccaggtcagcgagttttcctttgtcctggggagccgggcgcgaagagcgggcgtcatctctcgggaggtgtacctccttatactgagtgtgaccacgctcagcctcttgctcgccccggtgctgtggagagctgcaatcacgaggtgtgtgcccagaccggagagacggtccagcctctga

SEQ ID NO: 281 - DNA, 276 bp, Homo sapiens
atggcaaaagattttctcctggcggcgctggtcctgtctctcattctgccgaggagcagccagtacatcaagtggatcgtctctgcggggcttgcccaggtcagcgagttttcctttgtcctggggagccgggcgcgaagagcgggcgtcatctctcgggaggtgtacctccttatactgagtgtgaccacgctcagcctcttgctcgccccggtgctgtggagagctgcaatcacgaggtgtgtgcccagaccggagagacggtccagcctctga

SEQ ID NO: 282 - DNA, 2034 bp, Homo sapiens
atgaaggtgttgggaagaagcttcttctgggtgctgtttcccgtccttccctgggcggtgcaggctgtggagcacgaggaggtggcgcagcgtgtgatcaaactgcaccgcgggcgaggggtggctgccatgcagagccggcagtgggtccgggacagctgcaggaagctctcagggcttctccgccagaagaatgcagttctgaacaaactgaaaactgcaattggagcagtggagaaagacgtgggcctgtcggatgaagagaaactgtttcaggtgcacacgtttgaaattttccagaaagagctgaatgaaagtgaaaattccgttttccaagctgtctacggactgcagagagccctgcagggggattacaaagatgtcgtgaacatgaaggagagcagccggcagcgcctggaggccctgagagaggctgcaataaaggaagaaacagaatatatggaacttctggcagcagaaaaacatcaagttgaagcccttaaaaatatgcaacatcaaaaccaaagtttatccatgcttgacgagattcttgaagatgtaagaaaggcagcggatcgtctggaggaagagatagaggaacatgcttttgacgacaataaatcagtcaagggggtcaattttgaggcagttctgagggtggaggaagaagaggccaattctaagcaaaatataacaaaacgagaagtggaggatgacttgggtcttagcatgctgattgactcccagaacaaccagtatattttgaccaagcccagagattcaaccatcccacgtgcagatcaccactttataaaggacattgttaccataggaatgctgtccttgccttgtggctggctatgtacagccataggattgcctacaatgtttggttatattatttgtggtgtacttctgggaccttcaggactaaatagtattaagtctattgtgcaagtggagacattaggagaatttggggtgttttttactctttttcttgttggcttagaattttctccagaaaagctaagaaaggtgtggaagatttccttacaagggccgtgttacatgacactgttaatgattgcatttggcttgctgtgggggcatctcttgcggatcaaacccacgcagagcgtcttcatttccacgtgtctgtccttgtcaagcacacccctcgtgtccaggttcctcatgggcagtgctcggggtgacaaagaaggcgacattgactacagcaccgtgctcctcggcatgctggtgacgcaggacgtgcagctcgggctcttcatggccgtcatgccgactctcatacaggcgggcgccagtgcatcttctagcattgtcgtggaagttctccgaatcctggttttgattggtcagattcttttttcactagcggcggtttttcttttatgtcttgttataaagaagtatctcattggaccctattatcggaagctgcacatggaaagcaaggggaacaaagaaatcctgatcttgggaatatctgcctttatcttcttaatgttaacggtcacggagctgctggacgtctccatggagctgggctgtttcctggctggagcgctcgtctcctctcagggccccgtggtcaccgaggagatcgccacctccatcgaacccatccgcgacttcctggccatcgttttcttcgcctccatagggctccacgtgttccccacgtttgtggcgtacgagctcacggtgctggtgttcctcaccttgtcagtggtggtgatgaagtttctcctggcggcgctggtcctgtctctcattctgccgaggagcagccagtacatcaagtggatcgtctctgcggggcttgcccaggtcagcgagttttcctttgtcctggggagccgggcgcgaagagcgggcgtcatctctcgggaggtgtacctccttatactgagtgtgaccacgctcagcctcttgctcgccccggtgctgtggagagctgcaatcacgaggtgtgtgcccagaccggagagacggtccagcctctga

SEQ ID NO: 283 - DNA, 429 bp, Homo sapiens
atggcaaaagatgccggtctaattgaagccaacggagaactcaaggtcttcatagaccagaaccttagtcccgggaaaggcgacattgactacagcaccgtgctcctcggcatgctggtgacgcaggacgtgcagctcgggctcttcatggccgtcatgccgactctcatacaggcgggcgccagtgcatcttctagcattgtcgtggaagttctccgaatcctggttttgattggtcagattcttttttcactagcggcggtttttcttttatgtcttgttataaagaagtatctcattggaccctattatcggaagctgcacatggaaagcaaggggaacaaagaaatcctgatcttgggaatatctgcctttatcttcttaatgttaacggtaattctcaaactatgtgttatttatgtaatctga

SEQ ID NO: 284 - DNA, 681 bp, Homo sapiens
atggcaaaagatgccggtctaattgaagccaacggagaactcaaggtcttcatagaccagaaccttagtcccgggaaaggcgtggtgtccctcgtggccgttcacccctccaccgtcaacccgctcgggaagcagctcttgccaaaaacctttggacagtccaatgtcaacattgcccagcaagtggtcacggagctgctggacgtctccatggagctgggctgtttcctggctggagcgctcgtctcctctcagggccccgtggtcaccgaggagatcgccacctccatcgaacccatccgcgacttcctggccatcgttttcttcgcctccatagggctccacgtgttccccacgtttgtggcgtacgagctcacggtgctggtgttcctcaccttgtcagtggtggtgatgaagtttctcctggcggcgctggtcctgtctctcattctgccgaggagcagccagtacatcaagtggatcgtctctgcggggcttgcccaggtcagcgagttttcctttgtcctggggagccgggcgcgaagagcgggcgtcatctctcgggaggtgtacctccttatactgagtgtgaccacgctcagcctcttgctcgccccggtgctgtggagagctgcaatcacgaggtgtgtgcccagaccggagagacggtccagcctctga

SEQ ID NO: 285 - DNA, 888 bp, Homo sapiens
atggcaaaagatgccggtctaattgaagccaacggagaactcaaggtcttcatagaccagaaccttagtcccgggaaaggcgacattgactacagcaccgtgctcctcggcatgctggtgacgcaggacgtgcagctcgggctcttcatggccgtcatgccgactctcatacaggcgggcgccagtgcatcttctagcattgtcgtggaagttctccgaatcctggttttgattggtcagattcttttttcactagcggcggtttttcttttatgtcttgttataaagaagtatctcattggaccctattatcggaagctgcacatggaaagcaaggggaacaaagaaatcctgatcttgggaatatctgcctttatcttcttaatgttaacggtcacggagctgctggacgtctccatggagctgggctgtttcctggctggagcgctcgtctcctctcagggccccgtggtcaccgaggagatcgccacctccatcgaacccatccgcgacttcctggccatcgttttcttcgcctccatagggctccacgtgttccccacgtttgtggcgtacgagctcacggtgctggtgttcctcaccttgtcagtggtggtgatgaagtttctcctggcggcgctggtcctgtctctcattctgccgaggagcagccagtacatcaagtggatcgtctctgcggggcttgcccaggtcagcgagttttcctttgtcctggggagccgggcgcgaagagcgggcgtcatctctcgggaggtgtacctccttatactgagtgtgaccacgctcagcctcttgctcgccccggtgctgtggagagctgcaatcacgaggtgtgtgcccagaccggagagacggtccagcctctga

SEQ ID NO: 286 - DNA, 723 bp, Homo sapiens
atggcaaaagatgccggtctaattgaagccaacggagaactcaaggtcttcatagaccagaaccttagtcccgggaaaggcgtggtgtccctcgtggccgttcacccctccaccgtcaacccgctcgggaagcagctcttgccaaaaacctttggacagtccaatgtcaacattgcccagcaagtggtgtggaagatttccttacaagggccgtgttacatgacactgttaatgattgcatttggcttgctgtgggggcatctcttgcggatcaaacccacgcagagcgtcttcatttccacgtgtctgtccttgtcaagcacacccctcgtgtccaggttcctcatgggcagtgctcggggtgacaaagaaggcgacattgactacagcaccgtgctcctcggcatgctggtgacgcaggacgtgcagctcgggctcttcatggccgtcatgccgactctcatacaggcgggcgccagtgcatcttctagcattgtcgtggaagttctccgaatcctggttttgattggtcagattcttttttcactagcggcggtttttcttttatgtcttgttataaagaagtatctcattggaccctattatcggaagctgcacatggaaagcaaggggaacaaagaaatcctgatcttgggaatatctgcctttatcttcttaatgttaacggtaattctcaaactatgtgttatttatgtaatctga

SEQ ID NO: 287 - DNA, 450 bp, Homo sapiens
atggcaaaagatgccggtctaattgaagccaacggagaactcaaggtcttcatagaccagaaccttagtcccgggaaaggcgtggtgtccctcgtggccgttcacccctccaccgtcaacccgctcgggaagcagctcttgccaaaaacctttggacagtccaatgtcaacattgcccagcaagtgtttctcctggcggcgctggtcctgtctctcattctgccgaggagcagccagtacatcaagtggatcgtctctgcggggcttgcccaggtcagcgagttttcctttgtcctggggagccgggcgcgaagagcgggcgtcatctctcgggaggtgtacctccttatactgagtgtgaccacgctcagcctcttgctcgccccggtgctgtggagagctgcaatcacgaggtgtgtgcccagaccggagagacggtccagcctctga

SEQ ID NO: 288 - DNA, 1575 bp, Homo sapiens
atgaaggtgttgggaagaagcttcttctgggtgctgtttcccgtccttccctgggcggtgcaggctgtggagcacgaggaggtggcgcagcgtgtgatcaaactgcaccgcgggcgaggggtggctgccatgcagagccggcagtgggtccgggacagctgcaggaagctctcagggcttctccgccagaagaatgcagttctgaacaaactgaaaactgcaattggagcagtggagaaagacgtgggcctgtcggatgaagagaaactgtttcaggtgcacacgtttgaaattttccagaaagagctgaatgaaagtgaaaattccgttttccaagctgtctacggactgcagagagccctgcagggggattacaaagatgtcgtgaacatgaaggagagcagccggcagcgcctggaggccctgagagaggctgcaataaaggaagaaacagaatatatggaacttctggcagcagaaaaacatcaagttgaagcccttaaaaatatgcaacatcaaaaccaaagtttatccatgcttgacgagattcttgaagatgtaagaaaggcagcggatcgtctggaggaagagatagaggaacatgcttttgacgacaataaatcagtcaagggggtcaattttgaggcagttctgagggtggaggaagaagaggccaattctaagcaaaatataacaaaacgagaagtggaggatgacttgggtcttagcatgctgattgactcccagaacaaccagtatattttgaccaagcccagagattcaaccatcccacgtgcagatcaccactttataaaggacattgttaccataggaatgctgtccttgccttgtggctggctatgtacagccataggattgcctacaatgtttggttatattatttgtggtgtacttctgggaccttcaggactaaatagtattaagtctattgtgcaagtggagacattaggagaatttggggtgttttttactctttttcttgttggcttagaattttctccagaaaagctaagaaaggtgtggaagatttccttacaagggccgtgttacatgacactgttaatgattgcatttggcttgctgtgggggcatctcttgcggatcaaacccacgcagagcgtcttcatttccacgtgtctgtccttgtcaagcacacccctcgtgtccaggttcctcatgggcagtgctcggggtgacaaagaaggcgacattgactacagcaccgtgctcctcggcatgctggtgacgcaggacgtgcagctcgggctcttcatggccgtcatgccgactctcatacaggcgggcgccagtgcatcttctagcattgtcgtggaagttctccgaatcctggttttgattggtcagattcttttttcactagcggcggtttttcttttatgtcttgttataaagaagtatctcattggaccctattatcggaagctgcacatggaaagcaaggggaacaaagaaatcctgatcttgggaatatctgcctttatcttcttaatgttaacggtaattctcaaactatgtgttatttatgtaatctga

SEQ ID NO: 289 - DNA, 255 bp, Homo sapiens
atgtcaacattgcccagcaagtgcattgtcgtggaagttctccgaatcctggttttgattggtcagattcttttttcactagcggcggtttttcttttatgtcttgttataaagaagtatctcattggaccctattatcggaagctgcacatggaaagcaaggggaacaaagaaatcctgatcttgggaatatctgcctttatcttcttaatgttaacggtaattctcaaactatgtgttatttatgtaatctga

SEQ ID NO: 290 - DNA, 423 bp, Homo sapiens
atggcaaaagatgccggtctaattgaagccaacggagaactcaaggtcttcatagaccagaaccttagtcccgggaaagggctccacgtgttccccacgtttgtggcgtacgagctcacggtgctggtgttcctcaccttgtcagtggtggtgatgaagtttctcctggcggcgctggtcctgtctctcattctgccgaggagcagccagtacatcaagtggatcgtctctgcggggcttgcccaggtcagcgagttttcctttgtcctggggagccgggcgcgaagagcgggcgtcatctctcgggaggtgtacctccttatactgagtgtgaccacgctcagcctcttgctcgccccggtgctgtggagagctgcaatcacgaggtgtgtgcccagaccggagagacggtccagcctctga

SEQ ID NO: 291 - DNA, 321 bp, Homo sapiens
atggaggatttgctcgacttggacgaggagcttcgctacagcttggctacctccagggccaagatgggtcgccgagctcaacaggagtcagcgcaggccgagaatcacctcaatggcaagaattcctctttgactctgactggagagacttcctctgctaaattacctcgctgccgacagggaggctgggcaggtgattccgtgaaggcttcgaaagggtcctccgcggaagggcagctgaatggactccagagcagccttaaccctgcagcctttgtgcccatcaccagctctacagatcctgctcacactaaaatatga

SEQ ID NO: 292 - DNA, 777 bp, Homo sapiens
atggaggatttgctcgacttggacgaggagcttcgctacagcttggctacctccagggccaagatgggtcgccgagctcaacaggagtcagcgcaggccgagaatcacctcaatggcaagaattcctctttgactctgactggagaggtaacaaacctgaatttggcaactggcatcataaacagaagcagtgcttcagctcccccaaccctccgacccatcatcagtcctagtggcccgacatggtctacacagtcagacccccaagctcccgagaatcactccagctctcctggaagcaggagcctgcagacagggggatttgcctgggaaggagaagtagaaaacaacgtgtacagccaggctacaggggtggtcccccagcacaagtatcaccccacagcaggcagctatcagcttcaatttgccctgcagcaacttgaacaacaaaaacttcagtcccggcagctcctggaccagagtcgagcccggcaccaggcaatctttggcagccagacactacctaactccaatttatggacaatgaataatggtgcaggttgtagaatttccagtgccacagctagtggccagaagccaaccactctgccacaaaaagtggtaccacctccaagttcttgcgcctccctggttcccaaacccccacccaaccacgaacaagtgctcagaagggcaacatcccagaaagcttccaatacccgcttcagatcctcctttcaaaactatttgtggtatttcttccaagcagtcagctga

SEQ ID NO: 293 - DNA, 822 bp, Homo sapiens
atggaggatttgctcgacttggacgaggagcttcgctacagcttggctacctccagggccaagatgggtcgccgagctcaacaggagtcagcgcaggccgagaatcacctcaatggcaagaattcctctttgactctgactggagaggtaacaaacctgaatttggcaactggcatcataaacagaagcagtgcttcagctcccccaaccctccgacccatcatcagtcctagtggcccgacatggtctacacagtcagacccccaagctcccgagaatcactccagctctcctggaagcaggagcctgcagacagggggatttgcctgggaaggagaagtagaaaacaacgtgtacagccaggctacaggggtggtcccccagcacaagtatcaccccacagcaggcagctatcagcttcaatttgccctgcagcaacttgaacaacaaaaacttcagtcccggcagctcctggaccagagtcgagcccggcaccaggcaatctttggcagccagacactacctaactccaatttatggacaatgaataatggtgcaggttgtagaatttccagtgccacagctagtggccagaagccaaccactctgccacaaaaagtggtaccacctccaagttcttgcgcctccctggttcccaaacccccacccaaccacgaacaagtgctcagaagggcaacatcccagaaagcttccaaagggtcctccgcggaagggcagctgaatggactccagagcagccttaaccctgcagcctttgtgcccatcaccagctctacagatcctgctcacactaaaatatga

SEQ ID NO: 294 - DNA, 1398 bp, Homo sapiens
atgaaaagaaatacctgtgatttgctttctcggagcaaaagttggaatgagaccgtggagctttttcgtgctaagatgccgttacggaaacatcgctgtcgtttcaagagctatgagcattgtttcacagcggccgaagctgtggattggctgcatgagctgctgaggtgcagtcaaaacttcggccctgaagtgacccgcaaacaaacggtccagctgctaaaaaaattcctgaagaatcacgttattgaagacatcaagggaaaatggggtgaggaagattttgaagacaatcgtcacttatacagatttcctccttcttcacccctgaaaccatatccaaagaagcccccaaaccaaaaggatgttattaaatttccagaatggaatgatctcccaccaggcacttcacaagagaacatcccagtgaggccagttgtgatgaattctgagatgtggtacaagcgtcacagtattgcaattggagaggtgccagcttgccgtcttgtccaccgcagacagctgacagaggccaatgtagaagagatatggaagtctatgacattatcatacttacagaaaattcttggcctggattccttagaagaagttttagacgtcaaacttgtcaattcgaagttcatcatccataatgtatatagtgttagcaagcagggagttgttattcttgatgacaagtcaaaagaacttcctcattgggtgctgtcagctatgaagtgtttggcaaattggcccaactgttctgatttgaagcagcctatgtacttgggatttgaaaaagatgtctttaaaaccatagctgattactatggtcacttgaaagagcctctacttacatttcatctttttgatgcttttgtcagtgtactgggtttgttacagaaggagaaagtggcagttgaagcatttcagatttgctgccttctcctacctcctgaaaataggagaaagttacagctattgatgaggatgatggcaaggatttgcttaaacaaagagatgccacccctgtgtgatggctttggtacccgaacactgatggttcagacattttcccgttgcatcttgtgttccaaggatgaagtggacttggatgagttattagctgctagattggtaacgtttctgatggacaattaccaggaaattctgaaagtccctttggccttgcagacctctatagaggagcgtgtggctcatctacgaagagtccagtttcagaaatcctatcctgaagtctatcaagaacgatttcctacaccagaaagtgcagcacttctgtttcctgaaaaacccaaaccgaaaccacagctgctaatgtgggcactaaagaagcctttccaaccatttcaaagaactagaagttttcgaatgtaa

SEQ ID NO: 295 - DNA, 1584 bp, Homo sapiens
atgaaaagaaatacctgtgatttgctttctcggagcaaaagttggaatgagaccgtggagctttttcgtgctaagatgccgttacggaaacatcgctgtcgtttcaagagctatgagcattgtttcacagcggccgaagctgtggattggctgcatgagctgctgaggtgcagtcaaaacttcggccctgaagtgacccgcaaacaaacggtccagctgctaaaaaaattcctgaagaatcacgttattgaagacatcaagggaaaatggggtgaggaagattttgaagacaatcgtcacttatacagatttcctccttcttcacccctgaaaccatatccaaagaagcccccaaaccaaaaggatgttattaaatttccagaatggaatgatctcccaccaggcacttcacaagagaacatcccagtgaggccagttgtgatgaattctgagatgtggtacaagcgtcacagtattgcaattggagaggtgccagcttgccgtcttgtccaccgcagacagctgacagaggccaatgtagaagagatatggaagtctatgacattatcatacttacagaaaattcttggcctggattccttagaagaagttttagacgtcaaacttgtcaattcgaagttcatcatccataatgtatatagtgttagcaagcagggagttgttattcttgatgacaagtcaaaagaacttcctcattgggtgctgtcagctatgaagtgtttggcaaattggcccaactgttctgatttgaagcagcctatgtacttgggatttgaaaaagatgtctttaaaaccatagctgattactatggtcacttgaaagagcctctacttacatttcatctttttgatgcttttgtcagtgtactgggtttgttacagaaggagaaagtggcagttgaagcatttcagatttgctgccttctcctacctcctgaaaataggagaaagttacagctattgatgaggatgatggcaaggatttgcttaaacaaagagatgccacccctgtgtgatggctttggtacccgaacactgatggttcagacattttcccgttgcatcttgtgttccaaggatgaagtggacttggatgagttattagctgctagattggtaacgtttctgatggacaattaccaggaaattctgaaagtccctttggccttgcagacctctatagaggagcgtgtggctcatctacgaagagtccagataaaatacccaggagctgatatggatatcactttatctgctccatcattttgccgtcaaattagtccagaggaatttgaatatcaaagatcatatggctctcaggaacctctggcagccttgttggaggaagtcataacagatgccaaactctccaacaaagagaaaaagaagaaactgaagcagtttcagaaatcctatcctgaagtctatcaagaacgatttcctacaccagaaagtgcagcacttctgtttcctgaaaaacccaaaccgaaaccacagctgctaatgtgggcactaaagaagcctttccaaccatttcaaagaactagaagttttcgaatgtaa

SEQ ID NO: 296 - DNA, 1434 bp, Homo sapiens
atggaagaaggccacatggtaaaatatggaggcctccagccaacagtcagcaaggaactgagacaagtcaacaaccattggaatgagaccgtggagctttttcgtgctaagatgccgttacggaaacatcgctgtcgtttcaagagctatgagcattgtttcacagcggccgaagctgtggattggctgcatgagctgctgaggtgcagtcaaaacttcggccctgaagtgacccgcaaacaaacggtccagctgctaaaaaaattcctgaagaatcacgttattgaagacatcaagggaaaatggggtgaggaagattttgaagacaatcgtcacttatacagatttcctccttcttcacccctgaaaccatatccaaagaagcccccaaaccaaaaggatgttattaaatttccagaatggaatgatctcccaccaggcacttcacaagagaacatcccagtgaggccagttgtgatgaattctgagatgtggtacaagcgtcacagtattgcaattggagaggtgccagcttgccgtcttgtccaccgcagacagctgacagaggccaatgtagaagagatatggaagtctatgacattatcatacttacagaaaattcttggcctggattccttagaagaagttttagacgtcaaacttgtcaattcgaagttcatcatccataatgtatatagtgttagcaagcagggagttgttattcttgatgacaagtcaaaagaacttcctcattgggtgctgtcagctatgaagtgtttggcaaattggcccaactgttctgatttgaagcagcctatgtacttgggatttgaaaaagatgtctttaaaaccatagctgattactatggtcacttgaaagagcctctacttacatttcatctttttgatgcttttgtcagtgtactgggtttgttacagaaggagaaagtggcagttgaagcatttcagatttgctgccttctcctacctcctgaaaataggagaaagttacagctattgatgaggatgatggcaaggatttgcttaaacaaagagatgccacccctgtgtgatggctttggtacccgaacactgatggttcagacattttcccgttgcatcttgtgttccaaggatgaagtggacttggatgagttattagctgctagattggtaacgtttctgatggacaattaccaggaaattctgaaagtccctttggccttgcagacctctatagaggagcgtgtggctcatctacgaagagtccagtttcagaaatcctatcctgaagtctatcaagaacgatttcctacaccagaaagtgcagcacttctgtttcctgaaaaacccaaaccgaaaccacagctgctaatgtgggcactaaagaagcctttccaaccatttcaaagaactagaagttttcgaatgtaa

SEQ ID NO: 297 - DNA, 1620 bp, Homo sapiens
atggaagaaggccacatggtaaaatatggaggcctccagccaacagtcagcaaggaactgagacaagtcaacaaccattggaatgagaccgtggagctttttcgtgctaagatgccgttacggaaacatcgctgtcgtttcaagagctatgagcattgtttcacagcggccgaagctgtggattggctgcatgagctgctgaggtgcagtcaaaacttcggccctgaagtgacccgcaaacaaacggtccagctgctaaaaaaattcctgaagaatcacgttattgaagacatcaagggaaaatggggtgaggaagattttgaagacaatcgtcacttatacagatttcctccttcttcacccctgaaaccatatccaaagaagcccccaaaccaaaaggatgttattaaatttccagaatggaatgatctcccaccaggcacttcacaagagaacatcccagtgaggccagttgtgatgaattctgagatgtggtacaagcgtcacagtattgcaattggagaggtgccagcttgccgtcttgtccaccgcagacagctgacagaggccaatgtagaagagatatggaagtctatgacattatcatacttacagaaaattcttggcctggattccttagaagaagttttagacgtcaaacttgtcaattcgaagttcatcatccataatgtatatagtgttagcaagcagggagttgttattcttgatgacaagtcaaaagaacttcctcattgggtgctgtcagctatgaagtgtttggcaaattggcccaactgttctgatttgaagcagcctatgtacttgggatttgaaaaagatgtctttaaaaccatagctgattactatggtcacttgaaagagcctctacttacatttcatctttttgatgcttttgtcagtgtactgggtttgttacagaaggagaaagtggcagttgaagcatttcagatttgctgccttctcctacctcctgaaaataggagaaagttacagctattgatgaggatgatggcaaggatttgcttaaacaaagagatgccacccctgtgtgatggctttggtacccgaacactgatggttcagacattttcccgttgcatcttgtgttccaaggatgaagtggacttggatgagttattagctgctagattggtaacgtttctgatggacaattaccaggaaattctgaaagtccctttggccttgcagacctctatagaggagcgtgtggctcatctacgaagagtccagataaaatacccaggagctgatatggatatcactttatctgctccatcattttgccgtcaaattagtccagaggaatttgaatatcaaagatcatatggctctcaggaacctctggcagccttgttggaggaagtcataacagatgccaaactctccaacaaagagaaaaagaagaaactgaagcagtttcagaaatcctatcctgaagtctatcaagaacgatttcctacaccagaaagtgcagcacttctgtttcctgaaaaacccaaaccgaaaccacagctgctaatgtgggcactaaagaagcctttccaaccatttcaaagaactagaagttttcgaatgtaa

SEQ ID NO: 298 - DNA, 1323 bp, Homo sapiens
atgccgttacggaaacatcgctgtcgtttcaagagctatgagcattgtttcacagcggccgaagctgtggattggctgcatgagctgctgaggtgcagtcaaaacttcggccctgaagtgacccgcaaacaaacggtccagctgctaaaaaaattcctgaagaatcacgttattgaagacatcaagggaaaatggggtgaggaagattttgaagacaatcgtcacttatacagatttcctccttcttcacccctgaaaccatatccaaagaagcccccaaaccaaaaggatgttattaaatttccagaatggaatgatctcccaccaggcacttcacaagagaacatcccagtgaggccagttgtgatgaattctgagatgtggtacaagcgtcacagtattgcaattggagaggtgccagcttgccgtcttgtccaccgcagacagctgacagaggccaatgtagaagagatatggaagtctatgacattatcatacttacagaaaattcttggcctggattccttagaagaagttttagacgtcaaacttgtcaattcgaagttcatcatccataatgtatatagtgttagcaagcagggagttgttattcttgatgacaagtcaaaagaacttcctcattgggtgctgtcagctatgaagtgtttggcaaattggcccaactgttctgatttgaagcagcctatgtacttgggatttgaaaaagatgtctttaaaaccatagctgattactatggtcacttgaaagagcctctacttacatttcatctttttgatgcttttgtcagtgtactgggtttgttacagaaggagaaagtggcagttgaagcatttcagatttgctgccttctcctacctcctgaaaataggagaaagttacagctattgatgaggatgatggcaaggatttgcttaaacaaagagatgccacccctgtgtgatggctttggtacccgaacactgatggttcagacattttcccgttgcatcttgtgttccaaggatgaagtggacttggatgagttattagctgctagattggtaacgtttctgatggacaattaccaggaaattctgaaagtccctttggccttgcagacctctatagaggagcgtgtggctcatctacgaagagtccagtttcagaaatcctatcctgaagtctatcaagaacgatttcctacaccagaaagtgcagcacttctgtttcctgaaaaacccaaaccgaaaccacagctgctaatgtgggcactaaagaagcctttccaaccatttcaaagaactagaagttttcgaatgtaa

SEQ ID NO: 299 - DNA, 849 bp, Homo sapiens
atggaagttctgcgtccacagcttataagaattgatggccggaattacaggaagaatccagtccaagaacagacctatcaacatgaagaagatgaagaggacttctatcaaggctccatggagtgtgctgatgagccctgtgatgcctacgaggtggagcagaccccacaaggattccggtctactttgagggcccccagcttgctctataagcatatagttggaaagagaggggacactaggaagaaaatagaaatggagaccaaaacttctattagcattcctaaacctggacaagacggggaaattgtaatcactggccagcatcgaaatggtgtaatttcagcccgaacacggattgatgttcttttggacacttttcgaagaaagcagcccttcactcacttccttgcctttttcctcaatgaagttgaggttcaggaaggattcctgagattccaggaggaagtactggcgaagtgctccatgggtctgacatttcaggaggtggagaacttctttactttcctaaagaacattaatgatgtggacactgcattgagtttttaccatatggctggagcatctcttgataaagtgaccatgcagcaggtggccaggacagtggctaaagtggagctctcagaccacgtgtgtgatgtggtgtttgcactctttgactgtgatggcaatggcgaactgagcaataaggaatttgtttccatcatgaagcaacggctgatgagaggcctggaaaagcccaaagacatgggtttcactcgcctcatgcaggccatgtggaaatgtgcacaggaaactgcctgggacttcgctttacccaaacagtaa

SEQ ID NO: 300 - DNA, 1206 bp, Homo sapiens
atggaagttctgcgtccacagcttataagaattgatggccggaattacaggaagaatccagtccaagaacagacctatcaacatgaagaagatgaagaggacttctatcaaggctccatggagtgtgctgatgagccctgtgatgcctacgaggtggagcagaccccacaaggattccggtctactttgagggcccccagcttgctctataatctcattcacttgaacacatcaaacgactgtgggttccagaagataactttggattgtcagaatatttatacttggaagtccaggcatatagttggaaagagaggggacactaggaagaaaatagaaatggagaccaaaacttctattagcattcctaaacctggacaagacggggaaattgtaatcactggccagcatcgaaatggtgtaatttcagcccgaacacggattgatgttcttttggacacttttcgaagaaagcagcccttcactcacttccttgcctttttcctcaatgaagttgaggttcaggaaggattcctgagattccaggaggaagtactggcgaagtgctccatggatcatggggttgacagcagcattttccagaatcctaaaaagcttcatctaactattgggatgttggtgcttttgagtgaggaagagatccagcagacatgtgagatgctacagcagtgtaaagaggaattcattaatgatatttctgggggtaaacccctagaagtggagatggcagggatagaatacatgaatgatgatcctggcatggtggatgttctttacgccaaagtccatatgaaagatggctccaacaggctacaagaattagttgatcgagtgctggaacgttttcaggcatctggactaatagtgaaagagtggaatagtgtgaaactgcatgctacagttatgaatacactattcaggaaagaccccaatgtgaccatgcagcaggtggccaggacagtggctaaagtggagctctcagaccacgtgtgtgatgtggtgtttgcactctttgactgtgatggcaatggcgaactgagcaataaggaatttgtttccatcatgaagcaacggctgatgagaggcctggaaaagcccaaagacatgggtttcactcgcctcatgcaggccatgtggaaatgtgcacaggaaactgcctgggacttcgctttacccaaacagtaa

SEQ ID NO: 301 - DNA, 594 bp, Homo sapiens
atggagaccaaaacttctattagcattcctaaacctggacaagacggggaaattgtaatcactggccagcatcgaaatggtgtaatttcagcccgaacacggattgatgttcttttggacacttttcgaagaaagcagcccttcactcacttccttgcctttttcctcaatgaagttgaggttcaggaaggattcctgagattccaggaggaagtactggcgaagtgctccatgggtctgacatttcaggaggtggagaacttctttactttcctaaagaacattaatgatgtggacactgcattgagtttttaccatatggctggagcatctcttgataaagtgaccatgcagcaggtggccaggacagtggctaaagtggagctctcagaccacgtgtgtgatgtggtgtttgcactctttgactgtgatggcaatggcgaactgagcaataaggaatttgtttccatcatgaagcaacggctgatgagaggcctggaaaagcccaaagacatgggtttcactcgcctcatgcaggccatgtggaaatgtgcacaggaaactgcctgggacttcgctttacccaaacagtaa

SEQ ID NO: 302 - DNA, 933 bp, Homo sapiens
atggaagttctgcgtccacagcttataagaattgatggccggaattacaggaagaatccagtccaagaacagacctatcaacatgaagaagatgaagaggacttctatcaaggctccatggagtgtgctgatgagccctgtgatgcctacgaggtggagcagaccccacaaggattccggtctactttgagggcccccagcttgctctataatctcattcacttgaacacatcaaacgactgtgggttccagaagataactttggattgtcagaatatttatacttggaagtccaggcatatagttggaaagagaggggacactaggaagaaaatagaaatggagaccaaaacttctattagcattcctaaacctggacaagacggggaaattgtaatcactggccagcatcgaaatggtgtaatttcagcccgaacacggattgatgttcttttggacacttttcgaagaaagcagcccttcactcacttccttgcctttttcctcaatgaagttgaggttcaggaaggattcctgagattccaggaggaagtactggcgaagtgctccatgggtctgacatttcaggaggtggagaacttctttactttcctaaagaacattaatgatgtggacactgcattgagtttttaccatatggctggagcatctcttgataaagtgaccatgcagcaggtggccaggacagtggctaaagtggagctctcagaccacgtgtgtgatgtggtgtttgcactctttgactgtgatggcaatggcgaactgagcaataaggaatttgtttccatcatgaagcaacggctgatgagaggcctggaaaagcccaaagacatgggtttcactcgcctcatgcaggccatgtggaaatgtgcacaggaaactgcctgggacttcgctttacccaaacagtaa

SEQ ID NO: 303 - DNA, 987 bp, Homo sapiens
atggaagttctgcgtccacagcttataagaattgatggccggaattacaggaagaatccagtccaagaacagacctatcaacatgaagaagatgaagaggacttctatcaaggctccatggagtgtgctgatgagccctgtgatgcctacgaggtggagcagaccccacaaggattccggtctactttgagggcccccagcttgctctataagcatatagttggaaagagaggggacactaggaagaaaatagaaatggagaccaaaacttctattagcattcctaaacctggacaagacggggaaattgtaatcactggccagcatcgaaatggtgtaatttcagcccgaacacggattgatgttcttttggacacttttcgaagaaagcagcccttcactcacttccttgcctttttcctcaatgaagttgaggttcaggaaggattcctgagattccaggaggaagtactggcgaagtgctccatgtttgaacgccatgaccctgtggatgggagaattactgagaggcagtttggtggcatgctacttgcctacagtggggtgcagtccaagaagctgaccgccatgcagaggcagctcaagaagcacttcaaagaaggaaagggtctgacatttcaggaggtggagaacttctttactttcctaaagaacattaatgatgtggacactgcattgagtttttaccatatggctggagcatctcttgataaagtgaccatgcagcaggtggccaggacagtggctaaagtggagctctcagaccacgtgtgtgatgtggtgtttgcactctttgactgtgatggcaatggcgaactgagcaataaggaatttgtttccatcatgaagcaacggctgatgagaggcctggaaaagcccaaagacatgggtttcactcgcctcatgcaggccatgtggaaatgtgcacaggaaactgcctgggacttcgctttacccaaacagtaa

SEQ ID NO: 304 - DNA, 1122 bp, Homo sapiens
atggaagttctgcgtccacagcttataagaattgatggccggaattacaggaagaatccagtccaagaacagacctatcaacatgaagaagatgaagaggacttctatcaaggctccatggagtgtgctgatgagccctgtgatgcctacgaggtggagcagaccccacaaggattccggtctactttgagggcccccagcttgctctataagcatatagttggaaagagaggggacactaggaagaaaatagaaatggagaccaaaacttctattagcattcctaaacctggacaagacggggaaattgtaatcactggccagcatcgaaatggtgtaatttcagcccgaacacggattgatgttcttttggacacttttcgaagaaagcagcccttcactcacttccttgcctttttcctcaatgaagttgaggttcaggaaggattcctgagattccaggaggaagtactggcgaagtgctccatggatcatggggttgacagcagcattttccagaatcctaaaaagcttcatctaactattgggatgttggtgcttttgagtgaggaagagatccagcagacatgtgagatgctacagcagtgtaaagaggaattcattaatgatatttctgggggtaaacccctagaagtggagatggcagggatagaatacatgaatgatgatcctggcatggtggatgttctttacgccaaagtccatatgaaagatggctccaacaggctacaagaattagttgatcgagtgctggaacgttttcaggcatctggactaatagtgaaagagtggaatagtgtgaaactgcatgctacagttatgaatacactattcaggaaagaccccaatgtgaccatgcagcaggtggccaggacagtggctaaagtggagctctcagaccacgtgtgtgatgtggtgtttgcactctttgactgtgatggcaatggcgaactgagcaataaggaatttgtttccatcatgaagcaacggctgatgagaggcctggaaaagcccaaagacatgggtttcactcgcctcatgcaggccatgtggaaatgtgcacaggaaactgcctgggacttcgctttacccaaacagtaa

SEQ ID NO: 305 - DNA, 1185 bp, Homo sapiens
atgaagtatcctgggacttggccctgtcagggcataattggaatatcatttggagaaagtgtcatggaagttctgcgtccacagcttataagaattgatggccggaattacaggaagaatccagtccaagaacagacctatcaacatgaagaagatgaagaggacttctatcaaggctccatggagtgtgctgatgagccctgtgatgcctacgaggtggagcagaccccacaaggattccggtctactttgagggcccccagcttgctctataagcatatagttggaaagagaggggacactaggaagaaaatagaaatggagaccaaaacttctattagcattcctaaacctggacaagacggggaaattgtaatcactggccagcatcgaaatggtgtaatttcagcccgaacacggattgatgttcttttggacacttttcgaagaaagcagcccttcactcacttccttgcctttttcctcaatgaagttgaggttcaggaaggattcctgagattccaggaggaagtactggcgaagtgctccatggatcatggggttgacagcagcattttccagaatcctaaaaagcttcatctaactattgggatgttggtgcttttgagtgaggaagagatccagcagacatgtgagatgctacagcagtgtaaagaggaattcattaatgatatttctgggggtaaacccctagaagtggagatggcagggatagaatacatgaatgatgatcctggcatggtggatgttctttacgccaaagtccatatgaaagatggctccaacaggctacaagaattagttgatcgagtgctggaacgttttcaggcatctggactaatagtgaaagagtggaatagtgtgaaactgcatgctacagttatgaatacactattcaggaaagaccccaatgtgaccatgcagcaggtggccaggacagtggctaaagtggagctctcagaccacgtgtgtgatgtggtgtttgcactctttgactgtgatggcaatggcgaactgagcaataaggaatttgtttccatcatgaagcaacggctgatgagaggcctggaaaagcccaaagacatgggtttcactcgcctcatgcaggccatgtggaaatgtgcacaggaaactgcctgggacttcgctttacccaaacagtaa

SEQ ID NO: 306 - DNA, 1050 bp, Homo sapiens
atgaagtatcctgggacttggccctgtcagggcataattggaatatcatttggagaaagtgtcatggaagttctgcgtccacagcttataagaattgatggccggaattacaggaagaatccagtccaagaacagacctatcaacatgaagaagatgaagaggacttctatcaaggctccatggagtgtgctgatgagccctgtgatgcctacgaggtggagcagaccccacaaggattccggtctactttgagggcccccagcttgctctataagcatatagttggaaagagaggggacactaggaagaaaatagaaatggagaccaaaacttctattagcattcctaaacctggacaagacggggaaattgtaatcactggccagcatcgaaatggtgtaatttcagcccgaacacggattgatgttcttttggacacttttcgaagaaagcagcccttcactcacttccttgcctttttcctcaatgaagttgaggttcaggaaggattcctgagattccaggaggaagtactggcgaagtgctccatgtttgaacgccatgaccctgtggatgggagaattactgagaggcagtttggtggcatgctacttgcctacagtggggtgcagtccaagaagctgaccgccatgcagaggcagctcaagaagcacttcaaagaaggaaagggtctgacatttcaggaggtggagaacttctttactttcctaaagaacattaatgatgtggacactgcattgagtttttaccatatggctggagcatctcttgataaagtgaccatgcagcaggtggccaggacagtggctaaagtggagctctcagaccacgtgtgtgatgtggtgtttgcactctttgactgtgatggcaatggcgaactgagcaataaggaatttgtttccatcatgaagcaacggctgatgagaggcctggaaaagcccaaagacatgggtttcactcgcctcatgcaggccatgtggaaatgtgcacaggaaactgcctgggacttcgctttacccaaacagtaa

SEQ ID NO: 307 - DNA, 912 bp, Homo sapiens
atgaagtatcctgggacttggccctgtcagggcataattggaatatcatttggagaaagtgtcatggaagttctgcgtccacagcttataagaattgatggccggaattacaggaagaatccagtccaagaacagacctatcaacatgaagaagatgaagaggacttctatcaaggctccatggagtgtgctgatgagccctgtgatgcctacgaggtggagcagaccccacaaggattccggtctactttgagggcccccagcttgctctataagcatatagttggaaagagaggggacactaggaagaaaatagaaatggagaccaaaacttctattagcattcctaaacctggacaagacggggaaattgtaatcactggccagcatcgaaatggtgtaatttcagcccgaacacggattgatgttcttttggacacttttcgaagaaagcagcccttcactcacttccttgcctttttcctcaatgaagttgaggttcaggaaggattcctgagattccaggaggaagtactggcgaagtgctccatgggtctgacatttcaggaggtggagaacttctttactttcctaaagaacattaatgatgtggacactgcattgagtttttaccatatggctggagcatctcttgataaagtgaccatgcagcaggtggccaggacagtggctaaagtggagctctcagaccacgtgtgtgatgtggtgtttgcactctttgactgtgatggcaatggcgaactgagcaataaggaatttgtttccatcatgaagcaacggctgatgagaggcctggaaaagcccaaagacatgggtttcactcgcctcatgcaggccatgtggaaatgtgcacaggaaactgcctgggacttcgctttacccaaacagtaa

SEQ ID NO: 308 - DNA, 867 bp, Homo sapiens
atggagaccaaaacttctattagcattcctaaacctggacaagacggggaaattgtaatcactggccagcatcgaaatggtgtaatttcagcccgaacacggattgatgttcttttggacacttttcgaagaaagcagcccttcactcacttccttgcctttttcctcaatgaagttgaggttcaggaaggattcctgagattccaggaggaagtactggcgaagtgctccatggatcatggggttgacagcagcattttccagaatcctaaaaagcttcatctaactattgggatgttggtgcttttgagtgaggaagagatccagcagacatgtgagatgctacagcagtgtaaagaggaattcattaatgatatttctgggggtaaacccctagaagtggagatggcagggatagaatacatgaatgatgatcctggcatggtggatgttctttacgccaaagtccatatgaaagatggctccaacaggctacaagaattagttgatcgagtgctggaacgttttcaggcatctggactaatagtgaaagagtggaatagtgtgaaactgcatgctacagttatgaatacactattcaggaaagaccccaatgtgaccatgcagcaggtggccaggacagtggctaaagtggagctctcagaccacgtgtgtgatgtggtgtttgcactctttgactgtgatggcaatggcgaactgagcaataaggaatttgtttccatcatgaagcaacggctgatgagaggcctggaaaagcccaaagacatgggtttcactcgcctcatgcaggccatgtggaaatgtgcacaggaaactgcctgggacttcgctttacccaaacagtaa

SEQ ID NO: 309 - DNA, 1071 bp, Homo sapiens
atggaagttctgcgtccacagcttataagaattgatggccggaattacaggaagaatccagtccaagaacagacctatcaacatgaagaagatgaagaggacttctatcaaggctccatggagtgtgctgatgagccctgtgatgcctacgaggtggagcagaccccacaaggattccggtctactttgagggcccccagcttgctctataatctcattcacttgaacacatcaaacgactgtgggttccagaagataactttggattgtcagaatatttatacttggaagtccaggcatatagttggaaagagaggggacactaggaagaaaatagaaatggagaccaaaacttctattagcattcctaaacctggacaagacggggaaattgtaatcactggccagcatcgaaatggtgtaatttcagcccgaacacggattgatgttcttttggacacttttcgaagaaagcagcccttcactcacttccttgcctttttcctcaatgaagttgaggttcaggaaggattcctgagattccaggaggaagtactggcgaagtgctccatgtttgaacgccatgaccctgtggatgggagaattactgagaggcagtttggtggcatgctacttgcctacagtggggtgcagtccaagaagctgaccgccatgcagaggcagctcaagaagcacttcaaagaaggaaagggtctgacatttcaggaggtggagaacttctttactttcctaaagaacattaatgatgtggacactgcattgagtttttaccatatggctggagcatctcttgataaagtgaccatgcagcaggtggccaggacagtggctaaagtggagctctcagaccacgtgtgtgatgtggtgtttgcactctttgactgtgatggcaatggcgaactgagcaataaggaatttgtttccatcatgaagcaacggctgatgagaggcctggaaaagcccaaagacatgggtttcactcgcctcatgcaggccatgtggaaatgtgcacaggaaactgcctgggacttcgctttacccaaacagtaa

SEQ ID NO: 310 - DNA, 732 bp, Homo sapiens
atggagaccaaaacttctattagcattcctaaacctggacaagacggggaaattgtaatcactggccagcatcgaaatggtgtaatttcagcccgaacacggattgatgttcttttggacacttttcgaagaaagcagcccttcactcacttccttgcctttttcctcaatgaagttgaggttcaggaaggattcctgagattccaggaggaagtactggcgaagtgctccatgtttgaacgccatgaccctgtggatgggagaattactgagaggcagtttggtggcatgctacttgcctacagtggggtgcagtccaagaagctgaccgccatgcagaggcagctcaagaagcacttcaaagaaggaaagggtctgacatttcaggaggtggagaacttctttactttcctaaagaacattaatgatgtggacactgcattgagtttttaccatatggctggagcatctcttgataaagtgaccatgcagcaggtggccaggacagtggctaaagtggagctctcagaccacgtgtgtgatgtggtgtttgcactctttgactgtgatggcaatggcgaactgagcaataaggaatttgtttccatcatgaagcaacggctgatgagaggcctggaaaagcccaaagacatgggtttcactcgcctcatgcaggccatgtggaaatgtgcacaggaaactgcctgggacttcgctttacccaaacagtaa

SEQ ID NO: 311 - DNA, 252 bp, Homo sapiens
atgtccccagaagtggccttgaaccgaatatctccaatgctctcccctttcatatctagcgtggtccggaatggaaaagtgggactggatgctacaaactgtttgaggataactgacttaaaatctggtgaaacaaagagtcctcttcgtggaaaagaaaaaaatacgctccctttaaacggtggattgaaaatgactttgatttataaagagaagactgagggcggggatactgattcagaaatcctgtag

SEQ ID NO: 312 - DNA, 804 bp, Homo sapiens
atgtccccagaagtggccttgaaccgaatatctccaatgctctcccctttcatatctagcgtggtccggaatggaaaagtgggactggatgctacaaactgtttgaggataactgacttaaaatctggctgcacatcattgactcctgggcccaactgtgaccgatttaaactgcacataccatatgctggagagacattaaagtgggatatcattttcaatgcccaatacccagaactgcctcccgattttatctttggagaagatgctgaattcctgccagacccctcagctttgcagaatcttgcctcctggaatccttcaaatcctgaatgtctcttacttgtggtgaaggaacttgtgcaacaatatcaccaattccaatgtagccgcctccgggagagctcccgcctcatgtttgaataccagacattactggaggagccacagtatggagagaacatggaaatttatgctgggaaaaaaaacaactggactggtgaattttcagctcgtttccttttgaagctgcccgtagatttcagcaatatccccacataccttctcaaggatgtaaatgaagaccctggagaagatgtggccctcctctctgttagttttgaggacactgaagccacccaggtgtaccccaagctgtacttgtcacctcgaattgagcatgaaacaaagagtcctcttcgtggaaaagaaaaaaatacgctccctttaaacggtggattgaaaatgactttgatttataaagagaagactgagggcggggatactgattcagaaatcctgtag

SEQ ID NO: 313 - DNA, 390 bp, Homo sapiens
atgtttgaataccagacattactggaggagccacagtatggagagaacatggaaatttatgctgggaaaaaaaacaactggactggtgaattttcagctcgtttccttttgaagctgcccgtagatttcagcaatatccccacataccttctcaaggatgtaaatgaagaccctggagaagatgtggccctcctctctgttagttttgaggacactgaagccacccaggtgtaccccaagctgtacttgtcacctcgaattgagcatgaaacaaagagtcctcttcgtggaaaagaaaaaaatacgctccctttaaacggtggattgaaaatgactttgatttataaagagaagactgagggcggggatactgattcagaaatcctgtag

SEQ ID NO: 314 - DNA, 561 bp, Homo sapiens
atgtttgaataccagacattactggaggagccacagtatggagagaacatggaaatttatgctgggaaaaaaaacaactggactggtgaattttcagctcgtttccttttgaagctgcccgtagatttcagcaatatccccacataccttctcaaggatgtaaatgaagaccctggagaagatgtggccctcctctctgttagttttgaggacactgaagccacccaggtgtaccccaagctgtacttgtcacctcgaattgagcatgcacttggaggctcctcagctcttcatatcccagcttttccaggaggaggatgtctcattgattacgttcctcaagtatgccacctgctcaccaacaaggtgcagtacgtgattcaagggtatcacaaaagaagagagtatattgctgcttttctcagtcactttggcactgaaacaaagagtcctcttcgtggaaaagaaaaaaatacgctccctttaaacggtggattgaaaatgactttgatttataaagagaagactgagggcggggatactgattcagaaatcctgtag

SEQ ID NO: 315 - DNA, 1212 bp, Homo sapiens
atgtccccagaagtggccttgaaccgaatatctccaatgctctcccctttcatatctagcgtggtccggaatggaaaagtgggactggatgctacaaactgtttgaggataactgacttaaaatctggctgcacatcattgactcctgggcccaactgtgaccgatttaaactgcacataccatatgctggagagacattaaagtgggatatcattttcaatgcccaatacccagaactgcctcccgattttatctttggagaagatgctgaattcctgccagacccctcagctttgcagaatcttgcctcctggaatccttcaaatcctgaatgtctcttacttgtggtgaaggaacttgtgcaacaatatcaccaattccaatgtagccgcctccgggagagctcccgcctcatgtttgaataccagacattactggaggagccacagtatggagagaacatggaaatttatgctgggaaaaaaaacaactggactggtgaattttcagctcgtttccttttgaagctgcccgtagatttcagcaatatccccacataccttctcaaggatgtaaatgaagaccctggagaagatgtggccctcctctctgttagttttgaggacactgaagccacccaggtgtaccccaagctgtacttgtcacctcgaattgagcatgcacttggaggctcctcagctcttcatatcccagcttttccaggaggaggatgtctcattgattacgttcctcaagtatgccacctgctcaccaacaaggtgcagtacgtgattcaagggtatcacaaaagaagagagtatattgctgcttttctcagtcactttggcacaggtgtcgtggaatatgatgcagaaggctttacaaaactcactctgctgctgatgtggaaagatttttgttttcttgtacacattgacctgcctctgtttttccctcgagaccagccaactctcacatttcagtccgtttatcactttaccaacagtggacagctttactcccaggcccaaaaaaattatccgtacagccccagatgggatggaaatgaaatggccaaaagagcaaatgaaacaaagagtcctcttcgtggaaaagaaaaaaatacgctccctttaaacggtggattgaaaatgactttgatttataaagagaagactgagggcggggatactgattcagaaatcctgtag

SEQ ID NO: 316 - DNA, 975 bp, Homo sapiens
atgtccccagaagtggccttgaaccgaatatctccaatgctctcccctttcatatctagcgtggtccggaatggaaaagtgggactggatgctacaaactgtttgaggataactgacttaaaatctggctgcacatcattgactcctgggcccaactgtgaccgatttaaactgcacataccatatgctggagagacattaaagtgggatatcattttcaatgcccaatacccagaactgcctcccgattttatctttggagaagatgctgaattcctgccagacccctcagctttgcagaatcttgcctcctggaatccttcaaatcctgaatgtctcttacttgtggtgaaggaacttgtgcaacaatatcaccaattccaatgtagccgcctccgggagagctcccgcctcatgtttgaataccagacattactggaggagccacagtatggagagaacatggaaatttatgctgggaaaaaaaacaactggactggtgaattttcagctcgtttccttttgaagctgcccgtagatttcagcaatatccccacataccttctcaaggatgtaaatgaagaccctggagaagatgtggccctcctctctgttagttttgaggacactgaagccacccaggtgtaccccaagctgtacttgtcacctcgaattgagcatgcacttggaggctcctcagctcttcatatcccagcttttccaggaggaggatgtctcattgattacgttcctcaagtatgccacctgctcaccaacaaggtgcagtacgtgattcaagggtatcacaaaagaagagagtatattgctgcttttctcagtcactttggcactgaaacaaagagtcctcttcgtggaaaagaaaaaaatacgctccctttaaacggtggattgaaaatgactttgatttataaagagaagactgagggcggggatactgattcagaaatcctgtag

SEQ ID NO: 317 - DNA, 255 bp, Homo sapiens
atgtccccagaagtggccttgaaccgaatatctccaatgctctcccctttcatatctagcgtggtccggaatggaaaagtgggactggatgctacaaactgtttgaggataactgacttaaaatctggctgcacatcattgactcctgggcccaactgtgaccgatttaaactgcacataccatatgctggagagacattaaagttgaaacaaagagtcctcttcgtggaaaagaaaaaaatacgctccctttaa

SEQ ID NO: 318 - DNA, 798 bp, Homo sapiens
atgtttgaataccagacattactggaggagccacagtatggagagaacatggaaatttatgctgggaaaaaaaacaactggactggtgaattttcagctcgtttccttttgaagctgcccgtagatttcagcaatatccccacataccttctcaaggatgtaaatgaagaccctggagaagatgtggccctcctctctgttagttttgaggacactgaagccacccaggtgtaccccaagctgtacttgtcacctcgaattgagcatgcacttggaggctcctcagctcttcatatcccagcttttccaggaggaggatgtctcattgattacgttcctcaagtatgccacctgctcaccaacaaggtgcagtacgtgattcaagggtatcacaaaagaagagagtatattgctgcttttctcagtcactttggcacaggtgtcgtggaatatgatgcagaaggctttacaaaactcactctgctgctgatgtggaaagatttttgttttcttgtacacattgacctgcctctgtttttccctcgagaccagccaactctcacatttcagtccgtttatcactttaccaacagtggacagctttactcccaggcccaaaaaaattatccgtacagccccagatgggatggaaatgaaatggccaaaagagcaaatgaaacaaagagtcctcttcgtggaaaagaaaaaaatacgctccctttaaacggtggattgaaaatgactttgatttataaagagaagactgagggcggggatactgattcagaaatcctgtag

SEQ ID NO: 319 - DNA, 366 bp, Homo sapiens
atgtaccaacctatccaaacttatccatggatgaatctatccagaagacgggagttccgatgcttgtcttgctctgaatgtctgcttgtcacctgcttagggttatcgactgtgattctgggactcattgttgttctacaggacccctctgactctgtggttttctctactggattaacaatgatagccataggtgctttttttgttgtcctcactggagtgacagccctgtgtacggttacagtcgacgagaacttgcagaaaaccacgaggctaagactaggagtgatacgaaaaagcggaagtctccaaggaactacagagccttccatgactcactcaataatcgctagcacctcgctgtag

SEQ ID NO: 320 - DNA, 738 bp, Homo sapiens
atggataaaaatgagctggttcagaaggccaaactggccgagcaggctgagcgatatgatgacatggcagcctgcatgaagtctgtaactgagcaaggagctgaattatccaatgaggagaggaatcttctctcagttgcttataaaaatgttgtaggagcccgtaggtcatcttggagggtcgtctcaagtattgaacaaaagacggaaggtgctgagaaaaaacagcagatggctcgagaatacagagagaaaattgagacggagctaagagatatctgcaatgatgtactgtctcttttggaaaagttcttgatccccaatgcttcacaagcagagagcaaagtcttctatttgaaaatgaaaggagattactaccgttacttggctgaggttgccgctggtgatgacaagaaagggattgtcgatcagtcacaacaagcataccaagaagcttttgaaatcagcaaaaaggaaatgcaaccaacacatcctatcagactgggtctggcccttaacttctctgtgttctattatgagattctgaactccccagagaaagcctgctctcttgcaaagacagcttttgatgaagccattgctgaacttgatacattaagtgaagagtcatacaaagacagcacgctaataatgcaattactgagagacaacttgacattgtggacatcggatacccaaggagacgaagctgaagcaggagaaggaggggaaaattaa

SEQ ID NO: 321 - DNA, 1647 bp, Homo sapiens
atgaaccccagtgcccccagctaccccatggcctcgctctacgtgggggacctccaccccgacgtgaccgaggcgatgctctacgagaagttcagcccggccgggcccatcctctccatccgggtctgcagggacatgatcacccgccgctccttgggctacgcgtatgtgaacttccagcagccggcggacgcggagcgtgctttggacaccatgaattttgatgttataaagggcaagccagtacgcatcatgtggtctcagcgtgatccatcacttcgcaaaagtggagtaggcaacatattcattaaaaatctggacaaatccattgataataaagcactgtatgatacattttctgcttttggtaacatcctttcatgtaaggtggtttgtgatgaaaatggttccaagggctatggatttgtacactttgagacgcaggaagcagctgaaagagctattgaaaaaatgaatggaatgctcctaaatgatcgcaaagtatttgttggacgatttaagtctcgtaaagaacgagaagctgaacttggagctagggcaaaagaattcaccaatgtttacatcaagaattttggagaagacatggatgatgagcgccttaaggatctctttgggcctgccttaagtgtgaaagtaatgactgatgaaagtggaaaatccaaaggatttggatttgtaagctttgaaaggcatgaagatgcacagaaagctgtggatgagatgaacggaaaggagctcaatggaaaacaaatttatgttggtcgagctcagaaaaaggtggaacggcagacggaacttaagcgcaaatttgaacagatgaaacaagataggatcaccagataccagggtgttaatctttatgtgaaaaatcttgatgatggtattgatgatgaacgtctccggaaagagttttctccatttggtacaatcactagtgcaaaggttatgatggagggtggtcgcagcaaagggtttggttttgtatgtttctcctccccagaagaagccactaaagcagttacagaaatgaacggtagaattgtggccacaaagccattgtatgtagctttagctcagcgcaaagaagagcgccaggctcacctcactaaccagtatatgcagagaatggcaagtgtacgagctgttcccaaccctgtaatcaacccctaccagccagcacctccttcaggttacttcatggcagctatcccacagactcagaaccgtgctgcatactatcctcctagccaaattgctcaactaagaccaagtcctcgctggactgctcagggtgccagacctcatcggattgtcgatcagtcacaacaagcataccaagaagcttttgaaatcagcaaaaaggaaatgcaaccaacacatcctatcagactgggtctggcccttaacttctctgtgttctattatgagattctgaactccccagagaaagcctgctctcttgcaaagacagcttttgatgaagccattgctgaacttgatacattaagtgaagagtcatacaaagacagcacgctaataatgcaattactgagagacaacttgacattgtggacatcggatacccaaggagacgaagctgaagcaggagaaggaggggaaaattaa

SEQ ID NO: 322 - DNA, 1962 bp, Homo sapiens
atgaaccccagtgcccccagctaccccatggcctcgctctacgtgggggacctccaccccgacgtgaccgaggcgatgctctacgagaagttcagcccggccgggcccatcctctccatccgggtctgcagggacatgatcacccgccgctccttgggctacgcgtatgtgaacttccagcagccggcggacgcggagcgtgctttggacaccatgaattttgatgttataaagggcaagccagtacgcatcatgtggtctcagcgtgatccatcacttcgcaaaagtggagtaggcaacatattcattaaaaatctggacaaatccattgataataaagcactgtatgatacattttctgcttttggtaacatcctttcatgtaaggtggtttgtgatgaaaatggttccaagggctatggatttgtacactttgagacgcaggaagcagctgaaagagctattgaaaaaatgaatggaatgctcctaaatgatcgcaaagtatttgttggacgatttaagtctcgtaaagaacgagaagctgaacttggagctagggcaaaagaattcaccaatgtttacatcaagaattttggagaagacatggatgatgagcgccttaaggatctctttgggcctgccttaagtgtgaaagtaatgactgatgaaagtggaaaatccaaaggatttggatttgtaagctttgaaaggcatgaagatgcacagaaagctgtggatgagatgaacggaaaggagctcaatggaaaacaaatttatgttggtcgagctcagaaaaaggtggaacggcagacggaacttaagcgcaaatttgaacagatgaaacaagataggatcaccagataccagggtgttaatctttatgtgaaaaatcttgatgatggtattgatgatgaacgtctccggaaagagttttctccatttggtacaatcactagtgcaaaggttatgatggagggtggtcgcagcaaagggtttggttttgtatgtttctcctccccagaagaagccactaaagcagttacagaaatgaacggtagaattgtggccacaaagccattgtatgtagctttagctcagcgcaaagaagagcgccaggctcacctcactaaccagtatatgcagagaatggcaagtgtacgagctgttcccaaccctgtaatcaacccctaccagccagcacctccttcaggttacttcatggcagctatcccacagactcagaaccgtgctgcatactatcctcctagccaaattgctcaactaagaccaagtcctcgctggactgctcagggtgccagacctcatccattccaaaatatgcccggtgctatccgcccagctgctcctagaccaccatttagtactatgagaccagcttcttcacaggttccacgagtcatgtcaacacagcgtgttgctaacacatcaacacagacaatgggtccacgtcctgcagctgcagccgctgcagctactcctgctgtccgcaccgttccacagtataaatatgctgcaggagttcgcaatcctcagcaacatcttaatgcacagccacaagttacaatgcaacagcctgctgttcatgtacaaggtcaggaacctttgactgcttccatgttggcatctgcccctcctcaagagcaaaagcaaatgttgggtgaacggctgtttcctcttattcaagccatgcaccctactcttgctggtaaaatcactggcatgttgttggagattgataattcagaacttcttcatatgctcgagtctccagagtcactccgttctaaggttgatgaagctgtagctgtactacaagcccaccaagctaaagaggctgcccagaaagcagttaacagtgccaccggtgttccaactgtttaattgtggacatcggatacccaaggagacgaagctgaagcaggagaaggaggggaaaattaa

SEQ ID NO: 323 - DNA, 1656 bp, Homo sapiens
atgaaccccagtgcccccagctaccccatggcctcgctctacgtgggggacctccaccccgacgtgaccgaggcgatgctctacgagaagttcagcccggccgggcccatcctctccatccgggtctgcagggacatgatcacccgccgctccttgggctacgcgtatgtgaacttccagcagccggcggacgcggagcgtgctttggacaccatgaattttgatgttataaagggcaagccagtacgcatcatgtggtctcagcgtgatccatcacttcgcaaaagtggagtaggcaacatattcattaaaaatctggacaaatccattgataataaagcactgtatgatacattttctgcttttggtaacatcctttcatgtaaggtggtttgtgatgaaaatggttccaagggctatggatttgtacactttgagacgcaggaagcagctgaaagagctattgaaaaaatgaatggaatgctcctaaatgatcgcaaagtatttgttggacgatttaagtctcgtaaagaacgagaagctgaacttggagctagggcaaaagaattcaccaatgtttacatcaagaattttggagaagacatggatgatgagcgccttaaggatctctttggcaagtttgggcctgccttaagtgtgaaagtaatgactgatgaaagtggaaaatccaaaggatttggatttgtaagctttgaaaggcatgaagatgcacagaaagctgtggatgagatgaacggaaaggagctcaatggaaaacaaatttatgttggtcgagctcagaaaaaggtggaacggcagacggaacttaagcgcaaatttgaacagatgaaacaagataggatcaccagataccagggtgttaatctttatgtgaaaaatcttgatgatggtattgatgatgaacgtctccggaaagagttttctccatttggtacaatcactagtgcaaaggttatgatggagggtggtcgcagcaaagggtttggttttgtatgtttctcctccccagaagaagccactaaagcagttacagaaatgaacggtagaattgtggccacaaagccattgtatgtagctttagctcagcgcaaagaagagcgccaggctcacctcactaaccagtatatgcagagaatggcaagtgtacgagctgttcccaaccctgtaatcaacccctaccagccagcacctccttcaggttacttcatggcagctatcccacagactcagaaccgtgctgcatactatcctcctagccaaattgctcaactaagaccaagtcctcgctggactgctcagggtgccagacctcatcggattgtcgatcagtcacaacaagcataccaagaagcttttgaaatcagcaaaaaggaaatgcaaccaacacatcctatcagactgggtctggcccttaacttctctgtgttctattatgagattctgaactccccagagaaagcctgctctcttgcaaagacagcttttgatgaagccattgctgaacttgatacattaagtgaagagtcatacaaagacagcacgctaataatgcaattactgagagacaacttgacattgtggacatcggatacccaaggagacgaagctgaagcaggagaaggaggggaaaattaa

SEQ ID NO: 324 - DNA, 1560 bp, Homo sapiens
atgaaccccagtgcccccagctaccccatggcctcgctctacgtgggggacctccaccccgacgtgaccgaggcgatgctctacgagaagttcagcccggccgggcccatcctctccatccgggtctgcagggacatgatcacccgccgctccttgggctacgcgtatgtgaacttccagcagccggcggacgcggagcgtgctttggacaccatgaattttgatgttataaagggcaagccagtacgcatcatgtggtctcagcgtgatccatcacttcgcaaaagtggagtggtttgtgatgaaaatggttccaagggctatggatttgtacactttgagacgcaggaagcagctgaaagagctattgaaaaaatgaatggaatgctcctaaatgatcgcaaagtatttgttggacgatttaagtctcgtaaagaacgagaagctgaacttggagctagggcaaaagaattcaccaatgtttacatcaagaattttggagaagacatggatgatgagcgccttaaggatctctttggcaagtttgggcctgccttaagtgtgaaagtaatgactgatgaaagtggaaaatccaaaggatttggatttgtaagctttgaaaggcatgaagatgcacagaaagctgtggatgagatgaacggaaaggagctcaatggaaaacaaatttatgttggtcgagctcagaaaaaggtggaacggcagacggaacttaagcgcaaatttgaacagatgaaacaagataggatcaccagataccagggtgttaatctttatgtgaaaaatcttgatgatggtattgatgatgaacgtctccggaaagagttttctccatttggtacaatcactagtgcaaaggttatgatggagggtggtcgcagcaaagggtttggttttgtatgtttctcctccccagaagaagccactaaagcagttacagaaatgaacggtagaattgtggccacaaagccattgtatgtagctttagctcagcgcaaagaagagcgccaggctcacctcactaaccagtatatgcagagaatggcaagtgtacgagctgttcccaaccctgtaatcaacccctaccagccagcacctccttcaggttacttcatggcagctatcccacagactcagaaccgtgctgcatactatcctcctagccaaattgctcaactaagaccaagtcctcgctggactgctcagggtgccagacctcatcggattgtcgatcagtcacaacaagcataccaagaagcttttgaaatcagcaaaaaggaaatgcaaccaacacatcctatcagactgggtctggcccttaacttctctgtgttctattatgagattctgaactccccagagaaagcctgctctcttgcaaagacagcttttgatgaagccattgctgaacttgatacattaagtgaagagtcatacaaagacagcacgctaataatgcaattactgagagacaacttgacattgtggacatcggatacccaaggagacgaagctgaagcaggagaaggaggggaaaattaa

SEQ ID NO: 325 - DNA, 1320 bp, Homo sapiens
atgaaccccagtgcccccagctaccccatggcctcgctctacgtgggggacctccaccccgacgtgaccgaggcgatgctctacgagaagttcagcccggccgggcccatcctctccatccgggtctgcagggacatgatcacccgccgctccttgggctacgcgtatgtgaacttccagcagccggcggacgcggagcgtgctttggacaccatgaattttgatgttataaagggcaagccagtacgcatcatgtggtctcagcgtgatccatcacttcgcaaaagtggagtggtttgtgatgaaaatggttccaagggctatggatttgtacactttgagacgcaggaagcagctgaaagagctattgaaaaaatgaatggaatgctcctaaatgatcgcaaagtatttgttggacgatttaagtctcgtaaagaacgagaagctgaacttggagctagggcaaaagaattcaccaatgtttacatcaagaattttggagaagacatggatgatgagcgccttaaggatctctttggcaagtttgggcctgccttaagtgtgaaagtaatgactgatgaaagtggaaaatccaaaggatttggatttgtaagctttgaaaggcatgaagatgcacagaaagctgtggatgagatgaacggaaaggagctcaatggaaaacaaatttatgttggtcgagctcagaaaaaggtggaacggcagacggaacttaagcgcaaatttgaacagatgaaacaagataggatcaccagataccagggtgttaatctttatgtgaaaaatcttgatgatggtattgatgatgaacgtctccggaaagagttttctccatttggtacaatcactagtgcaaagtctcttttggaaaagttcttgatccccaatgcttcacaagcagagagcaaagtcttctatttgaaaatgaaaggagattactaccgttacttggctgaggttgccgctggtgatgacaagaaagggattgtcgatcagtcacaacaagcataccaagaagcttttgaaatcagcaaaaaggaaatgcaaccaacacatcctatcagactgggtctggcccttaacttctctgtgttctattatgagattctgaactccccagagaaagcctgctctcttgcaaagacagcttttgatgaagccattgctgaacttgatacattaagtgaagagtcatacaaagacagcacgctaataatgcaattactgagagacaacttgacattgtggacatcggatacccaaggagacgaagctgaagcaggagaaggaggggaaaattaa

SEQ ID NO: 326 - DNA, 1875 bp, Homo sapiens
atgaaccccagtgcccccagctaccccatggcctcgctctacgtgggggacctccaccccgacgtgaccgaggcgatgctctacgagaagttcagcccggccgggcccatcctctccatccgggtctgcagggacatgatcacccgccgctccttgggctacgcgtatgtgaacttccagcagccggcggacgcggagcgtgctttggacaccatgaattttgatgttataaagggcaagccagtacgcatcatgtggtctcagcgtgatccatcacttcgcaaaagtggagtggtttgtgatgaaaatggttccaagggctatggatttgtacactttgagacgcaggaagcagctgaaagagctattgaaaaaatgaatggaatgctcctaaatgatcgcaaagtatttgttggacgatttaagtctcgtaaagaacgagaagctgaacttggagctagggcaaaagaattcaccaatgtttacatcaagaattttggagaagacatggatgatgagcgccttaaggatctctttggcaagtttgggcctgccttaagtgtgaaagtaatgactgatgaaagtggaaaatccaaaggatttggatttgtaagctttgaaaggcatgaagatgcacagaaagctgtggatgagatgaacggaaaggagctcaatggaaaacaaatttatgttggtcgagctcagaaaaaggtggaacggcagacggaacttaagcgcaaatttgaacagatgaaacaagataggatcaccagataccagggtgttaatctttatgtgaaaaatcttgatgatggtattgatgatgaacgtctccggaaagagttttctccatttggtacaatcactagtgcaaaggttatgatggagggtggtcgcagcaaagggtttggttttgtatgtttctcctccccagaagaagccactaaagcagttacagaaatgaacggtagaattgtggccacaaagccattgtatgtagctttagctcagcgcaaagaagagcgccaggctcacctcactaaccagtatatgcagagaatggcaagtgtacgagctgttcccaaccctgtaatcaacccctaccagccagcacctccttcaggttacttcatggcagctatcccacagactcagaaccgtgctgcatactatcctcctagccaaattgctcaactaagaccaagtcctcgctggactgctcagggtgccagacctcatccattccaaaatatgcccggtgctatccgcccagctgctcctagaccaccatttagtactatgagaccagcttcttcacaggttccacgagtcatgtcaacacagcgtgttgctaacacatcaacacagacaatgggtccacgtcctgcagctgcagccgctgcagctactcctgctgtccgcaccgttccacagtataaatatgctgcaggagttcgcaatcctcagcaacatcttaatgcacagccacaagttacaatgcaacagcctgctgttcatgtacaaggtcaggaacctttgactgcttccatgttggcatctgcccctcctcaagagcaaaagcaaatgttgggtgaacggctgtttcctcttattcaagccatgcaccctactcttgctggtaaaatcactggcatgttgttggagattgataattcagaacttcttcatatgctcgagtctccagagtcactccgttctaaggttgatgaagctgtagctgtactacaagcccaccaagctaaagaggctgcccagaaagcagttaacagtgccaccggtgttccaactgtttaattgtggacatcggatacccaaggagacgaagctgaagcaggagaaggaggggaaaattaa

SEQ ID NO: 327 - DNA, 1836 bp, Homo sapiens
atgatcacccgccgctccttgggctacgcgtatgtgaacttccagcagccggcggacgcggagcgtgctttggacaccatgaattttgatgttataaagggcaagccagtacgcatcatgtggtctcagcgtgatccatcacttcgcaaaagtggagtaggcaacatattcattaaaaatctggacaaatccattgataataaagcactgtatgatacattttctgcttttggtaacatcctttcatgtaaggtggtttgtgatgaaaatggttccaagggctatggatttgtacactttgagacgcaggaagcagctgaaagagctattgaaaaaatgaatggaatgctcctaaatgatcgcaaagtatttgttggacgatttaagtctcgtaaagaacgagaagctgaacttggagctagggcaaaagaattcaccaatgtttacatcaagaattttggagaagacatggatgatgagcgccttaaggatctctttggcaagtttgggcctgccttaagtgtgaaagtaatgactgatgaaagtggaaaatccaaaggatttggatttgtaagctttgaaaggcatgaagatgcacagaaagctgtggatgagatgaacggaaaggagctcaatggaaaacaaatttatgttggtcgagctcagaaaaaggtggaacggcagacggaacttaagcgcaaatttgaacagatgaaacaagataggatcaccagataccagggtgttaatctttatgtgaaaaatcttgatgatggtattgatgatgaacgtctccggaaagagttttctccatttggtacaatcactagtgcaaaggttatgatggagggtggtcgcagcaaagggtttggttttgtatgtttctcctccccagaagaagccactaaagcagttacagaaatgaacggtagaattgtggccacaaagccattgtatgtagctttagctcagcgcaaagaagagcgccaggctcacctcactaaccagtatatgcagagaatggcaagtgtacgagctgttcccaaccctgtaatcaacccctaccagccagcacctccttcaggttacttcatggcagctatcccacagactcagaaccgtgctgcatactatcctcctagccaaattgctcaactaagaccaagtcctcgctggactgctcagggtgccagacctcatccattccaaaatatgcccggtgctatccgcccagctgctcctagaccaccatttagtactatgagaccagcttcttcacaggttccacgagtcatgtcaacacagcgtgttgctaacacatcaacacagacaatgggtccacgtcctgcagctgcagccgctgcagctactcctgctgtccgcaccgttccacagtataaatatgctgcaggagttcgcaatcctcagcaacatcttaatgcacagccacaagttacaatgcaacagcctgctgttcatgtacaaggtcaggaacctttgactgcttccatgttggcatctgcccctcctcaagagcaaaagcaaatgttgggtgaacggctgtttcctcttattcaagccatgcaccctactcttgctggtaaaatcactggcatgttgttggagattgataattcagaacttcttcatatgctcgagtctccagagtcactccgttctaaggttgatgaagctgtagctgtactacaagcccaccaagctaaagaggctgcccagaaagcagttaacagtgccaccggtgttccaactgtttaattgtggacatcggatacccaaggagacgaagctgaagcaggagaaggaggggaaaattaa

SEQ ID NO: 328 - DNA, 1407 bp, Homo sapiens
atgaaccccagtgcccccagctaccccatggcctcgctctacgtgggggacctccaccccgacgtgaccgaggcgatgctctacgagaagttcagcccggccgggcccatcctctccatccgggtctgcagggacatgatcacccgccgctccttgggctacgcgtatgtgaacttccagcagccggcggacgcggagcgtgctttggacaccatgaattttgatgttataaagggcaagccagtacgcatcatgtggtctcagcgtgatccatcacttcgcaaaagtggagtaggcaacatattcattaaaaatctggacaaatccattgataataaagcactgtatgatacattttctgcttttggtaacatcctttcatgtaaggtggtttgtgatgaaaatggttccaagggctatggatttgtacactttgagacgcaggaagcagctgaaagagctattgaaaaaatgaatggaatgctcctaaatgatcgcaaagtatttgttggacgatttaagtctcgtaaagaacgagaagctgaacttggagctagggcaaaagaattcaccaatgtttacatcaagaattttggagaagacatggatgatgagcgccttaaggatctctttgggcctgccttaagtgtgaaagtaatgactgatgaaagtggaaaatccaaaggatttggatttgtaagctttgaaaggcatgaagatgcacagaaagctgtggatgagatgaacggaaaggagctcaatggaaaacaaatttatgttggtcgagctcagaaaaaggtggaacggcagacggaacttaagcgcaaatttgaacagatgaaacaagataggatcaccagataccagggtgttaatctttatgtgaaaaatcttgatgatggtattgatgatgaacgtctccggaaagagttttctccatttggtacaatcactagtgcaaagtctcttttggaaaagttcttgatccccaatgcttcacaagcagagagcaaagtcttctatttgaaaatgaaaggagattactaccgttacttggctgaggttgccgctggtgatgacaagaaagggattgtcgatcagtcacaacaagcataccaagaagcttttgaaatcagcaaaaaggaaatgcaaccaacacatcctatcagactgggtctggcccttaacttctctgtgttctattatgagattctgaactccccagagaaagcctgctctcttgcaaagacagcttttgatgaagccattgctgaacttgatacattaagtgaagagtcatacaaagacagcacgctaataatgcaattactgagagacaacttgacattgtggacatcggatacccaaggagacgaagctgaagcaggagaaggaggggaaaattaa

SEQ ID NO: 329 - DNA, 1416 bp, Homo sapiens
atgaaccccagtgcccccagctaccccatggcctcgctctacgtgggggacctccaccccgacgtgaccgaggcgatgctctacgagaagttcagcccggccgggcccatcctctccatccgggtctgcagggacatgatcacccgccgctccttgggctacgcgtatgtgaacttccagcagccggcggacgcggagcgtgctttggacaccatgaattttgatgttataaagggcaagccagtacgcatcatgtggtctcagcgtgatccatcacttcgcaaaagtggagtaggcaacatattcattaaaaatctggacaaatccattgataataaagcactgtatgatacattttctgcttttggtaacatcctttcatgtaaggtggtttgtgatgaaaatggttccaagggctatggatttgtacactttgagacgcaggaagcagctgaaagagctattgaaaaaatgaatggaatgctcctaaatgatcgcaaagtatttgttggacgatttaagtctcgtaaagaacgagaagctgaacttggagctagggcaaaagaattcaccaatgtttacatcaagaattttggagaagacatggatgatgagcgccttaaggatctctttggcaagtttgggcctgccttaagtgtgaaagtaatgactgatgaaagtggaaaatccaaaggatttggatttgtaagctttgaaaggcatgaagatgcacagaaagctgtggatgagatgaacggaaaggagctcaatggaaaacaaatttatgttggtcgagctcagaaaaaggtggaacggcagacggaacttaagcgcaaatttgaacagatgaaacaagataggatcaccagataccagggtgttaatctttatgtgaaaaatcttgatgatggtattgatgatgaacgtctccggaaagagttttctccatttggtacaatcactagtgcaaagtctcttttggaaaagttcttgatccccaatgcttcacaagcagagagcaaagtcttctatttgaaaatgaaaggagattactaccgttacttggctgaggttgccgctggtgatgacaagaaagggattgtcgatcagtcacaacaagcataccaagaagcttttgaaatcagcaaaaaggaaatgcaaccaacacatcctatcagactgggtctggcccttaacttctctgtgttctattatgagattctgaactccccagagaaagcctgctctcttgcaaagacagcttttgatgaagccattgctgaacttgatacattaagtgaagagtcatacaaagacagcacgctaataatgcaattactgagagacaacttgacattgtggacatcggatacccaaggagacgaagctgaagcaggagaaggaggggaaaattaa

SEQ ID NO: 330 - DNA, 1971 bp, Homo sapiens
atgaaccccagtgcccccagctaccccatggcctcgctctacgtgggggacctccaccccgacgtgaccgaggcgatgctctacgagaagttcagcccggccgggcccatcctctccatccgggtctgcagggacatgatcacccgccgctccttgggctacgcgtatgtgaacttccagcagccggcggacgcggagcgtgctttggacaccatgaattttgatgttataaagggcaagccagtacgcatcatgtggtctcagcgtgatccatcacttcgcaaaagtggagtaggcaacatattcattaaaaatctggacaaatccattgataataaagcactgtatgatacattttctgcttttggtaacatcctttcatgtaaggtggtttgtgatgaaaatggttccaagggctatggatttgtacactttgagacgcaggaagcagctgaaagagctattgaaaaaatgaatggaatgctcctaaatgatcgcaaagtatttgttggacgatttaagtctcgtaaagaacgagaagctgaacttggagctagggcaaaagaattcaccaatgtttacatcaagaattttggagaagacatggatgatgagcgccttaaggatctctttggcaagtttgggcctgccttaagtgtgaaagtaatgactgatgaaagtggaaaatccaaaggatttggatttgtaagctttgaaaggcatgaagatgcacagaaagctgtggatgagatgaacggaaaggagctcaatggaaaacaaatttatgttggtcgagctcagaaaaaggtggaacggcagacggaacttaagcgcaaatttgaacagatgaaacaagataggatcaccagataccagggtgttaatctttatgtgaaaaatcttgatgatggtattgatgatgaacgtctccggaaagagttttctccatttggtacaatcactagtgcaaaggttatgatggagggtggtcgcagcaaagggtttggttttgtatgtttctcctccccagaagaagccactaaagcagttacagaaatgaacggtagaattgtggccacaaagccattgtatgtagctttagctcagcgcaaagaagagcgccaggctcacctcactaaccagtatatgcagagaatggcaagtgtacgagctgttcccaaccctgtaatcaacccctaccagccagcacctccttcaggttacttcatggcagctatcccacagactcagaaccgtgctgcatactatcctcctagccaaattgctcaactaagaccaagtcctcgctggactgctcagggtgccagacctcatccattccaaaatatgcccggtgctatccgcccagctgctcctagaccaccatttagtactatgagaccagcttcttcacaggttccacgagtcatgtcaacacagcgtgttgctaacacatcaacacagacaatgggtccacgtcctgcagctgcagccgctgcagctactcctgctgtccgcaccgttccacagtataaatatgctgcaggagttcgcaatcctcagcaacatcttaatgcacagccacaagttacaatgcaacagcctgctgttcatgtacaaggtcaggaacctttgactgcttccatgttggcatctgcccctcctcaagagcaaaagcaaatgttgggtgaacggctgtttcctcttattcaagccatgcaccctactcttgctggtaaaatcactggcatgttgttggagattgataattcagaacttcttcatatgctcgagtctccagagtcactccgttctaaggttgatgaagctgtagctgtactacaagcccaccaagctaaagaggctgcccagaaagcagttaacagtgccaccggtgttccaactgtttaattgtggacatcggatacccaaggagacgaagctgaagcaggagaaggaggggaaaattaa

SEQ ID NO: 331 - DNA, 1281 bp, Homo sapiens
atgatcacccgccgctccttgggctacgcgtatgtgaacttccagcagccggcggacgcggagcgtgctttggacaccatgaattttgatgttataaagggcaagccagtacgcatcatgtggtctcagcgtgatccatcacttcgcaaaagtggagtaggcaacatattcattaaaaatctggacaaatccattgataataaagcactgtatgatacattttctgcttttggtaacatcctttcatgtaaggtggtttgtgatgaaaatggttccaagggctatggatttgtacactttgagacgcaggaagcagctgaaagagctattgaaaaaatgaatggaatgctcctaaatgatcgcaaagtatttgttggacgatttaagtctcgtaaagaacgagaagctgaacttggagctagggcaaaagaattcaccaatgtttacatcaagaattttggagaagacatggatgatgagcgccttaaggatctctttggcaagtttgggcctgccttaagtgtgaaagtaatgactgatgaaagtggaaaatccaaaggatttggatttgtaagctttgaaaggcatgaagatgcacagaaagctgtggatgagatgaacggaaaggagctcaatggaaaacaaatttatgttggtcgagctcagaaaaaggtggaacggcagacggaacttaagcgcaaatttgaacagatgaaacaagataggatcaccagataccagggtgttaatctttatgtgaaaaatcttgatgatggtattgatgatgaacgtctccggaaagagttttctccatttggtacaatcactagtgcaaagtctcttttggaaaagttcttgatccccaatgcttcacaagcagagagcaaagtcttctatttgaaaatgaaaggagattactaccgttacttggctgaggttgccgctggtgatgacaagaaagggattgtcgatcagtcacaacaagcataccaagaagcttttgaaatcagcaaaaaggaaatgcaaccaacacatcctatcagactgggtctggcccttaacttctctgtgttctattatgagattctgaactccccagagaaagcctgctctcttgcaaagacagcttttgatgaagccattgctgaacttgatacattaagtgaagagtcatacaaagacagcacgctaataatgcaattactgagagacaacttgacattgtggacatcggatacccaaggagacgaagctgaagcaggagaaggaggggaaaattaa

SEQ ID NO: 332 - DNA, 378 bp, Homo sapiens
atgaaaggagattactaccgttacttggctgaggttgccgctggtgatgacaagaaagggattgtcgatcagtcacaacaagcataccaagaagcttttgaaatcagcaaaaaggaaatgcaaccaacacatcctatcagactgggtctggcccttaacttctctgtgttctattatgagattctgaactccccagagaaagcctgctctcttgcaaagacagcttttgatgaagccattgctgaacttgatacattaagtgaagagtcatacaaagacagcacgctaataatgcaattactgagagacaacttgacattgtggacatcggatacccaaggagacgaagctgaagcaggagaaggaggggaaaattaa

SEQ ID NO: 333 - DNA, 1521 bp, Homo sapiens
atgatcacccgccgctccttgggctacgcgtatgtgaacttccagcagccggcggacgcggagcgtgctttggacaccatgaattttgatgttataaagggcaagccagtacgcatcatgtggtctcagcgtgatccatcacttcgcaaaagtggagtaggcaacatattcattaaaaatctggacaaatccattgataataaagcactgtatgatacattttctgcttttggtaacatcctttcatgtaaggtggtttgtgatgaaaatggttccaagggctatggatttgtacactttgagacgcaggaagcagctgaaagagctattgaaaaaatgaatggaatgctcctaaatgatcgcaaagtatttgttggacgatttaagtctcgtaaagaacgagaagctgaacttggagctagggcaaaagaattcaccaatgtttacatcaagaattttggagaagacatggatgatgagcgccttaaggatctctttggcaagtttgggcctgccttaagtgtgaaagtaatgactgatgaaagtggaaaatccaaaggatttggatttgtaagctttgaaaggcatgaagatgcacagaaagctgtggatgagatgaacggaaaggagctcaatggaaaacaaatttatgttggtcgagctcagaaaaaggtggaacggcagacggaacttaagcgcaaatttgaacagatgaaacaagataggatcaccagataccagggtgttaatctttatgtgaaaaatcttgatgatggtattgatgatgaacgtctccggaaagagttttctccatttggtacaatcactagtgcaaaggttatgatggagggtggtcgcagcaaagggtttggttttgtatgtttctcctccccagaagaagccactaaagcagttacagaaatgaacggtagaattgtggccacaaagccattgtatgtagctttagctcagcgcaaagaagagcgccaggctcacctcactaaccagtatatgcagagaatggcaagtgtacgagctgttcccaaccctgtaatcaacccctaccagccagcacctccttcaggttacttcatggcagctatcccacagactcagaaccgtgctgcatactatcctcctagccaaattgctcaactaagaccaagtcctcgctggactgctcagggtgccagacctcatcggattgtcgatcagtcacaacaagcataccaagaagcttttgaaatcagcaaaaaggaaatgcaaccaacacatcctatcagactgggtctggcccttaacttctctgtgttctattatgagattctgaactccccagagaaagcctgctctcttgcaaagacagcttttgatgaagccattgctgaacttgatacattaagtgaagagtcatacaaagacagcacgctaataatgcaattactgagagacaacttgacattgtggacatcggatacccaaggagacgaagctgaagcaggagaaggaggggaaaattaa

SEQ ID NO: 334 - DNA, 1614 bp, Homo sapiens
atggcggagagtccgactgaggaggcggcaacggcgggcgccggggcggcgggccccggggcgagcagcgttgctggtgttgttggcgttagcggcagcggcggcgggttcgggccgcctttcctgccggatgtgtgggcggcggcggcggcagcgggcggggccgggggcccggggagcggcctggctccgctgcccgggctcccgccctcagccgctgcccacggggccgcgctgcttagccactgggaccccacgctcagctccgactgggacggcgagcgcaccgcgccgcagtgtctactccggatcaagcgggatatcatgtccatttataaggagcctcctccaggaatgttcgttgtacctgatactgttgacatgactaagattcatgcattgatcacaggcccatttgacactccttatgaagggggtttcttcctgttcgtgtttcggtgtccgcccgactatcccatccacccacctcgggtcaaactgatgacaacgggcaataacacagtgaggtttaaccccaacttctaccgcaatgggaaagtctgcttgagtattctaggtacatggactggacctgcctggagcccagcccagagcatctcctcagtgctcatctctatccagtccctgatgactgagaacccctatcacaatgagcccggctttgaacaggagagacatccaggagacagcaaaaactataatgaatgtatccggcacgagaccatcagagttgcagtctgtgacatgatggaaggaaagtgtccctgtcctgaacccctacgaggggtgatggagaagtcctttctggagtattacgacttctacgaggtggcctgcaaagatcgcctgcaccttcaaggccaaactatgcaggccaagtataaggagcgagggacggtcttggctgaggaccagctagcccagatgtcaaagcagttggacatgttcaagaccaacctggaggaatttgccagcaaacacaagcaggagatccggaagaatcctgagttccgtgtgcagttccaggacatgtgtgcaaccattggcgtggatccgctggcctctggaaaaggattttggtctgagatgctgggcgtgggggacttctattacgaactaggtgtccaaattatcgaagtgtgcctggcgctgaagcatcggaatggaggtctgataactttggaggaactacatcaacaggtgttgaagggaaggggcaagttcgcccaggatgtcagtcaagatgacctgatcagagccatcaagaaactaaaggcacttggcactggcttcggcatcatccctgtgggcggcacttacctcattcagtctgttccagctgagctcaatatggatcacaccgtggtgctgcagctggcagagaatggctacgtgactgtcagtgagatcaaagccagtcttaaatgggagaccgagcgagcgcggcaagtgctggaacacctgctgaaggaagggttggcgtggctggacttacaggccccaggggaggcccactactggctgccagctctcttcactgacctctactcccaggagattacagctgaggaggccagagaagccctcccctga

SEQ ID NO: 335 - DNA, 1107 bp, Homo sapiens
atggcggagagtccgactgaggaggcggcaacggcgggcgccggggcggcgggccccggggcgagcagcgttgctggtgttgttggcgttagcggcagcggcggcgggttcgggccgcctttcctgccggatgtgtgggcggcggcggcggcagcgggcggggccgggggcccggggagcggcctggctccgctgcccgggctcccgccctcagccgctgcccacggggccgcgctgcttagccactgggaccccacgctcagctccgactgggacggcgagcgcaccgcgccgcagtgtctactccggatcaagcgggatatcatgtccatttataaggagcctcctccaggaatgttcgttgtacctgatactgttgacatgactaagattcatgcattgatcacaggcccatttgacactccttatgaagggggtttcttcctgttcgtgtttcggtgtccgcccgactatcccatccacccacctcgggtcaaactgatgacaacgggcaataacacagtgaggtttaaccccaacttctaccgcaatgggaaagtctgcttgagtattctaggtacatggactggacctgcctggagcccagcccagagcatctcctcagtgctcatctctatccagtccctgatgactgagaacccctatcacaatgagcccggctttgaacaggagagacatccaggagacagcaaaaactataatgaatgtatccggcacgagaccatcagagttgcagtctgtgacatgatggaaggaaagtgtccctgtcctgaacccctacgaggggtgatggagaagtcctttctggagtattacgacttctacgaggtggcctgcaaagatcgcctgcaccttcaaggccaaactatgcagaagaatggctacgtgactgtcagtgagatcaaagccagtcttaaatgggagaccgagcgagcgcggcaagtgctggaacacctgctgaaggaagggttggcgtggctggacttacaggccccaggggaggcccactactggctgccagctctcttcactgacctctactcccaggagattacagctgaggaggccagagaagccctcccctga

SEQ ID NO: 336 - DNA, 1410 bp, Homo sapiens
atggcggagagtccgactgaggaggcggcaacggcgggcgccggggcggcgggccccggggcgagcagcgttgctggtgttgttggcgttagcggcagcggcggcgggttcgggccgcctttcctgccggatgtgtgggcggcggcggcggcagcgggcggggccgggggcccggggagcggcctggctccgctgcccgggctcccgccctcagccgctgcccacggggccgcgctgcttagccactgggaccccacgctcagctccgactgggacggcgagcgcaccgcgccgcagtgtctactccggatcaagcgggatatcatgtccatttataaggagcctcctccaggaatgttcgttgtacctgatactgttgacatgactaagattcatgcattgatcacaggcccatttgacactccttatgaagggggtttcttcctgttcgtgtttcggtgtccgcccgactatcccatccacccacctcgggtcaaactgatgacaacgggcaataacacagtgaggtttaaccccaacttctaccgcaatgggaaagtctgcttgagtattctaggtacatggactggacctgcctggagcccagcccagagcatctcctcagtgctcatctctatccagtccctgatgactgagaacccctatcacaatgagcccggctttgaacaggccaagtataaggagcgagggacggtcttggctgaggaccagctagcccagatgtcaaagcagttggacatgttcaagaccaacctggaggaatttgccagcaaacacaagcaggagatccggaagaatcctgagttccgtgtgcagttccaggacatgtgtgcaaccattggcgtggatccgctggcctctggaaaaggattttggtctgagatgctgggcgtgggggacttctattacgaactaggtgtccaaattatcgaagtgtgcctggcgctgaagcatcggaatggaggtctgataactttggaggaactacatcaacaggtgttgaagggaaggggcaagttcgcccaggatgtcagtcaagatgacctgatcagagccatcaagaaactaaaggcacttggcactggcttcggcatcatccctgtgggcggcacttacctcattcagtctgttccagctgagctcaatatggatcacaccgtggtgctgcagctggcagagaatggctacgtgactgtcagtgagatcaaagccagtcttaaatgggagaccgagcgagcgcggcaagtgctggaacacctgctgaaggaagggttggcgtggctggacttacaggccccaggggaggcccactactggctgccagctctcttcactgacctctactcccaggagattacagctgaggaggccagagaagccctcccctga

SEQ ID NO: 337 - DNA, 1032 bp, Homo sapiens
atggcggagagtccgactgaggaggcggcaacggcgggcgccggggcggcgggccccggggcgagcagcgttgctggtgttgttggcgttagcggcagcggcggcgggttcgggccgcctttcctgccggatgtgtgggcggcggcggcggcagcgggcggggccgggggcccggggagcggcctggctccgctgcccgggctcccgccctcagccgctgcccacggggccgcgctgcttagccactgggaccccacgctcagctccgactgggacggcgagcgcaccgcgccgcagtgtctactccggatcaagcgggatatcatgtccatttataaggagcctcctccaggaatgttcgttgtacctgatactgttgacatgactaagattcatgcattgatcacaggcccatttgacactccttatgaagggggtttcttcctgttcgtgtttcggtgtccgcccgactatcccatccacccacctcgggtcaaactgatgacaacgggcaataacacagtgaggtttaaccccaacttctaccgcaatgggaaagtctgcttgagtattctaggtacatggactggacctgcctggagcccagcccagagcatctcctcagtgctcatctctatccagtccctgatgactgagaacccctatcacaatgagcccggctttgaacaggagagacatccaggagacagcaaaaactataatgaatgtatccggcacgagaccatcagagttgcagtctgtgacatgatggaaggaaagtgtccctgtcctgaacccctacgaggggtgatggagaagtcctttctggagtattacgacttctacgaggtggcctgcaaagatcgcctgcaccttcaaggccaaactatgcaggaacacctgctgaaggaagggttggcgtggctggacttacaggccccaggggaggcccactactggctgccagctctcttcactgacctctactcccaggagattacagctgaggaggccagagaagccctcccctga

SEQ ID NO: 338 - DNA, 1413 bp, Homo sapiens
atggcggagagtccgactgaggaggcggcaacggcgggcgccggggcggcgggccccggggcgagcagcgttgctggtgttgttggcgttagcggcagcggcggcgggttcgggccgcctttcctgccggatgtgtgggcggcggcggcggcagcgggcggggccgggggcccggggagcggcctggctccgctgcccgggctcccgccctcagccgctgcccacggggccgcgctgcttagccactgggaccccacgctcagctccgactgggacggcgagcgcaccgcgccgcagtgtctactccggatcaagcgggatatcatgtccatttataaggagcctcctccaggaatgttcgttgtacctgatactgttgacatgactaagattcatgcattgatcacaggcccatttgacactccttatgaagggggtttcttcctgttcgtgtttcggtgtccgcccgactatcccatccacccacctcgggtcaaactgatgacaacgggcaataacacagtgaggtttaaccccaacttctaccgcaatgggaaagtctgcttgagtattctaggtacatggactggacctgcctggagcccagcccagagcatctcctcagtgctcatctctatccagtccctgatgactgagaacccctatcacaatgagcccggctttgaacaggccaagtataaggagcgagggacggtcttggctgaggaccagctagcccagatgtcaaagcagttggacatgttcaagaccaacctggaggaatttgccagcaaacacaagcaggagatccggaagaatcctgagttccgtgtgcagttccaggacatgtgtgcaaccattggcgtggatccgctggcctctggaaaaggattttggtctgagatgctgggcgtgggggacttctattacgaactaggtgtccaaattatcgaagtgtgcctggcgctgaagcatcggaatggaggtctgataactttggaggaactacatcaacaggtgttgaagggaaggggcaagttcgcccaggatgtcagtcaagatgacctgatcagagccatcaagaaactaaaggcacttggcactggcttcggcatcatccctgtgggcggcacttacctcattcagtctgttccagctgagctcaatatggatcacaccgtggtgctgcagctggcagagaagaatggctacgtgactgtcagtgagatcaaagccagtcttaaatgggagaccgagcgagcgcggcaagtgctggaacacctgctgaaggaagggttggcgtggctggacttacaggccccaggggaggcccactactggctgccagctctcttcactgacctctactcccaggagattacagctgaggaggccagagaagccctcccctga

SEQ ID NO: 339 - DNA, 1617 bp, Homo sapiens
atggcggagagtccgactgaggaggcggcaacggcgggcgccggggcggcgggccccggggcgagcagcgttgctggtgttgttggcgttagcggcagcggcggcgggttcgggccgcctttcctgccggatgtgtgggcggcggcggcggcagcgggcggggccgggggcccggggagcggcctggctccgctgcccgggctcccgccctcagccgctgcccacggggccgcgctgcttagccactgggaccccacgctcagctccgactgggacggcgagcgcaccgcgccgcagtgtctactccggatcaagcgggatatcatgtccatttataaggagcctcctccaggaatgttcgttgtacctgatactgttgacatgactaagattcatgcattgatcacaggcccatttgacactccttatgaagggggtttcttcctgttcgtgtttcggtgtccgcccgactatcccatccacccacctcgggtcaaactgatgacaacgggcaataacacagtgaggtttaaccccaacttctaccgcaatgggaaagtctgcttgagtattctaggtacatggactggacctgcctggagcccagcccagagcatctcctcagtgctcatctctatccagtccctgatgactgagaacccctatcacaatgagcccggctttgaacaggagagacatccaggagacagcaaaaactataatgaatgtatccggcacgagaccatcagagttgcagtctgtgacatgatggaaggaaagtgtccctgtcctgaacccctacgaggggtgatggagaagtcctttctggagtattacgacttctacgaggtggcctgcaaagatcgcctgcaccttcaaggccaaactatgcaggccaagtataaggagcgagggacggtcttggctgaggaccagctagcccagatgtcaaagcagttggacatgttcaagaccaacctggaggaatttgccagcaaacacaagcaggagatccggaagaatcctgagttccgtgtgcagttccaggacatgtgtgcaaccattggcgtggatccgctggcctctggaaaaggattttggtctgagatgctgggcgtgggggacttctattacgaactaggtgtccaaattatcgaagtgtgcctggcgctgaagcatcggaatggaggtctgataactttggaggaactacatcaacaggtgttgaagggaaggggcaagttcgcccaggatgtcagtcaagatgacctgatcagagccatcaagaaactaaaggcacttggcactggcttcggcatcatccctgtgggcggcacttacctcattcagtctgttccagctgagctcaatatggatcacaccgtggtgctgcagctggcagagaagaatggctacgtgactgtcagtgagatcaaagccagtcttaaatgggagaccgagcgagcgcggcaagtgctggaacacctgctgaaggaagggttggcgtggctggacttacaggccccaggggaggcccactactggctgccagctctcttcactgacctctactcccaggagattacagctgaggaggccagagaagccctcccctga

SEQ ID NO: 340 - DNA, 1263 bp, Homo sapiens
atgcgcccattggctggtgctccagtccccaaaaggcaaaaatgtgaccactggactccctgcccatctgacacctatgcctacaggttactcagcggaggtggcagaagcaagtacgccaaaatctgctttgaggataacctacttatgggagaacagctgggaaatgttgccagaggaataaacattgccattgtcaactatgtaactgggaatgtgacagcaacacgatgttttgatatgtatgaaggtgataactctggaccgatgacaaagtttattcagagtgctgctccaaaatccctgctcttcatggtgacctatgacgacggaagcacaagactgaataacgatgccaagaatgccatagaagcacttggaagtaaagaaatcaggaacatgaaattcaggtctagctgggtatttattgcagcaaaaggcttggaactcccttccgaaattcagagagaaaagccatcaagttctctggagaccttcttcgactccctggtgacacaagcaaacatccccaacgttttctccatgcagatgtgtggagccggcttgcccgttgctggatctgggaccaacggaggtagtcttgtcttgggtggaattgaaccaagtttgtataaaggagacatctggtatacccctattaaggaagagtggtactaccagatagaaattctgaaattggaaattggaggccaaagccttaatctggactgcagagagtataacgcagacaaggccatcgtggacagtggcaccacgctgctgcgcctgccccagaaggtgtttgatgcggtggtggaagctgtggcccgcgcatctctgctttacattcagcccatgatgggggccggcctgaattatgaatgttaccgattcggcatttccccatccacaaatgcgctggtgatcggtgccacggtgatggagggcttctacgtcatcttcgacagagcccagaagagggtgggcttcgcagcgagcccctgtgcagaaattgcaggtgctgcagtgtctgaaatttccgggcctttctcaacagaggatgtagccagcaactgtgtccccgctcagtctttgagcgagcccattttgtggattgtgtcctatgcgctcatgagcgtctgtggagccatcctccttgtcttaatcgtcctgctgctgctgccgttccggtgtcagcgtcgcccccgtgaccctgaggtcgtcaatgatgagtcctctctggtcagacatcgctggaaatga

SEQ ID NO: 341 - DNA, 1047 bp, Homo sapiens
atgcgcccattggctggtgctccagtccccaaaaggcaaaaatgtgaccactggactccctgcccatctgacacctatgcctacaggttactcagcggaggtggcagaagcaagtacgccaaaatctgctttgaggataacctacttatgggagaacagctgggaaatgttgccagaggaataaacattgccattgtcaactatgtaactgggaatgtgacagcaacacgatgttttgatatgtatgaaggtgataactctggaccgatgacaaagtttattcagagtgctgctccaaaatccctgctcttcatggtgacctatgacgacggaagcacaagactgaataacgatgccaagaatgccatagaagcacttggaagtaaagaaatcaggaacatgaaattcaggtctagctgggtatttattgcagcaaaaggcttggaactcccttccgaaattcagagagaaaagccatcaagttctctggagaccttcttcgactccctggtgacacaagcaaacatccccaacgttttctccatgcagatgtgtggagccggcttgcccgttgctggatctgggaccaacggaggtagtcttgtcttgggtggaattgaaccaagtttgtataaaggagacatctggtatacccctattaaggaagagtggtactaccagatagaaattctgaaattggaaattggaggccaaagccttaatctggactgcagagagtataacgcagacaaggccatcgtggacagtggcaccacgctgctgcgcctgccccagaaggtgtttgatgcggtggtggaagctgtggcccgcgcatctctgattccagaattctctgatggtttctggactgggtcccagctggcgtgctggacgaattcggaaacaccttggtcttacttccctaaaatctccatctacctgagagacgagaactccagcaggtcattccgtatcacaatcctgcctcagaaattgcaggtgctgcagtgtctgaaatttccgggcctttctcaacagaggatgtag

SEQ ID NO: 342 - DNA, 1413 bp, Homo sapiens
atgcgcccattggctggtgctccagtccccaaaaggcaaaaatgtgaccactggactccctgcccatctgacacctatgcctacaggttactcagcggaggtggcagaagcaagtacgccaaaatctgctttgaggataacctacttatgggagaacagctgggaaatgttgccagaggaataaacattgccattgtcaactatgtaactgggaatgtgacagcaacacgatgttttgatatgtatgaaggtgataactctggaccgatgacaaagtttattcagagtgctgctccaaaatccctgctcttcatggtgacctatgacgacggaagcacaagactgaataacgatgccaagaatgccatagaagcacttggaagtaaagaaatcaggaacatgaaattcaggtctagctgggtatttattgcagcaaaaggcttggaactcccttccgaaattcagagagaaaagccatcaagttctctggagaccttcttcgactccctggtgacacaagcaaacatccccaacgttttctccatgcagatgtgtggagccggcttgcccgttgctggatctgggaccaacggaggtagtcttgtcttgggtggaattgaaccaagtttgtataaaggagacatctggtatacccctattaaggaagagtggtactaccagatagaaattctgaaattggaaattggaggccaaagccttaatctggactgcagagagtataacgcagacaaggccatcgtggacagtggcaccacgctgctgcgcctgccccagaaggtgtttgatgcggtggtggaagctgtggcccgcgcatctctgattccagaattctctgatggtttctggactgggtcccagctggcgtgctggacgaattcggaaacaccttggtcttacttccctaaaatctccatctacctgagagacgagaactccagcaggtcattccgtatcacaatcctgcctcagctttacattcagcccatgatgggggccggcctgaattatgaatgttaccgattcggcatttccccatccacaaatgcgctggtgatcggtgccacggtgatggagggcttctacgtcatcttcgacagagcccagaagagggtgggcttcgcagcgagcccctgtgcagaaattgcaggtgctgcagtgtctgaaatttccgggcctttctcaacagaggatgtagccagcaactgtgtccccgctcagtctttgagcgagcccattttgtggattgtgtcctatgcgctcatgagcgtctgtggagccatcctccttgtcttaatcgtcctgctgctgctgccgttccggtgtcagcgtcgcccccgtgaccctgaggtcgtcaatgatgagtcctctctggtcagacatcgctggaaatga

SEQ ID NO: 343 - DNA, 1557 bp, Homo sapiens
atgcgcccattggctggtggcctgctcaaggtggtgttcgtggtcttcgcctccttgtgtgcctggtattcggggtacctgctcgcagagctcattccagatgcacccctgtccagtgctgcctatagcatccgcagcatcggggagaggcctgtcctcaaagctccagtccccaaaaggcaaaaatgtgaccactggactccctgcccatctgacacctatgcctacaggttactcagcggaggtggcagaagcaagtacgccaaaatctgctttgaggataacctacttatgggagaacagctgggaaatgttgccagaggaataaacattgccattgtcaactatgtaactgggaatgtgacagcaacacgatgttttgatatgtatgaaggtgataactctggaccgatgacaaagtttattcagagtgctgctccaaaatccctgctcttcatggtgacctatgacgacggaagcacaagactgaataacgatgccaagaatgccatagaagcacttggaagtaaagaaatcaggaacatgaaattcaggtctagctgggtatttattgcagcaaaaggcttggaactcccttccgaaattcagagagaaaagccatcaagttctctggagaccttcttcgactccctggtgacacaagcaaacatccccaacgttttctccatgcagatgtgtggagccggcttgcccgttgctggatctgggaccaacggaggtagtcttgtcttgggtggaattgaaccaagtttgtataaaggagacatctggtatacccctattaaggaagagtggtactaccagatagaaattctgaaattggaaattggaggccaaagccttaatctggactgcagagagtataacgcagacaaggccatcgtggacagtggcaccacgctgctgcgcctgccccagaaggtgtttgatgcggtggtggaagctgtggcccgcgcatctctgattccagaattctctgatggtttctggactgggtcccagctggcgtgctggacgaattcggaaacaccttggtcttacttccctaaaatctccatctacctgagagacgagaactccagcaggtcattccgtatcacaatcctgcctcagctttacattcagcccatgatgggggccggcctgaattatgaatgttaccgattcggcatttccccatccacaaatgcgctggtgatcggtgccacggtgatggagggcttctacgtcatcttcgacagagcccagaagagggtgggcttcgcagcgagcccctgtgcagaaattgcaggtgctgcagtgtctgaaatttccgggcctttctcaacagaggatgtagccagcaactgtgtccccgctcagtctttgagcgagcccattttgtggattgtgtcctatgcgctcatgagcgtctgtggagccatcctccttgtcttaatcgtcctgctgctgctgccgttccggtgtcagcgtcgcccccgtgaccctgaggtcgtcaatgatgagtcctctctggtcagacatcgctggaaatga

SEQ ID NO: 344 - DNA, 417 bp, Homo sapiens
atgcgcccattggctggtggcctgctcaaggtggtgttcgtggtcttcgcctccttgtgtgcctggtattcggggtacctgctcgcagagctcattccagatgcacccctgtccagtgctgcctatagcatccgcagcatcggggagaggcctgtcctcaaagaaattgcaggtgctgcagtgtctgaaatttccgggcctttctcaacagaggatgtagccagcaactgtgtccccgctcagtctttgagcgagcccattttgtggattgtgtcctatgcgctcatgagcgtctgtggagccatcctccttgtcttaatcgtcctgctgctgctgccgttccggtgtcagcgtcgcccccgtgaccctgaggtcgtcaatgatgagtcctctctggtcagacatcgctggaaatga

SEQ ID NO: 345 - DNA, 1191 bp, Homo sapiens
atgcgcccattggctggtggcctgctcaaggtggtgttcgtggtcttcgcctccttgtgtgcctggtattcggggtacctgctcgcagagctcattccagatgcacccctgtccagtgctgcctatagcatccgcagcatcggggagaggcctgtcctcaaagctccagtccccaaaaggcaaaaatgtgaccactggactccctgcccatctgacacctatgcctacaggttactcagcggaggtggcagaagcaagtacgccaaaatctgctttgaggataacctacttatgggagaacagctgggaaatgttgccagaggaataaacattgccattgtcaactatgtaactgggaatgtgacagcaacacgatgttttgatatgtatgaaggtgataactctggaccgatgacaaagtttattcagagtgctgctccaaaatccctgctcttcatggtgacctatgacgacggaagcacaagactgaataacgatgccaagaatgccatagaagcacttggaagtaaagaaatcaggaacatgaaattcaggtctagctgggtatttattgcagcaaaaggcttggaactcccttccgaaattcagagagaaaagccatcaagttctctggagaccttcttcgactccctggtgacacaagcaaacatccccaacgttttctccatgcagatgtgtggagccggcttgcccgttgctggatctgggaccaacggaggtagtcttgtcttgggtggaattgaaccaagtttgtataaaggagacatctggtatacccctattaaggaagagtggtactaccagatagaaattctgaaattggaaattggaggccaaagccttaatctggactgcagagagtataacgcagacaaggccatcgtggacagtggcaccacgctgctgcgcctgccccagaaggtgtttgatgcggtggtggaagctgtggcccgcgcatctctgattccagaattctctgatggtttctggactgggtcccagctggcgtgctggacgaattcggaaacaccttggtcttacttccctaaaatctccatctacctgagagacgagaactccagcaggtcattccgtatcacaatcctgcctcagaaattgcaggtgctgcagtgtctgaaatttccgggcctttctcaacagaggatgtag

SEQ ID NO: 346 - DNA, 459 bp, Homo sapiens
atggctggggcaccctggcgccatctttttccaccgtgcgaaggcaggagcccgagactgggcctgctcaaggtggtgttcgtggtcttcgcctccttgtgtgcctggtattcggggtacctgctcgcagagctcattccagatgcacccctgtccagtgctgcctatagcatccgcagcatcggggagaggcctgtcctcaaagaaattgcaggtgctgcagtgtctgaaatttccgggcctttctcaacagaggatgtagccagcaactgtgtccccgctcagtctttgagcgagcccattttgtggattgtgtcctatgcgctcatgagcgtctgtggagccatcctccttgtcttaatcgtcctgctgctgctgccgttccggtgtcagcgtcgcccccgtgaccctgaggtcgtcaatgatgagtcctctctggtcagacatcgctggaaatga

SEQ ID NO: 347 - DNA, 1407 bp, Homo sapiens
atgcgcccattggctggtggcctgctcaaggtggtgttcgtggtcttcgcctccttgtgtgcctggtattcggggtacctgctcgcagagctcattccagatgcacccctgtccagtgctgcctatagcatccgcagcatcggggagaggcctgtcctcaaagctccagtccccaaaaggcaaaaatgtgaccactggactccctgcccatctgacacctatgcctacaggttactcagcggaggtggcagaagcaagtacgccaaaatctgctttgaggataacctacttatgggagaacagctgggaaatgttgccagaggaataaacattgccattgtcaactatgtaactgggaatgtgacagcaacacgatgttttgatatgtatgaaggtgataactctggaccgatgacaaagtttattcagagtgctgctccaaaatccctgctcttcatggtgacctatgacgacggaagcacaagactgaataacgatgccaagaatgccatagaagcacttggaagtaaagaaatcaggaacatgaaattcaggtctagctgggtatttattgcagcaaaaggcttggaactcccttccgaaattcagagagaaaagccatcaagttctctggagaccttcttcgactccctggtgacacaagcaaacatccccaacgttttctccatgcagatgtgtggagccggcttgcccgttgctggatctgggaccaacggaggtagtcttgtcttgggtggaattgaaccaagtttgtataaaggagacatctggtatacccctattaaggaagagtggtactaccagatagaaattctgaaattggaaattggaggccaaagccttaatctggactgcagagagtataacgcagacaaggccatcgtggacagtggcaccacgctgctgcgcctgccccagaaggtgtttgatgcggtggtggaagctgtggcccgcgcatctctgctttacattcagcccatgatgggggccggcctgaattatgaatgttaccgattcggcatttccccatccacaaatgcgctggtgatcggtgccacggtgatggagggcttctacgtcatcttcgacagagcccagaagagggtgggcttcgcagcgagcccctgtgcagaaattgcaggtgctgcagtgtctgaaatttccgggcctttctcaacagaggatgtagccagcaactgtgtccccgctcagtctttgagcgagcccattttgtggattgtgtcctatgcgctcatgagcgtctgtggagccatcctccttgtcttaatcgtcctgctgctgctgccgttccggtgtcagcgtcgcccccgtgaccctgaggtcgtcaatgatgagtcctctctggtcagacatcgctggaaatga

SEQ ID NO: 348 - DNA, 360 bp, Homo sapiens
atgtcgcacggagccgggctcgtccgcaccacgtgcagcagcggcagcgcgctcggacccggggccggcgcggcccagcccagcgcgagccccttggaggggctgctggacctcagctacccccgcacccacgcggccctgctgaaagtggcgcaaatgggcctgtgctttaacggcagtgccttcgtcttgtacctctctgccgctgttgtagatgcatcttccgtctcccctgagagggacagtcacaacttcaacagctgggcggcctcatcgttctttgccttcctggtcaccatctgctacgctggaaatacatatttcagttttatagcatggagatccaggaccatacagtga

SEQ ID NO: 349 - DNA, 534 bp, Homo sapiens
atgtcgcacggagccgggctcgtccgcaccacgtgcagcagcggcagcgcgctcggacccggggccggcgcggcccagcccagcgcgagccccttggaggggctgctggacctcagctacccccgcacccacgcggccctgctgaaagtggcgcaaatggtcaccctgctgattgccttcatctgtgtgcggagctccctgtggaccaactacagcgcctacagctactttgaagtggtcaccatttgcgacttgataatgatcctcgccttttacctggtccacctcttccgcttctaccgcgtgctcacctgtatcagctggcccctgtcgggcctgtgctttaacggcagtgccttcgtcttgtacctctctgccgctgttgtagatgcatcttccgtctcccctgagagggacagtcacaacttcaacagctgggcggcctcatcgttctttgccttcctggtcaccatctgctacgctggaaatacatatttcagttttatagcatggagatccaggaccatacagtga

SEQ ID NO: 350 - DNA, 708 bp, Homo sapiens
atgtcgcacggagccgggctcgtccgcaccacgtgcagcagcggcagcgcgctcggacccggggccggcgcggcccagcccagcgcgagccccttggaggggctgctggacctcagctacccccgcacccacgcggccctgctgaaagtggcgcaaatggtcaccctgctgattgccttcatctgtgtgcggagctccctgtggaccaactacagcgcctacagctactttgaagtggtcaccatttgcgacttgataatgatcctcgccttttacctggtccacctcttccgcttctaccgcgtgctcacctgtatcagctggcccctgtcggttctggggctgctggtatggacgcttattgctggaactgagtacttccgggtccccgcatttggctgggtcatgtttgtagctgtattttactgggtcctcaccgtcttcttcctcattatctacataacaatgacctacaccaggattccccaggtgccctggacaacagtgggcctgtgctttaacggcagtgccttcgtcttgtacctctctgccgctgttgtagatgcatcttccgtctcccctgagagggacagtcacaacttcaacagctgggcggcctcatcgttctttgccttcctggtcaccatctgctacgctggaaatacatatttcagttttatagcatggagatccaggaccatacagtga

SEQ ID NO: 351 - DNA, 417 bp, Homo sapiens
atgtcgcacggagccgggctcgtccgcaccacgtgcagcagcggcagcgcgctcggacccggggccggcgcggcccagcccagcgcgagccccttggaggggctgctggacctcagctacccccgcacccacgcggccctgctgaaagtggcgcaaatggtcaccctgctgattgccttcatctgtgtgcggagctccctgtggaccaactacagcgcctacagctactttgaagtggtcaccatttgcgacttgataatgatcctcgccttttacctggtccacctcttccgcttctaccgcgtgctcacctgtatcagctggcccctgtcgttctttgccttcctggtcaccatctgctacgctggaaatacatatttcagttttatagcatggagatccaggaccatacagtga

SEQ ID NO: 352 - DNA, 981 bp, Homo sapiens
atggcaaaacagaagagaaaagttcctgaagtgacagagaaaaagaacaaaaagctgaagaaggcgtcagcagaggggccactgctgggccctgaggctgcaccaagtggcgaaggagccggctccaaggagcgggacggtatgcgggccatcctggggtcctacgacagcgagctgaccccggccgagtactcaccccagctgacgcggcgcatgcgggaggctgaggatatggtgcagaaggtgcacagccacagcgccgagatggaggctcagctgtcgcaggccctggaggagctgggaggccagaaacaaagagcagacatgctggagatggagctgaagatgctgaagtctcagtccagctctgccgaacagagcttcctgttctccagggaggaggcggacacgctcaggttgaaggtcgaggagctggaaggcgagcggagtcggctggaggaggaaaagaggatgctggaggcacagctggagcggcgagctctgcagggtgactatgaccagagcaggaccaaagtgctgcacatgagcctgaaccccaccagtgtggccaggcagcgcctgcgcgaggaccacagccagctgcaggcggagtgcgagcgactgcgcgggctcctgcgcgccatggagagaggaggcaccgtcccagccgaccttgaggctgccgccgcgagtctgccatcgtccaaggaggtggcagagctgaagaagcaggtggagagtgccgagctgaagaaccagcggctcaaggaggttttccagaccaagatccaggagttccgcaaggcctgctacacgctcaccggctaccagatcgacatcaccacggagaaccagtaccggctgacctcgctgtacgccgagcacccaggcgactgcctcatcttcaaggtgggtcctgcgtgtgacggctctccggctgtctcgctctctgtctcctcctgtggggagatccgaccgtag

SEQ ID NO: 353 - DNA, 948 bp, Homo sapiens
atggcaaaacagaagagaaaagttcctgaagtgacagagaaaaagaacaaaaagctgaagaaggcgtcagcagaggggccactgctgggccctgaggctgcaccaagtggcgaaggagccggctccaaggagcgggacggtatgcgggccatcctggggtcctacgacagcgagctgaccccggccgagtactcaccccagctgacgcggcgcatgcgggaggctgaggatatggtgcagaaggtgcacagccacagcgccgagatggaggctcagctgtcgcaggccctggaggagctgggaggccagaaacaaagagcagacatgctggagatggagctgaagatgctgaagtctcagtccagctctgccgaacagagcttcctgttctccagggaggaggcggacacgctcaggttgaaggtcgaggagctggaaggcgagcggagtcggctggaggaggaaaagaggatgctggaggcacagctggagcggcgagctctgcagggtgactatgaccagagcaggaccaaagtgctgcacatgagcctgaaccccaccagtgtggccaggcagcgcctgcgcgaggaccacagccagctgcaggcggagtgcgagcgactgcgcgggctcctgcgcgccatggagagaggaggcaccgtcccagccgaccttgaggctgccgccgcgagtctgccatcgtccaaggaggtggcagagctgaagaagcaggtggagagtgccgagctgaagaaccagcggctcaaggaggttttccagaccaagatccaggagttccgcaaggcctgctacacgctcaccggctaccagatcgacatcaccacggagaaccagtaccggctgacctcgctgtacgccgagcacccaggcgactgcctcatcttcaaggaagccgcactcagccacaagctgtgcggaaagctatag

SEQ ID NO: 354 - DNA, 288 bp, Homo sapiens
atggcaaaacagaagagaaaagttcctgaagtgacagagaaaaagaacaaaaagctgaagaaggcgtcagcagaggggccactgctgggccctgaggctgcaccaagtggcgaaggagccggctccaaggccaccagcccctcgggttccaagatgcagctactggagacagagttctcacacaccgtgggcgagctcatcgaggtgcacctgcggcgccaggacagcatccctgccttcctcagctcgctcaccctcgagctcttcagccgccagaccgtggcgtag

SEQ ID NO: 355 - DNA, 1068 bp, Homo sapiens
atggcaaaacagaagagaaaagttcctgaagtgacagagaaaaagaacaaaaagctgaagaaggcgtcagcagaggggccactgctgggccctgaggctgcaccaagtggcgaaggagccggctccaaggagcgggacggtatgcgggccatcctggggtcctacgacagcgagctgaccccggccgagtactcaccccagctgacgcggcgcatgcgggaggctgaggatatggtgcagaaggtgcacagccacagcgccgagatggaggctcagctgtcgcaggccctggaggagctgggaggccagaaacaaagagcagacatgctggagatggagctgaagatgctgaagtctcagtccagctctgccgaacagagcttcctgttctccagggaggaggcggacacgctcaggttgaaggtcgaggagctggaaggcgagcggagtcggctggaggaggaaaagaggatgctggaggcacagctggagcggcgagctctgcagggtgactatgaccagagcaggaccaaagtgctgcacatgagcctgaaccccaccagtgtggccaggcagcgcctgcgcgaggaccacagccagctgcaggcggagtgcgagcgactgcgcgggctcctgcgcgccatggagagaggaggcaccgtcccagccgaccttgaggctgccgccgcgagtctgccatcgtccaaggaggtggcagagctgaagaagcaggtggagagtgccgagctgaagaaccagcggctcaaggaggttttccagaccaagatccaggagttccgcaaggcctgctacacgctcaccggctaccagatcgacatcaccacggagaaccagtaccggctgacctcgctgtacgccgagcacccaggcgactgcctcatcttcaaggccaccagcccctcgggttccaagatgcagctactggagacagagttctcacacaccgtgggcgagctcatcgaggtgcacctgcggcgccaggacagcatccctgccttcctcagctcgctcaccctcgagctcttcagccgccagaccgtggcgtag

SEQ ID NO: 356 - DNA, 1377 bp, Homo sapiens
atgaccgccgtaccacagcatctgggaccttcactgcaaaggactgttcatgacatggagcaattcggacagcagcagtatgacatttatgagaggatggttccacccaggccagacagcctgacaggcttacggagttcctatgctagtcagcatagtcagcttgggcaagaccttcgttctgccgtgtctcccgacttgcacattactcctatatatgaggggaggacctattacagcccagtgtaccgcagcccaaaccatggaactgtggagctccaaggatcgcagacggcgttgtatcgcacaggttcagtaggtattggaaatctacaaaggacatccagccaacgaagtacccttacataccaaagaaataattatgctctgaacacaacagctacctacgcggagccctacaggcctatacaataccgagtgcaagagtgcaattataacaggcttcagcatgcagtgccggctgatgatggcaccacaagatccccatcaatagacagcattcagaaggaccccagggagtttgcctggcgtgatcctgagttgcctgaggtcattcacatgcttcagcaccagttcccatctgttcaggcaaatgcagcggcctacctgcagcacctgtgctttggtgacaacaaagtgaagatggaggtgtgtaggttagggggaatcaagcatctggttgaccttctggaccacagagttttggaagttcagaagaatgcttgtggtgcccttcgaaacctcgtttttggcaagtctacagatgaaaataaaatagcaatgaagaatgttggtgggatacctgccttgttgcgactgttgagaaaatctattgatgcagaagtaagggagcttgttacaggagttctttggaatttatcctcatgtgatgctgtaaaaatgacaatcattcgagatgctctctcaaccttaacaaacactgtgattgttccacattctggatggaataactcttcttttgatgatgatcataaaattaaatttcagacttcactagttctgcgtaacacgacaggttgcctaaggaacctcagctccgcgggggaagaagctcggaagcaaatgcggtcctgcgaggggctggtagactcactgttgtatgtgatccacacgtgtgtgaacacatccgattacgacagcaagacggtggagaactgcgtgtgcaccctgaggaacctgtcctatcggctggagctggaggtgccccaggcccggttactgggactgaacgaattggatgacttactaggaaaagagtctcccagcaaagactctgagccaagttgctgggggaagaagaagaaaaagaaaaagaggactccgcaagaagatcaa

SEQ ID NO: 357 - DNA, 1731 bp, Homo sapiens
atgttaaaggctgtgctgaagaagagccgagagggaggaaagggaggcaagaaggaagcaggagttctttggaatttatcctcatgtgatgctgtaaaaatgacaatcattcgagatgctctctcaaccttaacaaacactgtgattgttccacattctggatggaataactcttcttttgatgatgatcataaaattaaatttcagacttcactagttctgcgtaacacgacaggttgcctaaggaacctcagctccgcgggggaagaagctcggaagcaaatgcggtcctgcgaggggctggtagactcactgttgtatgtgatccacacgtgtgtgaacacatccgattacgacagcaagacggtggagaactgcgtgtgcaccctgaggaacctgtcctatcggctggagctggaggtgccccaggcccggttactgggactgaacgaattggatgacttactaggaaaagagtctcccagcaaagactctgagccaagttgctgggggaagaagaagaaaaagaaaaagaggactccgcaagaagatcaatgggatggagttggtcctatcccaggactgtcgaagtcccccaaaggggttgagatgctgtggcacccatcggtggtaaaaccatatctgactcttctagcagaaagttccaacccagccaccttggaaggctctgcagggtctctccagaacctctctgctggcaactggaagtttgcagcatatatccgggcggccgtccgaaaagaaaaggggctccccatccttgtggagcttctgagaatggataacgatagagttgtttcttccgtggcaacagccttgaggaatatggcactagatgttcgcaacaaggagctcataggcaaatacgccatgcgagacctggtcaaccggctccccggcggcaatggccccagtgtcttgtctgatgagaccatggcagccatctgctgtgctctgcacgaggtcaccagcaaaaacatggagaacgcaaaagccctggccgactcaggaggcatagagaagctggtgaacataaccaaaggcaggggcgacagatcatctctgaaagtggtgaaggcagcagcccaggtcttgaatacattatggcaatatcgggacctccggagcatttataaaaaggatgggtggaatcagaaccattttattacacctgtgtcgacattggagcgagaccgattcaaatcacatccttccttgtctaccaccaaccaacagatgtcacccatcattcagtcagtcggcagcacctcttcctcaccagcactgttaggaatcagagaccctcgctctgaatacgataggacccagccacctatgcagtattacaatagccaaggggatgccacacataaaggcctgtaccctggctccagcaaaccttcaccaatttacatcagttcctattcctcaccagcaagagaacaaaatagacggctacagcatcaacagctgtattatagtcaagatgactccaacagaaagaactttgatgcatacagattgtatttgcagtctcctcatagctatgaagatccttattttgatgaccgagttcactttccagcttctactgattactcaacacagtatggactgaaatcgaccacaaattatgtagacttttattccactaaacgaccttcttatagagcagaacagtacccagggtccccagactcatgggtgtag

SEQ ID NO: 358 - DNA, 2550 bp, Homo sapiens
atgaccgccgtaccacagcatctgggaccttcactgcaaaggactgttcatgacatggagcaattcggacagcagcagtatgacatttatgagaggatggttccacccaggccagacagcctgacaggcttacggagttcctatgctagtcagcatagtcagcttgggcaagaccttcgttctgccgtgtctcccgacttgcacattactcctatatatgaggggaggacctattacagcccagtgtaccgcagcccaaaccatggaactgtggagctccaaggatcgcagacggcgttgtatcgcacaggttcaggtattggaaatctacaaaggacatccagccaacgaagtacccttacataccaaagaaataattatgctctgaacacaacagctacctacgcggagccctacaggcctatacaataccgagtgcaagagtgcaattataacaggcttcagcatgcagtgccggctgatgatggcaccacaagatccccatcaatagacagcattcagaaggaccccagggagtttgcctggcgtgatcctgagttgcctgaggtcattcacatgcttcagcaccagttcccatctgttcaggcaaatgcagcggcctacctgcagcacctgtgctttggtgacaacaaagtgaagatggaggtgtgtaggttagggggaatcaagcatctggttgaccttctggaccacagagttttggaagttcagaagaatgcttgtggtgcccttcgaaacctcgtttttggcaagtctacagatgaaaataaaatagcaatgaagaatgttggtgggatacctgccttgttgcgactgttgagaaaatctattgatgcagaagtaagggagcttgttacaggagttctttggaatttatcctcatgtgatgctgtaaaaatgacaatcattcgagatgctctctcaaccttaacaaacactgtgattgttccacattctggatggaataactcttcttttgatgatgatcataaaattaaatttcagacttcactagttctgcgtaacacgacaggttgcctaaggaacctcagctccgcgggggaagaagctcggaagcaaatgcggtcctgcgaggggctggtagactcactgttgtatgtgatccacacgtgtgtgaacacatccgattacgacagcaagacggtggagaactgcgtgtgcaccctgaggaacctgtcctatcggctggagctggaggtgccccaggcccggttactgggactgaacgaattggatgacttactaggaaaagagtctcccagcaaagactctgagccaagttgctgggggaagaagaagaaaaagaaaaagaggactccgcaagaagatcaatgggatggagttggtcctatcccaggactgtcgaagtcccccaaaggggttgagatgctgtggcacccatcggtggtaaaaccatatctgactcttctagcagaaagttccaacccagccaccttggaaggctctgcagggtctctccagaacctctctgctggcaactggaagtttgcagcatatatccgggcggccgtccgaaaagaaaaggggctccccatccttgtggagcttctgagaatggataacgatagagttgtttcttccgtggcaacagccttgaggaatatggcactagatgttcgcaacaaggagctcataggcaaatacgccatgcgagacctggtcaaccggctccccggcggcaatggccccagtgtcttgtctgatgagaccatggcagccatctgctgtgctctgcacgaggtcaccagcaaaaacatggagaacgcaaaagccctggccgactcaggaggcatagagaagctggtgaacataaccaaaggcaggggcgacagatcatctctgaaagtggtgaaggcagcagcccaggtcttgaatacattatggcaatatcgggacctccggagcatttataaaaaggatgggtggaatcagaaccattttattacacctgtgtcgacattggagcgagaccgattcaaatcacatccttccttgtctaccaccaaccaacagatgtcacccatcattcagtcagtcggcagcacctcttcctcaccagcactgttaggaatcagagaccctcgctctgaatacgataggacccagccacctatgcagtattacaatagccaaggggatgccacacataaaggcctgtaccctggctccagcaaaccttcaccaatttacatcagttcctattcctcaccagcaagagaacaaaatagacggctacagcatcaacagctgtattatagtcaagatgactccaacagaaagaactttgatgcatacagattgtatttgcagtctcctcatagctatgaagatccttattttgatgaccgagttcactttccagcttctactgattactcaacacagtatggactgaaatcgaccacaaattatgtagacttttattccactaaacgaccttcttatagagcagaacagtacccagggtccccagactcatgggtgtag

SEQ ID NO: 359 - DNA, 3579 bp, Homo sapiens
atgccagctcctgagcaggcctcattggtggaggaggggcaaccacagacccgccaggaagctgcctccactggcccaggcatggaacccgagaccacagccaccactattctagcatccgtgaaggagcaggagcttcagtttcagcgactcacccgagaactggaagtggaaaggcagattgttgccagtcagctagaaagatgtaggcttggagcagaatcaccaagcatcgccagcaccagctcaactgagaagtcatttccttggagatcaacagacgtgccaaatactggtgtaagcaaacctagagtttctgacgctgtccagcccaacaactatctcatcaggacagagccagaacaaggaaccctctattcaccagaacagacatctctccatgaaagtgagggatcattgggtaactcaagaagttcaacacaaatgaattcttattccgacagtggataccaggaagcagggagtttccacaacagccagaacgtgagcaaggcagacaacagacagcagcattcattcataggatcaactaacaaccatgtggtgaggaattcaagagctgaaggacaaacactggttcagccatcagtagccaatcgggccatgagaagagttagttcagttccatctagagcacagtctccttcttatgttatcagcacaggcgtgtctccttcaagggggtctctgagaacttctctgggtagtggatttggctctccgtcagtgaccgacccccgacctctgaaccccagtgcatattcctccaccacattacctgctgcacgggcagcctctccgtactcacagagacccgcctccccaacagctatacggcggattgggtcagtcacctcccggcagacctccaatcccaacggaccaacccctcaataccaaaccaccgccagagtggggtccccactgaccctgacggatgcacagactcgagtagcttccccatcccaaggccaggtggggtcgtcgtcccccaaacgctcagggatgaccgccgtaccacagcatctgggaccttcactgcaaaggactgttcatgacatggagcaattcggacagcagcagtatgacatttatgagaggatggttccacccaggccagacagcctgacaggcttacggagttcctatgctagtcagcatagtcagcttgggcaagaccttcgttctgccgtgtctcccgacttgcacattactcctatatatgaggggaggacctattacagcccagtgtaccgcagcccaaaccatggaactgtggagctccaaggatcgcagacggcgttgtatcgcacaggttcagtaggtattggaaatctacaaaggacatccagccaacgaagtacccttacataccaaagaaataattatgctctgaacacaacagctacctacgcggagccctacaggcctatacaataccgagtgcaagagtgcaattataacaggcttcagcatgcagtgccggctgatgatggcaccacaagatccccatcaatagacagcattcagaaggaccccagggagtttgcctggcgtgatcctgagttgcctgaggtcattcacatgcttcagcaccagttcccatctgttcaggcaaatgcagcggcctacctgcagcacctgtgctttggtgacaacaaagtgaagatggaggtgtgtaggttagggggaatcaagcatctggttgaccttctggaccacagagttttggaagttcagaagaatgcttgtggtgcccttcgaaacctcgtttttggcaagtctacagatgaaaataaaatagcaatgaagaatgttggtgggatacctgccttgttgcgactgttgagaaaatctattgatgcagaagtaagggagcttgttacaggagttctttggaatttatcctcatgtgatgctgtaaaaatgacaatcattcgagatgctctctcaaccttaacaaacactgtgattgttccacattctggatggaataactcttcttttgatgatgatcataaaattaaatttcagacttcactagttctgcgtaacacgacaggttgcctaaggaacctcagctccgcgggggaagaagctcggaagcaaatgcggtcctgcgaggggctggtagactcactgttgtatgtgatccacacgtgtgtgaacacatccgattacgacagcaagacggtggagaactgcgtgtgcaccctgaggaacctgtcctatcggctggagctggaggtgccccaggcccggttactgggactgaacgaattggatgacttactaggaaaagagtctcccagcaaagactctgagccaagttgctgggggaagaagaagaaaaagaaaaagaggactccgcaagaagatcaatgggatggagttggtcctatcccaggactgtcgaagtcccccaaaggggttgagatgctgtggcacccatcggtggtaaaaccatatctgactcttctagcagaaagttccaacccagccaccttggaaggctctgcagggtctctccagaacctctctgctggcaactggaagtttgcagcatatatccgggcggccgtccgaaaagaaaaggggctccccatccttgtggagcttctgagaatggataacgatagagttgtttcttccgtggcaacagccttgaggaatatggcactagatgttcgcaacaaggagctcataggcaaatacgccatgcgagacctggtcaaccggctccccggcggcaatggccccagtgtcttgtctgatgagaccatggcagccatctgctgtgctctgcacgaggtcaccagcaaaaacatggagaacgcaaaagccctggccgactcaggaggcatagagaagctggtgaacataaccaaaggcaggggcgacagatcatctctgaaagtggtgaaggcagcagcccaggtcttgaatacattatggcaatatcgggacctccggagcatttataaaaaggatgggtggaatcagaaccattttattacacctgtgtcgacattggagcgagaccgattcaaatcacatccttccttgtctaccaccaaccaacagatgtcacccatcattcagtcagtcggcagcacctcttcctcaccagcactgttaggaatcagagaccctcgctctgaatacgataggacccagccacctatgcagtattacaatagccaaggggatgccacacataaaggcctgtaccctggctccagcaaaccttcaccaatttacatcagttcctattcctcaccagcaagagaacaaaatagacggctacagcatcaacagctgtattatagtcaagatgactccaacagaaagaactttgatgcatacagattgtatttgcagtctcctcatagctatgaagatccttattttgatgaccgagttcactttccagcttctactgattactcaacacagtatggactgaaatcgaccacaaattatgtagacttttattccactaaacgaccttcttatagagcagaacagtacccagggtccccagactcatgggtgtag

SEQ ID NO: 360 - DNA, 1602 bp, Homo sapiens
atgttaaaggctgtgctgaagaagagccgagagggaggaaagggaggcaagaaggaagcaggagttctttggaatttatcctcatgtgatgctgtaaaaatgacaatcattcgagatgctctctcaaccttaacaaacactgtgattgttccacattctggatggaataactcttcttttgatgatgatcataaaattaaatttcagacttcactagttctgcgtaacacgacaggttgcctaaggaacctcagctccgcgggggaagaagctcggaagcaaatgcggtcctgcgaggggctggtagactcactgttgtatgtgatccacacgtgtgtgaacacatccgattacgacagcaagacggtggagaactgcgtgtgcaccctgaggaacctgtcctatcggctggagctggaggtgccccaggcccggttactgggactgaacgaattggatgacttactaggaaaagagtctcccagcaaagactctgagccaagttgctgggggaagaagaagaaaaagaaaaagaggactccgcaagaagatcaatgggatggagttggtcctatcccaggactgtcgaagtcccccaaaggggttgagatgctgtggcacccatcggtggtaaaaccatatctgactcttctagcagaaagttccaacccagccaccttggaaggctctgcagggtctctccagaacctctctgctggcaactggaagtttgcagcatatatccgggcggccgtccgaaaagaaaaggggctccccatccttgtggagcttctgagaatggataacgatagagttgtttcttccgtggcaacagccttgaggaatatggcactagatgttcgcaacaaggagctcataggcaaatacgccatgcgagacctggtcaaccggctccccggcggcaatggccccagtgtcttgtctgatgagaccatggcagccatctgctgtgctctgcacgaggtcaccagcaaaaacatggagaacgcaaaagccctggccgactcaggaggcatagagaagctggtgaacataaccaaaggcaggggcgacagatcatctctgaaagtggtgaaggcagcagcccaggtcttgaatacattatggcaatatcgggacctccggagcatttataaaaaggatgggtggaatcagaaccattttattacacctgtgtcgacattggagcgagaccgattcaaatcacatccttccttgtctaccaccaaccaacagatgtcacccatcattcagtcaggctccagcaaaccttcaccaatttacatcagttcctattcctcaccagcaagagaacaaaatagacggctacagcatcaacagctgtattatagtcaagatgactccaacagaaagaactttgatgcatacagattgtatttgcagtctcctcatagctatgaagatccttattttgatgaccgagttcactttccagcttctactgattactcaacacagtatggactgaaatcgaccacaaattatgtagacttttattccactaaacgaccttcttatagagcagaacagtacccagggtccccagactcatgggtgtag

SEQ ID NO: 361 - DNA, 555 bp, Homo sapiens
atgttaaaggctgtgctgaagaagagccgagagggaggaaagggaggcaagaaggaagcaggagttctttggaatttatcctcatgtgatgctgtaaaaatgacaatcattcgagatgctctctcaaccttaacaaacactgtgattgttccacattctggatggaataactcttcttttgatgatgatcataaaattaaatttcagacttcactagttctgcgtaacacgacaggttgcctaaggaacctcagctccgcgggggaagaagctcggaagcaaatgcggtcctgcgaggggctggtagactcactgttgtatgtgatccacacgtgtgtgaacacatccgattacgacagcaagacggtggagaactgcgtgtgcaccctgaggaacctgtcctatcggctggagctggaggtgccccaggcccggttactgggactgaacgaattggatgacttactaggaaaagagtctcccagcaaagactctgagccaagttgctgggggaagaagaagaaaaagaaaaagaggactccgcaagaagatcaa

SEQ ID NO: 362 - DNA, 243 bp, Homo sapiens
atgttaaaggctgtgctgaagaagagccgagagggaggaaagggaggcaagaaggaagcaggagttctttggaatttatcctcatgtgatgctgtaaaaatgacaatcattcgagatgctctctcaaccttaacaaacactgtgattgttccacattctggatggaataactcttcttttgatgatgatcataaaattaaatttcagacttcactagttctgcgtaacacgacaggttgccta

SEQ ID NO: 363 - DNA, 2085 bp, Homo sapiens
atgccagctcctgagcaggcctcattggtggaggaggggcaaccacagacccgccaggaagctgcctccactggcccaggcatggaacccgagaccacagccaccactattctagcatccgtgaaggagcaggagcttcagtttcagcgactcacccgagaactggaagtggaaaggcagattgttgccagtcagctagaaagatgtaggcttggagcagaatcaccaagcatcgccagcaccagctcaactgagaagtcatttccttggagatcaacagacgtgccaaatactggtgtaagcaaacctagagtttctgacgctgtccagcccaacaactatctcatcaggacagagccagaacaaggaaccctctattcaccagaacagacatctctccatgaaagatcattgggtaactcaagaagttcaacacaaatgaattcttattccgacagtggataccaggaagcagggagtttccacaacagccagaacgtgagcaaggcagacaacagacagcagcattcattcataggatcaactaacaaccatgtggtgaggaattcaagagctgaaggacaaacactggttcagccatcagtagccaatcgggccatgagaagagttagttcagttccatctagagcacagtctccttcttatgttatcagcacaggcgtgtctccttcaagggggtctctgagaacttctctgggtagtggatttggctctccgtcagtgaccgacccccgacctctgaaccccagtgcatattcctccaccacattacctgctgcacgggcagcctctccgtactcacagagacccgcctccccaacagctatacggcggattgggtcagtcacctcccggcagacctccaatcccaacggaccaacccctcaataccaaaccaccgccagagtggggtccccactgaccctgacggatgcacagactcgagtagcttccccatcccaaggccaggtggggtcgtcgtcccccaaacgctcagggatgaccgccgtaccacagcatctgggaccttcactgcaaaggactgttcatgacatggagcaattcggacagcagcagtatgacatttatgagaggatggttccacccaggccagacagcctgacaggcttacggagttcctatgctagtcagcatagtcagcttgggcaagaccttcgttctgccgtgtctcccgacttgcacattactcctatatatgaggggaggacctattacagcccagtgtaccgcagcccaaaccatggaactgtggagctccaaggatcgcagacggcgttgtatcgcacaggttcagtaggtattggaaatctacaaaggacatccagccaacgaagtacccttacataccaaagaaataattatgctctgaacacaacagctacctacgcggagccctacaggcctatacaataccgagtgcaagagtgcaattataacaggcttcagcatgcagtgccggctgatgatggcaccacaagatccccatcaatagacagcattcagaaggaccccagggagtttgcctggcgtgatcctgagttgcctgaggtcattcacatgcttcagcaccagttcccatctgttcaggcaaatgcagcggcctacctgcagcacctgtgctttggtgacaacaaagtgaagatggaggtgtgtaggttagggggaatcaagcatctggttgaccttctggaccacagagttttggaagttcagaagaatgcttgtggtgcccttcgaaacctcgtttttggcaagtctacagatgaaaataaaatagcaatgaagaatgttggtgggatacctgccttgttgcgactgttgagaaaatctattgatgcagaagtaagggagcttgttacaggagttctttggaatttatcctcatgtgatgctgtaaaaatgacaatcattcgagatgctctctcaaccttaacaaacactgtgattgttccacattctggatggaataactcttcttttgatgatgatcataaaattaaatttcagacttcactagttctgcgtaacacgacaggttgccta

SEQ ID NO: 364 - DNA, 2742 bp, Homo sapiens
atgccagctcctgagcaggcctcattggtggaggaggggcaaccacagacccgccaggaagctgcctccactggcccaggcatggaacccgagaccacagccaccactattctagcatccgtgaaggagcaggagcttcagtttcagcgactcacccgagaactggaagtggaaaggcagattgttgccagtcagctagaaagatgtaggcttggagcagaatcaccaagcatcgccagcaccagctcaactgagaagtcatttccttggagatcaacagacgtgccaaatactggtgtaagcaaacctagagtttctgacgctgtccagcccaacaactatctcatcaggacagagccagaacaaggaaccctctattcaccagaacagacatctctccatgaaagtgagggatcattgggtaactcaagaagttcaacacaaatgaattcttattccgacagtggataccaggaagcagggagtttccacaacagccagaacgtgagcaaggcagacaacagacagcagcattcattcataggatcaactaacaaccatgtggtgaggaattcaagagctgaaggacaaacactggttcagccatcagtagccaatcgggccatgagaagagttagttcagttccatctagagcacagtctccttcttatgttatcagcacaggcgtgtctccttcaagggggtctctgagaacttctctgggtagtggatttggctctccgtcagtgaccgacccccgacctctgaaccccagtgcatattcctccaccacattacctgctgcacgggcagcctctccgtactcacagagacccgcctccccaacagctatacggcggattgggtcagtcacctcccggcagacctccaatcccaacggaccaacccctcaataccaaaccaccgccagagtggggtccccactgaccctgacggatgcacagactcgagtagcttccccatcccaaggccaggtggggtcgtcgtcccccaaacgctcagggatgaccgccgtaccacagcatctgggaccttcactgcaaaggactgttcatgacatggagcaattcggacagcagcagtatgacatttatgagaggatggttccacccaggccagacagcctgacaggcttacggagttcctatgctagtcagcatagtcagcttgggcaagaccttcgttctgccgtgtctcccgacttgcacattactcctatatatgaggggaggacctattacagcccagtgtaccgcagcccaaaccatggaactgtggagctccaaggatcgcagacggcgttgtatcgcacaggttcagtaggtattggaaatctacaaaggacatccagccaacgaagtacccttacataccaaagaaataattatgctctgaacacaacagctacctacgcggagccctacaggcctatacaataccgagtgcaagagtgcaattataacaggcttcagcatgcagtgccggctgatgatggcaccacaagatccccatcaatagacagcattcagaaggaccccagggagtttgcctggcgtgatcctgagttgcctgaggtcattcacatgcttcagcaccagttcccatctgttcaggcaaatgcagcggcctacctgcagcacctgtgctttggtgacaacaaagtgaagatggaggtgtgtaggttagggggaatcaagcatctggttgaccttctggaccacagagttttggaagttcagaagaatgcttgtggtgcccttcgaaacctcgtttttggcaagtctacagatgaaaataaaatagcaatgaagaatgttggtgggatacctgccttgttgcgactgttgagaaaatctattgatgcagaagtaagggagcttgttacaggagttctttggaatttatcctcatgtgatgctgtaaaaatgacaatcattcgagatgctctctcaaccttaacaaacactgtgattgttccacattctggatggaataactcttcttttgatgatgatcataaaattaaatttcagacttcactagttctgcgtaacacgacaggttgcctaaggaacctcagctccgcgggggaagaagctcggaagcaaatgcggtcctgcgaggggctggtagactcactgttgtatgtgatccacacgtgtgtgaacacatccgattacgacagcaagacggtggagaactgcgtgtgcaccctgaggaacctgtcctatcggctggagctggaggtgccccaggcccggttactgggactgaacgaattggatgacttactaggaaaagagtctcccagcaaagactctgagccaagttgctgggggaagaagaagaaaaagaaaaagaggactccgcaagaagatcaatgggatggagttggtcctatcccaggactgtcgaagtcccccaaaggggttgagatgctgtggcacccatcggtggtaaaaccatatctgactcttctagcagaaagttccaacccagccaccttggaaggctctgcagggtctctccagaacctctctgctggcaactggaagtttgcagcatatatccgggcggccgtccgaaaagaaaaggggctccccatccttgtggagcttctgagaatggataacgatagagttgtttcttccgtggcaacagccttgaggaatatggcactagatgttcgcaacaaggagctcataggtatgttctggtga

SEQ ID NO: 365 - DNA, 894 bp, Homo sapiens
atgttaaaggctgtgctgaagaagagccgagagggaggaaagggaggcaagaaggaagcaggagttctttggaatttatcctcatgtgatgctgtaaaaatgacaatcattcgagatgctctctcaaccttaacaaacactgtgattgttccacattctggatggaataactcttcttttgatgatgatcataaaattaaatttcagacttcactagttctgcgtaacacgacaggttgcctaaggaacctcagctccgcgggggaagaagctcggaagcaaatgcggtcctgcgaggggctggtagactcactgttgtatgtgatccacacgtgtgtgaacacatccgattacgacagcaagacggtggagaactgcgtgtgcaccctgaggaacctgtcctatcggctggagctggaggtgccccaggcccggttactgggactgaacgaattggatgacttactaggaaaagagtctcccagcaaagactctgagccaagttgctgggggaagaagaagaaaaagaaaaagaggactccgcaagaagatcaatgggatggagttggtcctatcccaggactgtcgaagtcccccaaaggggttgagatgctgtggcacccatcggtggtaaaaccatatctgactcttctagcagaaagttccaacccagccaccttggaaggctctgcagggtctctccagaacctctctgctggcaactggaagtttgcagcatatatccgggcggccgtccgaaaagaaaaggggctccccatccttgtggagcttctgagaatggataacgatagagttgtttcttccgtggcaacagccttgaggaatatggcactagatgttcgcaacaaggagctcataggtatgttctggtga

SEQ ID NO: 366 - DNA, 3450 bp, Homo sapiens
atgccagctcctgagcaggcctcattggtggaggaggggcaaccacagacccgccaggaagctgcctccactggcccaggcatggaacccgagaccacagccaccactattctagcatccgtgaaggagcaggagcttcagtttcagcgactcacccgagaactggaagtggaaaggcagattgttgccagtcagctagaaagatgtaggcttggagcagaatcaccaagcatcgccagcaccagctcaactgagaagtcatttccttggagatcaacagacgtgccaaatactggtgtaagcaaacctagagtttctgacgctgtccagcccaacaactatctcatcaggacagagccagaacaaggaaccctctattcaccagaacagacatctctccatgaaagtgagggatcattgggtaactcaagaagttcaacacaaatgaattcttattccgacagtggataccaggaagcagggagtttccacaacagccagaacgtgagcaaggcagacaacagacagcagcattcattcataggatcaactaacaaccatgtggtgaggaattcaagagctgaaggacaaacactggttcagccatcagtagccaatcgggccatgagaagagttagttcagttccatctagagcacagtctccttcttatgttatcagcacaggcgtgtctccttcaagggggtctctgagaacttctctgggtagtggatttggctctccgtcagtgaccgacccccgacctctgaaccccagtgcatattcctccaccacattacctgctgcacgggcagcctctccgtactcacagagacccgcctccccaacagctatacggcggattgggtcagtcacctcccggcagacctccaatcccaacggaccaacccctcaataccaaaccaccgccagagtggggtccccactgaccctgacggatgcacagactcgagtagcttccccatcccaaggccaggtggggtcgtcgtcccccaaacgctcagggatgaccgccgtaccacagcatctgggaccttcactgcaaaggactgttcatgacatggagcaattcggacagcagcagtatgacatttatgagaggatggttccacccaggccagacagcctgacaggcttacggagttcctatgctagtcagcatagtcagcttgggcaagaccttcgttctgccgtgtctcccgacttgcacattactcctatatatgaggggaggacctattacagcccagtgtaccgcagcccaaaccatggaactgtggagctccaaggatcgcagacggcgttgtatcgcacaggttcagtaggtattggaaatctacaaaggacatccagccaacgaagtacccttacataccaaagaaataattatgctctgaacacaacagctacctacgcggagccctacaggcctatacaataccgagtgcaagagtgcaattataacaggcttcagcatgcagtgccggctgatgatggcaccacaagatccccatcaatagacagcattcagaaggaccccagggagtttgcctggcgtgatcctgagttgcctgaggtcattcacatgcttcagcaccagttcccatctgttcaggcaaatgcagcggcctacctgcagcacctgtgctttggtgacaacaaagtgaagatggaggtgtgtaggttagggggaatcaagcatctggttgaccttctggaccacagagttttggaagttcagaagaatgcttgtggtgcccttcgaaacctcgtttttggcaagtctacagatgaaaataaaatagcaatgaagaatgttggtgggatacctgccttgttgcgactgttgagaaaatctattgatgcagaagtaagggagcttgttacaggagttctttggaatttatcctcatgtgatgctgtaaaaatgacaatcattcgagatgctctctcaaccttaacaaacactgtgattgttccacattctggatggaataactcttcttttgatgatgatcataaaattaaatttcagacttcactagttctgcgtaacacgacaggttgcctaaggaacctcagctccgcgggggaagaagctcggaagcaaatgcggtcctgcgaggggctggtagactcactgttgtatgtgatccacacgtgtgtgaacacatccgattacgacagcaagacggtggagaactgcgtgtgcaccctgaggaacctgtcctatcggctggagctggaggtgccccaggcccggttactgggactgaacgaattggatgacttactaggaaaagagtctcccagcaaagactctgagccaagttgctgggggaagaagaagaaaaagaaaaagaggactccgcaagaagatcaatgggatggagttggtcctatcccaggactgtcgaagtcccccaaaggggttgagatgctgtggcacccatcggtggtaaaaccatatctgactcttctagcagaaagttccaacccagccaccttggaaggctctgcagggtctctccagaacctctctgctggcaactggaagtttgcagcatatatccgggcggccgtccgaaaagaaaaggggctccccatccttgtggagcttctgagaatggataacgatagagttgtttcttccgtggcaacagccttgaggaatatggcactagatgttcgcaacaaggagctcataggcaaatacgccatgcgagacctggtcaaccggctccccggcggcaatggccccagtgtcttgtctgatgagaccatggcagccatctgctgtgctctgcacgaggtcaccagcaaaaacatggagaacgcaaaagccctggccgactcaggaggcatagagaagctggtgaacataaccaaaggcaggggcgacagatcatctctgaaagtggtgaaggcagcagcccaggtcttgaatacattatggcaatatcgggacctccggagcatttataaaaaggatgggtggaatcagaaccattttattacacctgtgtcgacattggagcgagaccgattcaaatcacatccttccttgtctaccaccaaccaacagatgtcacccatcattcagtcaggctccagcaaaccttcaccaatttacatcagttcctattcctcaccagcaagagaacaaaatagacggctacagcatcaacagctgtattatagtcaagatgactccaacagaaagaactttgatgcatacagattgtatttgcagtctcctcatagctatgaagatccttattttgatgaccgagttcactttccagcttctactgattactcaacacagtatggactgaaatcgaccacaaattatgtagacttttattccactaaacgaccttcttatagagcagaacagtacccagggtccccagactcatgggtgtag

SEQ ID NO: 367 - DNA, 1959 bp, Homo sapiens
atgaattcttattccgacagtggataccaggaagcagggagtttccacaacagccagaacgtgagcaaggcagacaacagacagcagcattcattcataggatcaactaacaaccatgtggtgaggaattcaagagctgaaggacaaacactggttcagccatcagtagccaatcgggccatgagaagagttagttcagttccatctagagcacagtctccttcttatgttatcagcacaggcgtgtctccttcaagggggtctctgagaacttctctgggtagtggatttggctctccgtcagtgaccgacccccgacctctgaaccccagtgcatattcctccaccacattacctgctgcacgggcagcctctccgtactcacagagacccgcctccccaacagctatacggcggattgggtcagtcacctcccggcagacctccaatcccaacggaccaacccctcaataccaaaccaccgccagagtggggtccccactgaccctgacggatgcacagactcgagtagcttccccatcccaaggccaggtggggtcgtcgtcccccaaacgctcagggatgaccgccgtaccacagcatctgggaccttcactgcaaaggactgttcatgacatggagcaattcggacagcagcagtatgacatttatgagaggatggttccacccaggccagacagcctgacaggcttacggagttcctatgctagtcagcatagtcagcttgggcaagaccttcgttctgccgtgtctcccgacttgcacattactcctatatatgaggggaggacctattacagcccagtgtaccgcagcccaaaccatggaactgtggagctccaaggatcgcagacggcgttgtatcgcacaggttcagtaggtattggaaatctacaaaggacatccagccaacgaagtacccttacataccaaagaaataattatgctctgaacacaacagctacctacgcggagccctacaggcctatacaataccgagtgcaagagtgcaattataacaggcttcagcatgcagtgccggctgatgatggcaccacaagatccccatcaatagacagcattcagaaggaccccagggagtttgcctggcgtgatcctgagttgcctgaggtcattcacatgcttcagcaccagttcccatctgttcaggcaaatgcagcggcctacctgcagcacctgtgctttggtgacaacaaagtgaagatggaggtgtgtaggttagggggaatcaagcatctggttgaccttctggaccacagagttttggaagttcagaagaatgcttgtggtgcccttcgaaacctcgtttttggcaagtctacagatgaaaataaaatagcaatgaagaatgttggtgggatacctgccttgttgcgactgttgagaaaatctattgatgcagaagtaagggagcttgttacaggagttctttggaatttatcctcatgtgatgctgtaaaaatgacaatcattcgagatgctctctcaaccttaacaaacactgtgattgttccacattctggatggaataactcttcttttgatgatgatcataaaattaaatttcagacttcactagttctgcgtaacacgacaggttgcctaaggaacctcagctccgcgggggaagaagctcggaagcaaatgcggtcctgcgaggggctggtagactcactgttgtatgtgatccacacgtgtgtgaacacatccgattacgacagcaagacggtggagaactgcgtgtgcaccctgaggaacctgtcctatcggctggagctggaggtgccccaggcccggttactgggactgaacgaattggatgacttactaggaaaagagtctcccagcaaagactctgagccaagttgctgggggaagaagaagaaaaagaaaaagaggactccgcaagaagatcaa

SEQ ID NO: 368 - DNA, 1269 bp, Homo sapiens
atgcagagtaatatggtccggaaaaagaacccccctctgagaaacgttgcaagtgaaggcgagggccagatcctggagcctataggtacagaaagcaaggtatctggaaagaacaaagaattttctgcagatcagatgtcagaaaatacggatcagagtgatgctgcagaactaaatcataaggaggaacatagcttgcatgttcaagatccatcttctagcagtaagaaggacttgaaaagcgcagttctgagtgagaaggctggcttcaattatgaaagccccagtaagggaggaaactttccctcctttccgcatgatgaggtgacagacagaaatatgttggctttctcatctccagctgctgggggagtctgtgagcccttgaagtctccgcaaagagcagaggcagatgaccctcaagatatggcctgcaccccctcaggggactcactggagacaaaggaagatcagaagatgtcaccaaaggctacagaggaaacagggcaagcacagagtggtcaagccaattgtcaaggtttgagcccagtttcagtggcctcaaaaaacccacaagtgccttcagatgggggtgtaagactgaataaatccaaaactgacttactggtgaatgacaacccagacccggcacctctgtctccagagcttcaggactttaaatgcaatatctgtggatatggttactacggcaacgaccccacagatctgattaagcacttccgaaagtatcacttaggactgcataaccgcaccaggcaagatgctgagctggacagcaaaatcttggcccttcataacatggtgcagttcagccattccaaagacttccagaaggtcaaccgttctgtgttttctggtgtgctgcaggacatcaattcttcaaggcctgttttactaaatgggacctatgatgtgcaggtggtattaaagataatcaaacattatcaagaagaaggacaaggaactgaagttgttcaaggagtgcttttgggtctggttgtagaagatcggcttgaaattaccaactgctttcctttccctcagcacacagaggatgatgctgactttgatgaagtccaatatcagatggaaatgatgcggagccttcgccatgtaaacattgatcatcttcacgtgggctggtatcagtccacatactatggctcattcgttacccgggcactcctggactctcagtttagttaccagcatgccattgaagaatctgtcgttctcatttatggttag

SEQ ID NO: 369 - DNA, 2931 bp, Homo sapiens
atgccttatgaagtcaatgctgggtatgattttacaaatatggtccggaaaaagaacccccctctgagaaacgttgcaagtgaaggcgagggccagatcctggagcctataggtacagaaagcaaggtatctggaaagaacaaagaattttctgcagatcagatgtcagaaaatacggatcagagtgatgctgcagaactaaatcataaggaggaacatagcttgcatgttcaagatccatcttctagcagtaagaaggacttgaaaagcgcagttctgagtgagaaggctggcttcaattatgaaagccccagtaagggaggaaactttccctcctttccgcatgatgaggtgacagacagaaatatgttggctttctcatctccagctgctgggggagtctgtgagcccttgaagtctccgcaaagagcagaggcagatgaccctcaagatatggcctgcaccccctcaggggactcactggagacaaaggaagatcagaagatgtcaccaaaggctacagaggaaacagggcaagcacagagtggtcaagccaattgtcaaggtttgagcccagtttcagtggcctcaaaaaacccacaagtgccttcagatgggggtgtaagactgaataaatccaaaactgacttactggtgaatgacaacccagacccggcacctctgtctccagagcttcaggactttaaatgcaatatctgtggatatggttactacggcaacgaccccacagatctgattaagcacttccgaaagtatcacttaggactgcataaccgcaccaggcaagatgctgagctggacagcaaaatcttggcccttcataacatggtgcagttcagccattccaaagacttccagaaggtcaaccgttctgtgttttctggtgtgctgcaggacatcaattcttcaaggcctgttttactaaatgggacctatgatgtgcaggtgacttcaggtggaacattcattggcattggacggaaaacaccagattgccaagggaacaccaagtatttccgctgtaaattctgcaatttcacttatatgggcaactcatccaccgaattagaacaacattttcttcagactcacccaaacaaaataaaagcttctctcccctcctctgaggttgcaaaaccttcagagaaaaactctaacaagtccatccctgcacttcaatccagtgattctggagacttgggaaaatggcaggacaagataacagtcaaagcaggagatgacactcctgttgggtactcagtgcccataaagcccctcgattcctctagacaaaatggtacagaggccaccagttactactggtgtaaattttgtagtttcagctgtgagtcatctagctcacttaaactgctagaacattatggcaagcagcacggagcagtgcagtcaggcggccttaatccagagttaaatgataagctttccaggggctctgtcattaatcagaatgatctagccaaaagttcagaaggagagacaatgaccaagacagacaagagctcgagtggggctaaaaagaaggacttctccagcaagggagccgaggataatatggtaacgagctataattgtcagttctgtgacttccgatattccaaaagccatggccctgatgtaattgtagtggggccacttctccgtcattatcaacagctccataacattcacaagtgtaccattaaacactgtccattctgtcccagaggactttgcagcccagaaaagcaccttggagaaattacttatccgtttgcttgtagaaaaagtaattgttcccactgtgcactcttgcttctgcacttgtctcctggggcggctggaagctcgcgagtcaaacatcagtgccatcagtgttcattcaccacccctgacgtagatgtactcctctttcactatgaaagtgtgcatgagtcccaagcatcggatgtcaaacaagaagcaaatcacctgcaaggatcggatgggcagcagtctgtcaaggaaagcaaagaacactcatgtaccaaatgtgattttattacccaagtggaagaagagatttcccgacactacaggagagcacacagctgctacaaatgccgtcagtgcagttttacagctgccgatactcagtcactactggagcacttcaacactgttcactgccaggaacaggacatcactacagccaacggcgaagaggacggtcatgccatatccaccatcaaagaggagcccaaaattgacttcagggtctacaatctgctaactccagactctaaaatgggagagccagtttctgagagtgtggtgaagagagagaagctggaagagaaggacgggctcaaagagaaagtttggaccgagagttccagtgatgaccttcgcaatgtgacttggagaggggcagacatcctgcgggggagtccgtcatacacccaagcaagcctggggctgctgacgcctgtgtctggcacccaagagcagacaaagactctaagggatagtcccaatgtggaggccgcccatctggcgcgacctatttatggcttggctgtggaaaccaagggattcctgcagggggcgccagctggcggagagaagtctggggccctcccccagcagtatcctgcatcgggagaaaacaagtccaaggatgaatcccagtccctgttacggtatcagcagcgtcgccagcaggagaatatgcagcgccagagccgaggagaacccccgctccctgaggaggacctgtccaaactcttcaaaccaccacagccgcctgccaggatggactcgctgctcattgcaggccagataaacacttactgccagaacatcaaggagttcactgcccaaaacttaggcaagctcttcatggcccaggctcttcaagaatacaacaactaa

SEQ ID NO: 370 - DNA, 3600 bp, Homo sapiens
atgcagagtaatatggtccggaaaaagaacccccctctgagaaacgttgcaagtgaaggcgagggccagatcctggagcctataggtacagaaagcaaggtatctggaaagaacaaagaattttctgcagatcagatgtcagaaaatacggatcagagtgatgctgcagaactaaatcataaggaggaacatagcttgcatgttcaagatccatcttctagcagtaagaaggacttgaaaagcgcagttctgagtgagaaggctggcttcaattatgaaagccccagtaagggaggaaactttccctcctttccgcatgatgaggtgacagacagaaatatgttggctttctcatctccagctgctgggggagtctgtgagcccttgaagtctccgcaaagagcagaggcagatgaccctcaagatatggcctgcaccccctcaggggactcactggagacaaaggaagatcagaagatgtcaccaaaggctacagaggaaacagggcaagcacagagtggtcaagccaattgtcaaggtttgagcccagtttcagtggcctcaaaaaacccacaagtgccttcagatgggggtgtaagactgaataaatccaaaactgacttactggtgaatgacaacccagacccggcacctctgtctccagagcttcaggactttaaatgcaatatctgtggatatggttactacggcaacgaccccacagatctgattaagcacttccgaaagtatcacttaggactgcataaccgcaccaggcaagatgctgagctggacagcaaaatcttggcccttcataacatggtgcagttcagccattccaaagacttccagaaggtcaaccgttctgtgttttctggtgtgctgcaggacatcaattcttcaaggcctgttttactaaatgggacctatgatgtgcaggtgacttcaggtggaacattcattggcattggacggaaaacaccagattgccaagggaacaccaagtatttccgctgtaaattctgcaatttcacttatatgggcaactcatccaccgaattagaacaacattttcttcagactcacccaaacaaaataaaagcttctctcccctcctctgaggttgcaaaaccttcagagaaaaactctaacaagtccatccctgcacttcaatccagtgattctggagacttgggaaaatggcaggacaagataacagtcaaagcaggagatgacactcctgttgggtactcagtgcccataaagcccctcgattcctctagacaaaatggtacagaggccaccagttactactggtgtaaattttgtagtttcagctgtgagtcatctagctcacttaaactgctagaacattatggcaagcagcacggagcagtgcagtcaggcggccttaatccagagttaaatgataagctttccaggggctctgtcattaatcagaatgatctagccaaaagttcagaaggagagacaatgaccaagacagacaagagctcgagtggggctaaaaagaaggacttctccagcaagggagccgaggataatatggtaacgagctataattgtcagttctgtgacttccgatattccaaaagccatggccctgatgtaattgtagtggggccacttctccgtcattatcaacagctccataacattcacaagtgtaccattaaacactgtccattctgtcccagaggactttgcagcccagaaaagcaccttggagaaattacttatccgtttgcttgtagaaaaagtaattgttcccactgtgcactcttgcttctgcacttgtctcctggggcggctggaagctcgcgagtcaaacatcagtgccatcagtgttcattcaccacccctgacgtagatgtactcctctttcactatgaaagtgtgcatgagtcccaagcatcggatgtcaaacaagaagcaaatcacctgcaaggatcggatgggcagcagtctgtcaaggaaagcaaagaacactcatgtaccaaatgtgattttattacccaagtggaagaagagatttcccgacactacaggagagcacacagctgctacaaatgccgtcagtgcagttttacagctgccgatactcagtcactactggagcacttcaacactgttcactgccaggaacaggacatcactacagccaacggcgaagaggacggtcatgccatatccaccatcaaagaggagcccaaaattgacttcagggtctacaatctgctaactccagactctaaaatgggagagccagtttctgagagtgtggtgaagagagagaagctggaagagaaggacgggctcaaagagaaagtttggaccgagagttccagtgatgaccttcgcaatgtgacttggagaggggcagacatcctgcgggggagtccgtcatacacccaagcaagcctggggctgctgacgcctgtgtctggcacccaagagcagacaaagactctaagggatagtcccaatgtggaggccgcccatctggcgcgacctatttatggcttggctgtggaaaccaagggattcctgcagggggcgccagctggcggagagaagtctggggccctcccccagcagtatcctgcatcgggagaaaacaagtccaaggatgaatcccagtccctgttacgggtggtattaaagataatcaaacattatcaagaagaaggacaaggaactgaagttgttcaaggagtgcttttgggtctggttgtagaagatcggcttgaaattaccaactgctttcctttccctcagcacacagaggatgatgctgactttgatgaagtccaatatcagatggaaatgatgcggagccttcgccatgtaaacattgatcatcttcacgtgggctggtatcagtccacatactatggctcattcgttacccgggcactcctggactctcagtttagttaccagcatgccattgaagaatctgtcgttctcatttatgatcccataaaaactgcccaaggatctctctcactaaaggcatacagactgactcctaaactgatggaagtttgtaaagaaaaggatttttcccctgaagcattgaaaaaagcaaatatcacctttgagtacatgtttgaagaagtgccgattgtaattaaaaattcacatctgatcaatgtcctaatgtgggaacttgaaaagaagtcagctgttgcagataaacatgaattgctcagccttgccagcagcaatcatttggggaagaatctacagttgctgatggacagagtggatgaaatgagccaagatatagttaaatacaacacatacatgaggaatactagtaaacaacagcagcagaaacatcagtatcagcagcgtcgccagcaggagaatatgcagcgccagagccgaggagaacccccgctccctgaggaggacctgtccaaactcttcaaaccaccacagccgcctgccaggatggactcgctgctcattgcaggccagataaacacttactgccagaacatcaaggagttcactgcccaaaacttaggcaagctcttcatggcccaggctcttcaagaatacaacaactaa

SEQ ID NO: 371 - DNA, 3030 bp, Homo sapiens
atgccttatgaagtcaatgctgggtatgattttacaaatatggtccggaaaaagaacccccctctgagaaacgttgcaagtgaaggcgagggccagatcctggagcctataggtacagaaagcaaggtatctggaaagaacaaagaattttctgcagatcagatgtcagaaaatacggatcagagtgatgctgcagaactaaatcataaggaggaacatagcttgcatgttcaagatccatcttctagcagtaagaaggacttgaaaagcgcagttctgagtgagaaggctggcttcaattatgaaagccccagtaagggaggaaactttccctcctttccgcatgatgaggtgacagacagaaatatgttggctttctcatctccagctgctgggggagtctgtgagcccttgaagtctccgcaaagagcagaggcagatgaccctcaagatatggcctgcaccccctcaggggactcactggagacaaaggaagatcagaagatgtcaccaaaggctacagaggaaacagggcaagcacagagtggtcaagccaattgtcaaggtttgagcccagtttcagtggcctcaaaaaacccacaagtgccttcagatgggggtgtaagactgaataaatccaaaactgacttactggtgaatgacaacccagacccggcacctctgtctccagagcttcaggactttaaatgcaatatctgtggatatggttactacggcaacgaccccacagatctgattaagcacttccgaaagtatcacttaggactgcataaccgcaccaggcaagatgctgagctggacagcaaaatcttggcccttcataacatggtgcagttcagccattccaaagacttccagaaggtcaaccgttctgtgttttctggtgtgctgcaggacatcaattcttcaaggcctgttttactaaatgggacctatgatgtgcaggtgacttcaggtggaacattcattggcattggacggaaaacaccagattgccaagggaacaccaagtatttccgctgtaaattctgcaatttcacttatatgggcaactcatccaccgaattagaacaacattttcttcagactcacccaaacaaaataaaagcttctctcccctcctctgaggttgcaaaaccttcagagaaaaactctaacaagtccatccctgcacttcaatccagtgattctggagacttgggaaaatggcaggacaagataacagtcaaagcaggagatgacactcctgttgggtactcagtgcccataaagcccctcgattcctctagacaaaatggtacagaggccaccagttactactggtgtaaattttgtagtttcagctgtgagtcatctagctcacttaaactgctagaacattatggcaagcagcacggagcagtgcagtcaggcggccttaatccagagttaaatgataagctttccaggggctctgtcattaatcagaatgatctagccaaaagttcagaaggagagacaatgaccaagacagacaagagctcgagtggggctaaaaagaaggacttctccagcaagggagccgaggataatatggtaacgagctataattgtcagttctgtgacttccgatattccaaaagccatggccctgatgtaattgtagtggggccacttctccgtcattatcaacagctccataacattcacaagtgtaccattaaacactgtccattctgtcccagaggactttgcagcccagaaaagcaccttggagaaattacttatccgtttgcttgtagaaaaagtaattgttcccactgtgcactcttgcttctgcacttgtctcctggggcggctggaagctcgcgagtcaaacatcagtgccatcagtgttcattcaccacccctgacgtagatgtactcctctttcactatgaaagtgtgcatgagtcccaagcatcggatgtcaaacaagaagcaaatcacctgcaaggatcggatgggcagcagtctgtcaaggaaagcaaagaacactcatgtaccaaatgtgattttattacccaagtggaagaagagatttcccgacactacaggagagcacacagctgctacaaatgccgtcagtgcagttttacagctgccgatactcagtcactactggagcacttcaacactgttcactgccaggaacaggacatcactacagccaacggcgaagaggacggtcatgccatatccaccatcaaagaggagcccaaaattgacttcagggtctacaatctgctaactccagactctaaaatgggagagccagtttctgagagtgtggtgaagagagagaagctggaagagaaggacgggctcaaagagaaagtttggaccgagagttccagtgatgaccttcgcaatgtgacttggagaggggcagacatcctgcgggggagtccgtcatacacccaagcaagcctggggctgctgacgcctgtgtctggcacccaagagcagacaaagactctaagggatagtcccaatgtggaggccgcccatctggcgcgacctatttatggcttggctgtggaaaccaagggattcctgcagggggcgccagctggcggagagaagtctggggccctcccccagcagtatcctgcatcgggagaaaacaagtccaaggatgaatcccagtccctgttacgggtggtattaaagataatcaaacattatcaagaagaaggacaaggaactgaagttgttcaaggagtgcttttgggtctggttgtagaagatcggcttgaaattaccaactgctttcctttccctcagcacacagaggatgatgctgactttgatgaagtccaatatcagatggaaatgatgcggagccttcgccatgtaaacattgatcatcttcacgtgggctggtatcagtccacatactatggctcattcgttacccgggcactcctggactctcagtttagttaccagcatgccattgaagaatctgtcgttctcatttatggttag

SEQ ID NO: 372 - DNA, 1296 bp, Homo sapiens
atgccttatgaagtcaatgctgggtatgattttacaaatatggtccggaaaaagaacccccctctgagaaacgttgcaagtgaaggcgagggccagatcctggagcctataggtacagaaagcaaggtatctggaaagaacaaagaattttctgcagatcagatgtcagaaaatacggatcagagtgatgctgcagaactaaatcataaggaggaacatagcttgcatgttcaagatccatcttctagcagtaagaaggacttgaaaagcgcagttctgagtgagaaggctggcttcaattatgaaagccccagtaagggaggaaactttccctcctttccgcatgatgaggtgacagacagaaatatgttggctttctcatctccagctgctgggggagtctgtgagcccttgaagtctccgcaaagagcagaggcagatgaccctcaagatatggcctgcaccccctcaggggactcactggagacaaaggaagatcagaagatgtcaccaaaggctacagaggaaacagggcaagcacagagtggtcaagccaattgtcaaggtttgagcccagtttcagtggcctcaaaaaacccacaagtgccttcagatgggggtgtaagactgaataaatccaaaactgacttactggtgaatgacaacccagacccggcacctctgtctccagagcttcaggactttaaatgcaatatctgtggatatggttactacggcaacgaccccacagatctgattaagcacttccgaaagtatcacttaggactgcataaccgcaccaggcaagatgctgagctggacagcaaaatcttggcccttcataacatggtgcagttcagccattccaaagacttccagaaggtcaaccgttctgtgttttctggtgtgctgcaggacatcaattcttcaaggcctgttttactaaatgggacctatgatgtgcaggtggtattaaagataatcaaacattatcaagaagaaggacaaggaactgaagttgttcaaggagtgcttttgggtctggttgtagaagatcggcttgaaattaccaactgctttcctttccctcagcacacagaggatgatgctgactttgatgaagtccaatatcagatggaaatgatgcggagccttcgccatgtaaacattgatcatcttcacgtgggctggtatcagtccacatactatggctcattcgttacccgggcactcctggactctcagtttagttaccagcatgccattgaagaatctgtcgttctcatttatggttag

SEQ ID NO: 373 - DNA, 3003 bp, Homo sapiens
atgcagagtaatatggtccggaaaaagaacccccctctgagaaacgttgcaagtgaaggcgagggccagatcctggagcctataggtacagaaagcaaggtatctggaaagaacaaagaattttctgcagatcagatgtcagaaaatacggatcagagtgatgctgcagaactaaatcataaggaggaacatagcttgcatgttcaagatccatcttctagcagtaagaaggacttgaaaagcgcagttctgagtgagaaggctggcttcaattatgaaagccccagtaagggaggaaactttccctcctttccgcatgatgaggtgacagacagaaatatgttggctttctcatctccagctgctgggggagtctgtgagcccttgaagtctccgcaaagagcagaggcagatgaccctcaagatatggcctgcaccccctcaggggactcactggagacaaaggaagatcagaagatgtcaccaaaggctacagaggaaacagggcaagcacagagtggtcaagccaattgtcaaggtttgagcccagtttcagtggcctcaaaaaacccacaagtgccttcagatgggggtgtaagactgaataaatccaaaactgacttactggtgaatgacaacccagacccggcacctctgtctccagagcttcaggactttaaatgcaatatctgtggatatggttactacggcaacgaccccacagatctgattaagcacttccgaaagtatcacttaggactgcataaccgcaccaggcaagatgctgagctggacagcaaaatcttggcccttcataacatggtgcagttcagccattccaaagacttccagaaggtcaaccgttctgtgttttctggtgtgctgcaggacatcaattcttcaaggcctgttttactaaatgggacctatgatgtgcaggtgacttcaggtggaacattcattggcattggacggaaaacaccagattgccaagggaacaccaagtatttccgctgtaaattctgcaatttcacttatatgggcaactcatccaccgaattagaacaacattttcttcagactcacccaaacaaaataaaagcttctctcccctcctctgaggttgcaaaaccttcagagaaaaactctaacaagtccatccctgcacttcaatccagtgattctggagacttgggaaaatggcaggacaagataacagtcaaagcaggagatgacactcctgttgggtactcagtgcccataaagcccctcgattcctctagacaaaatggtacagaggccaccagttactactggtgtaaattttgtagtttcagctgtgagtcatctagctcacttaaactgctagaacattatggcaagcagcacggagcagtgcagtcaggcggccttaatccagagttaaatgataagctttccaggggctctgtcattaatcagaatgatctagccaaaagttcagaaggagagacaatgaccaagacagacaagagctcgagtggggctaaaaagaaggacttctccagcaagggagccgaggataatatggtaacgagctataattgtcagttctgtgacttccgatattccaaaagccatggccctgatgtaattgtagtggggccacttctccgtcattatcaacagctccataacattcacaagtgtaccattaaacactgtccattctgtcccagaggactttgcagcccagaaaagcaccttggagaaattacttatccgtttgcttgtagaaaaagtaattgttcccactgtgcactcttgcttctgcacttgtctcctggggcggctggaagctcgcgagtcaaacatcagtgccatcagtgttcattcaccacccctgacgtagatgtactcctctttcactatgaaagtgtgcatgagtcccaagcatcggatgtcaaacaagaagcaaatcacctgcaaggatcggatgggcagcagtctgtcaaggaaagcaaagaacactcatgtaccaaatgtgattttattacccaagtggaagaagagatttcccgacactacaggagagcacacagctgctacaaatgccgtcagtgcagttttacagctgccgatactcagtcactactggagcacttcaacactgttcactgccaggaacaggacatcactacagccaacggcgaagaggacggtcatgccatatccaccatcaaagaggagcccaaaattgacttcagggtctacaatctgctaactccagactctaaaatgggagagccagtttctgagagtgtggtgaagagagagaagctggaagagaaggacgggctcaaagagaaagtttggaccgagagttccagtgatgaccttcgcaatgtgacttggagaggggcagacatcctgcgggggagtccgtcatacacccaagcaagcctggggctgctgacgcctgtgtctggcacccaagagcagacaaagactctaagggatagtcccaatgtggaggccgcccatctggcgcgacctatttatggcttggctgtggaaaccaagggattcctgcagggggcgccagctggcggagagaagtctggggccctcccccagcagtatcctgcatcgggagaaaacaagtccaaggatgaatcccagtccctgttacgggtggtattaaagataatcaaacattatcaagaagaaggacaaggaactgaagttgttcaaggagtgcttttgggtctggttgtagaagatcggcttgaaattaccaactgctttcctttccctcagcacacagaggatgatgctgactttgatgaagtccaatatcagatggaaatgatgcggagccttcgccatgtaaacattgatcatcttcacgtgggctggtatcagtccacatactatggctcattcgttacccgggcactcctggactctcagtttagttaccagcatgccattgaagaatctgtcgttctcatttatggttag

SEQ ID NO: 374 - DNA, 2892 bp, Homo sapiens
atggtccggaaaaagaacccccctctgagaaacgttgcaagtgaaggcgagggccagatcctggagcctataggtacagaaagcaaggtatctggaaagaacaaagaattttctgcagatcagatgtcagaaaatacggatcagagtgatgctgcagaactaaatcataaggaggaacatagcttgcatgttcaagatccatcttctagcagtaagaaggacttgaaaagcgcagttctgagtgagaaggctggcttcaattatgaaagccccagtaagggaggaaactttccctcctttccgcatgatgaggtgacagacagaaatatgttggctttctcatctccagctgctgggggagtctgtgagcccttgaagtctccgcaaagagcagaggcagatgaccctcaagatatggcctgcaccccctcaggggactcactggagacaaaggaagatcagaagatgtcaccaaaggctacagaggaaacagggcaagcacagagtggtcaagccaattgtcaaggtttgagcccagtttcagtggcctcaaaaaacccacaagtgccttcagatgggggtgtaagactgaataaatccaaaactgacttactggtgaatgacaacccagacccggcacctctgtctccagagcttcaggactttaaatgcaatatctgtggatatggttactacggcaacgaccccacagatctgattaagcacttccgaaagtatcacttaggactgcataaccgcaccaggcaagatgctgagctggacagcaaaatcttggcccttcataacatggtgcagttcagccattccaaagacttccagaaggtcaaccgttctgtgttttctggtgtgctgcaggacatcaattcttcaaggcctgttttactaaatgggacctatgatgtgcaggtgacttcaggtggaacattcattggcattggacggaaaacaccagattgccaagggaacaccaagtatttccgctgtaaattctgcaatttcacttatatgggcaactcatccaccgaattagaacaacattttcttcagactcacccaaacaaaataaaagcttctctcccctcctctgaggttgcaaaaccttcagagaaaaactctaacaagtccatccctgcacttcaatccagtgattctggagacttgggaaaatggcaggacaagataacagtcaaagcaggagatgacactcctgttgggtactcagtgcccataaagcccctcgattcctctagacaaaatggtacagaggccaccagttactactggtgtaaattttgtagtttcagctgtgagtcatctagctcacttaaactgctagaacattatggcaagcagcacggagcagtgcagtcaggcggccttaatccagagttaaatgataagctttccaggggctctgtcattaatcagaatgatctagccaaaagttcagaaggagagacaatgaccaagacagacaagagctcgagtggggctaaaaagaaggacttctccagcaagggagccgaggataatatggtaacgagctataattgtcagttctgtgacttccgatattccaaaagccatggccctgatgtaattgtagtggggccacttctccgtcattatcaacagctccataacattcacaagtgtaccattaaacactgtccattctgtcccagaggactttgcagcccagaaaagcaccttggagaaattacttatccgtttgcttgtagaaaaagtaattgttcccactgtgcactcttgcttctgcacttgtctcctggggcggctggaagctcgcgagtcaaacatcagtgccatcagtgttcattcaccacccctgacgtagatgtactcctctttcactatgaaagtgtgcatgagtcccaagcatcggatgtcaaacaagaagcaaatcacctgcaaggatcggatgggcagcagtctgtcaaggaaagcaaagaacactcatgtaccaaatgtgattttattacccaagtggaagaagagatttcccgacactacaggagagcacacagctgctacaaatgccgtcagtgcagttttacagctgccgatactcagtcactactggagcacttcaacactgttcactgccaggaacaggacatcactacagccaacggcgaagaggacggtcatgccatatccaccatcaaagaggagcccaaaattgacttcagggtctacaatctgctaactccagactctaaaatgggagagccagtttctgagagtgtggtgaagagagagaagctggaagagaaggacgggctcaaagagaaagtttggaccgagagttccagtgatgaccttcgcaatgtgacttggagaggggcagacatcctgcgggggagtccgtcatacacccaagcaagcctggggctgctgacgcctgtgtctggcacccaagagcagacaaagactctaagggatagtcccaatgtggaggccgcccatctggcgcgacctatttatggcttggctgtggaaaccaagggattcctgcagggggcgccagctggcggagagaagtctggggccctcccccagcagtatcctgcatcgggagaaaacaagtccaaggatgaatcccagtccctgttacggtatcagcagcgtcgccagcaggagaatatgcagcgccagagccgaggagaacccccgctccctgaggaggacctgtccaaactcttcaaaccaccacagccgcctgccaggatggactcgctgctcattgcaggccagataaacacttactgccagaacatcaaggagttcactgcccaaaacttaggcaagctcttcatggcccaggctcttcaagaatacaacaactaa

SEQ ID NO: 375 - DNA, 2904 bp, Homo sapiens
atgcagagtaatatggtccggaaaaagaacccccctctgagaaacgttgcaagtgaaggcgagggccagatcctggagcctataggtacagaaagcaaggtatctggaaagaacaaagaattttctgcagatcagatgtcagaaaatacggatcagagtgatgctgcagaactaaatcataaggaggaacatagcttgcatgttcaagatccatcttctagcagtaagaaggacttgaaaagcgcagttctgagtgagaaggctggcttcaattatgaaagccccagtaagggaggaaactttccctcctttccgcatgatgaggtgacagacagaaatatgttggctttctcatctccagctgctgggggagtctgtgagcccttgaagtctccgcaaagagcagaggcagatgaccctcaagatatggcctgcaccccctcaggggactcactggagacaaaggaagatcagaagatgtcaccaaaggctacagaggaaacagggcaagcacagagtggtcaagccaattgtcaaggtttgagcccagtttcagtggcctcaaaaaacccacaagtgccttcagatgggggtgtaagactgaataaatccaaaactgacttactggtgaatgacaacccagacccggcacctctgtctccagagcttcaggactttaaatgcaatatctgtggatatggttactacggcaacgaccccacagatctgattaagcacttccgaaagtatcacttaggactgcataaccgcaccaggcaagatgctgagctggacagcaaaatcttggcccttcataacatggtgcagttcagccattccaaagacttccagaaggtcaaccgttctgtgttttctggtgtgctgcaggacatcaattcttcaaggcctgttttactaaatgggacctatgatgtgcaggtgacttcaggtggaacattcattggcattggacggaaaacaccagattgccaagggaacaccaagtatttccgctgtaaattctgcaatttcacttatatgggcaactcatccaccgaattagaacaacattttcttcagactcacccaaacaaaataaaagcttctctcccctcctctgaggttgcaaaaccttcagagaaaaactctaacaagtccatccctgcacttcaatccagtgattctggagacttgggaaaatggcaggacaagataacagtcaaagcaggagatgacactcctgttgggtactcagtgcccataaagcccctcgattcctctagacaaaatggtacagaggccaccagttactactggtgtaaattttgtagtttcagctgtgagtcatctagctcacttaaactgctagaacattatggcaagcagcacggagcagtgcagtcaggcggccttaatccagagttaaatgataagctttccaggggctctgtcattaatcagaatgatctagccaaaagttcagaaggagagacaatgaccaagacagacaagagctcgagtggggctaaaaagaaggacttctccagcaagggagccgaggataatatggtaacgagctataattgtcagttctgtgacttccgatattccaaaagccatggccctgatgtaattgtagtggggccacttctccgtcattatcaacagctccataacattcacaagtgtaccattaaacactgtccattctgtcccagaggactttgcagcccagaaaagcaccttggagaaattacttatccgtttgcttgtagaaaaagtaattgttcccactgtgcactcttgcttctgcacttgtctcctggggcggctggaagctcgcgagtcaaacatcagtgccatcagtgttcattcaccacccctgacgtagatgtactcctctttcactatgaaagtgtgcatgagtcccaagcatcggatgtcaaacaagaagcaaatcacctgcaaggatcggatgggcagcagtctgtcaaggaaagcaaagaacactcatgtaccaaatgtgattttattacccaagtggaagaagagatttcccgacactacaggagagcacacagctgctacaaatgccgtcagtgcagttttacagctgccgatactcagtcactactggagcacttcaacactgttcactgccaggaacaggacatcactacagccaacggcgaagaggacggtcatgccatatccaccatcaaagaggagcccaaaattgacttcagggtctacaatctgctaactccagactctaaaatgggagagccagtttctgagagtgtggtgaagagagagaagctggaagagaaggacgggctcaaagagaaagtttggaccgagagttccagtgatgaccttcgcaatgtgacttggagaggggcagacatcctgcgggggagtccgtcatacacccaagcaagcctggggctgctgacgcctgtgtctggcacccaagagcagacaaagactctaagggatagtcccaatgtggaggccgcccatctggcgcgacctatttatggcttggctgtggaaaccaagggattcctgcagggggcgccagctggcggagagaagtctggggccctcccccagcagtatcctgcatcgggagaaaacaagtccaaggatgaatcccagtccctgttacggtatcagcagcgtcgccagcaggagaatatgcagcgccagagccgaggagaacccccgctccctgaggaggacctgtccaaactcttcaaaccaccacagccgcctgccaggatggactcgctgctcattgcaggccagataaacacttactgccagaacatcaaggagttcactgcccaaaacttaggcaagctcttcatggcccaggctcttcaagaatacaacaactaa

SEQ ID NO: 376 - DNA, 3627 bp, Homo sapiens
atgccttatgaagtcaatgctgggtatgattttacaaatatggtccggaaaaagaacccccctctgagaaacgttgcaagtgaaggcgagggccagatcctggagcctataggtacagaaagcaaggtatctggaaagaacaaagaattttctgcagatcagatgtcagaaaatacggatcagagtgatgctgcagaactaaatcataaggaggaacatagcttgcatgttcaagatccatcttctagcagtaagaaggacttgaaaagcgcagttctgagtgagaaggctggcttcaattatgaaagccccagtaagggaggaaactttccctcctttccgcatgatgaggtgacagacagaaatatgttggctttctcatctccagctgctgggggagtctgtgagcccttgaagtctccgcaaagagcagaggcagatgaccctcaagatatggcctgcaccccctcaggggactcactggagacaaaggaagatcagaagatgtcaccaaaggctacagaggaaacagggcaagcacagagtggtcaagccaattgtcaaggtttgagcccagtttcagtggcctcaaaaaacccacaagtgccttcagatgggggtgtaagactgaataaatccaaaactgacttactggtgaatgacaacccagacccggcacctctgtctccagagcttcaggactttaaatgcaatatctgtggatatggttactacggcaacgaccccacagatctgattaagcacttccgaaagtatcacttaggactgcataaccgcaccaggcaagatgctgagctggacagcaaaatcttggcccttcataacatggtgcagttcagccattccaaagacttccagaaggtcaaccgttctgtgttttctggtgtgctgcaggacatcaattcttcaaggcctgttttactaaatgggacctatgatgtgcaggtgacttcaggtggaacattcattggcattggacggaaaacaccagattgccaagggaacaccaagtatttccgctgtaaattctgcaatttcacttatatgggcaactcatccaccgaattagaacaacattttcttcagactcacccaaacaaaataaaagcttctctcccctcctctgaggttgcaaaaccttcagagaaaaactctaacaagtccatccctgcacttcaatccagtgattctggagacttgggaaaatggcaggacaagataacagtcaaagcaggagatgacactcctgttgggtactcagtgcccataaagcccctcgattcctctagacaaaatggtacagaggccaccagttactactggtgtaaattttgtagtttcagctgtgagtcatctagctcacttaaactgctagaacattatggcaagcagcacggagcagtgcagtcaggcggccttaatccagagttaaatgataagctttccaggggctctgtcattaatcagaatgatctagccaaaagttcagaaggagagacaatgaccaagacagacaagagctcgagtggggctaaaaagaaggacttctccagcaagggagccgaggataatatggtaacgagctataattgtcagttctgtgacttccgatattccaaaagccatggccctgatgtaattgtagtggggccacttctccgtcattatcaacagctccataacattcacaagtgtaccattaaacactgtccattctgtcccagaggactttgcagcccagaaaagcaccttggagaaattacttatccgtttgcttgtagaaaaagtaattgttcccactgtgcactcttgcttctgcacttgtctcctggggcggctggaagctcgcgagtcaaacatcagtgccatcagtgttcattcaccacccctgacgtagatgtactcctctttcactatgaaagtgtgcatgagtcccaagcatcggatgtcaaacaagaagcaaatcacctgcaaggatcggatgggcagcagtctgtcaaggaaagcaaagaacactcatgtaccaaatgtgattttattacccaagtggaagaagagatttcccgacactacaggagagcacacagctgctacaaatgccgtcagtgcagttttacagctgccgatactcagtcactactggagcacttcaacactgttcactgccaggaacaggacatcactacagccaacggcgaagaggacggtcatgccatatccaccatcaaagaggagcccaaaattgacttcagggtctacaatctgctaactccagactctaaaatgggagagccagtttctgagagtgtggtgaagagagagaagctggaagagaaggacgggctcaaagagaaagtttggaccgagagttccagtgatgaccttcgcaatgtgacttggagaggggcagacatcctgcgggggagtccgtcatacacccaagcaagcctggggctgctgacgcctgtgtctggcacccaagagcagacaaagactctaagggatagtcccaatgtggaggccgcccatctggcgcgacctatttatggcttggctgtggaaaccaagggattcctgcagggggcgccagctggcggagagaagtctggggccctcccccagcagtatcctgcatcgggagaaaacaagtccaaggatgaatcccagtccctgttacgggtggtattaaagataatcaaacattatcaagaagaaggacaaggaactgaagttgttcaaggagtgcttttgggtctggttgtagaagatcggcttgaaattaccaactgctttcctttccctcagcacacagaggatgatgctgactttgatgaagtccaatatcagatggaaatgatgcggagccttcgccatgtaaacattgatcatcttcacgtgggctggtatcagtccacatactatggctcattcgttacccgggcactcctggactctcagtttagttaccagcatgccattgaagaatctgtcgttctcatttatgatcccataaaaactgcccaaggatctctctcactaaaggcatacagactgactcctaaactgatggaagtttgtaaagaaaaggatttttcccctgaagcattgaaaaaagcaaatatcacctttgagtacatgtttgaagaagtgccgattgtaattaaaaattcacatctgatcaatgtcctaatgtgggaacttgaaaagaagtcagctgttgcagataaacatgaattgctcagccttgccagcagcaatcatttggggaagaatctacagttgctgatggacagagtggatgaaatgagccaagatatagttaaatacaacacatacatgaggaatactagtaaacaacagcagcagaaacatcagtatcagcagcgtcgccagcaggagaatatgcagcgccagagccgaggagaacccccgctccctgaggaggacctgtccaaactcttcaaaccaccacagccgcctgccaggatggactcgctgctcattgcaggccagataaacacttactgccagaacatcaaggagttcactgcccaaaacttaggcaagctcttcatggcccaggctcttcaagaatacaacaactaa

SEQ ID NO: 377 - DNA, 1101 bp, Homo sapiens
atgtacagtaggcatgcacaaaggataccgcctggaaagaagatggcgtcccgcaaggaaggtaccggctctactgccacctcttccagctccaccgccggcgcagcagggaaaggcaaaggcaaaggcggctcgggagattcagccgtgaagcaagtgcagatagatggccttgtggtattaaagataatcaaacattatcaagaagaaggacaaggaactgaagttgttcaaggagtgcttttgggtctggttgtagaagatcggcttgaaattaccaactgctttcctttccctcagcacacagaggatgatgctgactttgatgaagtccaatatcagatggaaatgatgcggagccttcgccatgtaaacattgatcatcttcacgtgggctggtatcagtccacatactatggctcattcgttacccgggcactcctggactctcagtttagttaccagcatgccattgaagaatctgtcgttctcatttatgatcccataaaaactgcccaaggatctctctcactaaaggcatacagactgactcctaaactgatggaagtttgtaaagaaaaggatttttcccctgaagcattgaaaaaagcaaatatcacctttgagtacatgtttgaagaagtgccgattgtaattaaaaattcacatctgatcaatgtcctaatgtgggaacttgaaaagaagtcagctgttgcagataaacatgaattgctcagccttgccagcagcaatcatttggggaagaatctacagttgctgatggacagagtggatgaaatgagccaagatatagttaaatacaacacatacatgaggaatactagtaaacaacagcagcagaaacatcagtatcagcagcgtcgccagcaggagaatatgcagcgccagagccgaggagaacccccgctccctgaggaggacctgtccaaactcttcaaaccaccacagccgcctgccaggatggactcgctgctcattgcaggccagataaacacttactgccagaacatcaaggagttcactgcccaaaacttaggcaagctcttcatggcccaggctcttcaagaatacaacaactaa

SEQ ID NO: 378 - DNA, 1893 bp, Homo sapiens
atgccttatgaagtcaatgctgggtatgattttacaaatatggtccggaaaaagaacccccctctgagaaacgttgcaagtgaaggcgagggccagatcctggagcctataggtacagaaagcaaggtatctggaaagaacaaagaattttctgcagatcagatgtcagaaaatacggatcagagtgatgctgcagaactaaatcataaggaggaacatagcttgcatgttcaagatccatcttctagcagtaagaaggacttgaaaagcgcagttctgagtgagaaggctggcttcaattatgaaagccccagtaagggaggaaactttccctcctttccgcatgatgaggtgacagacagaaatatgttggctttctcatctccagctgctgggggagtctgtgagcccttgaagtctccgcaaagagcagaggcagatgaccctcaagatatggcctgcaccccctcaggggactcactggagacaaaggaagatcagaagatgtcaccaaaggctacagaggaaacagggcaagcacagagtggtcaagccaattgtcaaggtttgagcccagtttcagtggcctcaaaaaacccacaagtgccttcagatgggggtgtaagactgaataaatccaaaactgacttactggtgaatgacaacccagacccggcacctctgtctccagagcttcaggactttaaatgcaatatctgtggatatggttactacggcaacgaccccacagatctgattaagcacttccgaaagtatcacttaggactgcataaccgcaccaggcaagatgctgagctggacagcaaaatcttggcccttcataacatggtgcagttcagccattccaaagacttccagaaggtcaaccgttctgtgttttctggtgtgctgcaggacatcaattcttcaaggcctgttttactaaatgggacctatgatgtgcaggtggtattaaagataatcaaacattatcaagaagaaggacaaggaactgaagttgttcaaggagtgcttttgggtctggttgtagaagatcggcttgaaattaccaactgctttcctttccctcagcacacagaggatgatgctgactttgatgaagtccaatatcagatggaaatgatgcggagccttcgccatgtaaacattgatcatcttcacgtgggctggtatcagtccacatactatggctcattcgttacccgggcactcctggactctcagtttagttaccagcatgccattgaagaatctgtcgttctcatttatgatcccataaaaactgcccaaggatctctctcactaaaggcatacagactgactcctaaactgatggaagtttgtaaagaaaaggatttttcccctgaagcattgaaaaaagcaaatatcacctttgagtacatgtttgaagaagtgccgattgtaattaaaaattcacatctgatcaatgtcctaatgtgggaacttgaaaagaagtcagctgttgcagataaacatgaattgctcagccttgccagcagcaatcatttggggaagaatctacagttgctgatggacagagtggatgaaatgagccaagatatagttaaatacaacacatacatgaggaatactagtaaacaacagcagcagaaacatcagtatcagcagcgtcgccagcaggagaatatgcagcgccagagccgaggagaacccccgctccctgaggaggacctgtccaaactcttcaaaccaccacagccgcctgccaggatggactcgctgctcattgcaggccagataaacacttactgccagaacatcaaggagttcactgcccaaaacttaggcaagctcttcatggcccaggctcttcaagaatacaacaactaa

SEQ ID NO: 379 - DNA, 210 bp, Homo sapiens
atgccttatgaagtcaatgctgggtatgattttacaatccaatatcagatggaaatgatgcggagccttcgccatgtaaacattgatcatcttcacgtgggctggtatcagtccacatactatggctcattcgttacccgggcactcctggactctcagtttagttaccagcatgccattgaagaatctgtcgttctcatttatggttag

SEQ ID NO: 380 - DNA, 183 bp, Homo sapiens
atgcagagtatccaatatcagatggaaatgatgcggagccttcgccatgtaaacattgatcatcttcacgtgggctggtatcagtccacatactatggctcattcgttacccgggcactcctggactctcagtttagttaccagcatgccattgaagaatctgtcgttctcatttatggttag

SEQ ID NO: 381 - DNA, 1866 bp, Homo sapiens
atgcagagtaatatggtccggaaaaagaacccccctctgagaaacgttgcaagtgaaggcgagggccagatcctggagcctataggtacagaaagcaaggtatctggaaagaacaaagaattttctgcagatcagatgtcagaaaatacggatcagagtgatgctgcagaactaaatcataaggaggaacatagcttgcatgttcaagatccatcttctagcagtaagaaggacttgaaaagcgcagttctgagtgagaaggctggcttcaattatgaaagccccagtaagggaggaaactttccctcctttccgcatgatgaggtgacagacagaaatatgttggctttctcatctccagctgctgggggagtctgtgagcccttgaagtctccgcaaagagcagaggcagatgaccctcaagatatggcctgcaccccctcaggggactcactggagacaaaggaagatcagaagatgtcaccaaaggctacagaggaaacagggcaagcacagagtggtcaagccaattgtcaaggtttgagcccagtttcagtggcctcaaaaaacccacaagtgccttcagatgggggtgtaagactgaataaatccaaaactgacttactggtgaatgacaacccagacccggcacctctgtctccagagcttcaggactttaaatgcaatatctgtggatatggttactacggcaacgaccccacagatctgattaagcacttccgaaagtatcacttaggactgcataaccgcaccaggcaagatgctgagctggacagcaaaatcttggcccttcataacatggtgcagttcagccattccaaagacttccagaaggtcaaccgttctgtgttttctggtgtgctgcaggacatcaattcttcaaggcctgttttactaaatgggacctatgatgtgcaggtggtattaaagataatcaaacattatcaagaagaaggacaaggaactgaagttgttcaaggagtgcttttgggtctggttgtagaagatcggcttgaaattaccaactgctttcctttccctcagcacacagaggatgatgctgactttgatgaagtccaatatcagatggaaatgatgcggagccttcgccatgtaaacattgatcatcttcacgtgggctggtatcagtccacatactatggctcattcgttacccgggcactcctggactctcagtttagttaccagcatgccattgaagaatctgtcgttctcatttatgatcccataaaaactgcccaaggatctctctcactaaaggcatacagactgactcctaaactgatggaagtttgtaaagaaaaggatttttcccctgaagcattgaaaaaagcaaatatcacctttgagtacatgtttgaagaagtgccgattgtaattaaaaattcacatctgatcaatgtcctaatgtgggaacttgaaaagaagtcagctgttgcagataaacatgaattgctcagccttgccagcagcaatcatttggggaagaatctacagttgctgatggacagagtggatgaaatgagccaagatatagttaaatacaacacatacatgaggaatactagtaaacaacagcagcagaaacatcagtatcagcagcgtcgccagcaggagaatatgcagcgccagagccgaggagaacccccgctccctgaggaggacctgtccaaactcttcaaaccaccacagccgcctgccaggatggactcgctgctcattgcaggccagataaacacttactgccagaacatcaaggagttcactgcccaaaacttaggcaagctcttcatggcccaggctcttcaagaatacaacaactaa

SEQ ID NO: 382 - DNA, 1854 bp, Homo sapiens
atggtccggaaaaagaacccccctctgagaaacgttgcaagtgaaggcgagggccagatcctggagcctataggtacagaaagcaaggtatctggaaagaacaaagaattttctgcagatcagatgtcagaaaatacggatcagagtgatgctgcagaactaaatcataaggaggaacatagcttgcatgttcaagatccatcttctagcagtaagaaggacttgaaaagcgcagttctgagtgagaaggctggcttcaattatgaaagccccagtaagggaggaaactttccctcctttccgcatgatgaggtgacagacagaaatatgttggctttctcatctccagctgctgggggagtctgtgagcccttgaagtctccgcaaagagcagaggcagatgaccctcaagatatggcctgcaccccctcaggggactcactggagacaaaggaagatcagaagatgtcaccaaaggctacagaggaaacagggcaagcacagagtggtcaagccaattgtcaaggtttgagcccagtttcagtggcctcaaaaaacccacaagtgccttcagatgggggtgtaagactgaataaatccaaaactgacttactggtgaatgacaacccagacccggcacctctgtctccagagcttcaggactttaaatgcaatatctgtggatatggttactacggcaacgaccccacagatctgattaagcacttccgaaagtatcacttaggactgcataaccgcaccaggcaagatgctgagctggacagcaaaatcttggcccttcataacatggtgcagttcagccattccaaagacttccagaaggtcaaccgttctgtgttttctggtgtgctgcaggacatcaattcttcaaggcctgttttactaaatgggacctatgatgtgcaggtggtattaaagataatcaaacattatcaagaagaaggacaaggaactgaagttgttcaaggagtgcttttgggtctggttgtagaagatcggcttgaaattaccaactgctttcctttccctcagcacacagaggatgatgctgactttgatgaagtccaatatcagatggaaatgatgcggagccttcgccatgtaaacattgatcatcttcacgtgggctggtatcagtccacatactatggctcattcgttacccgggcactcctggactctcagtttagttaccagcatgccattgaagaatctgtcgttctcatttatgatcccataaaaactgcccaaggatctctctcactaaaggcatacagactgactcctaaactgatggaagtttgtaaagaaaaggatttttcccctgaagcattgaaaaaagcaaatatcacctttgagtacatgtttgaagaagtgccgattgtaattaaaaattcacatctgatcaatgtcctaatgtgggaacttgaaaagaagtcagctgttgcagataaacatgaattgctcagccttgccagcagcaatcatttggggaagaatctacagttgctgatggacagagtggatgaaatgagccaagatatagttaaatacaacacatacatgaggaatactagtaaacaacagcagcagaaacatcagtatcagcagcgtcgccagcaggagaatatgcagcgccagagccgaggagaacccccgctccctgaggaggacctgtccaaactcttcaaaccaccacagccgcctgccaggatggactcgctgctcattgcaggccagataaacacttactgccagaacatcaaggagttcactgcccaaaacttaggcaagctcttcatggcccaggctcttcaagaatacaacaactaa

SEQ ID NO: 383 - DNA, 1257 bp, Homo sapiens
atggtccggaaaaagaacccccctctgagaaacgttgcaagtgaaggcgagggccagatcctggagcctataggtacagaaagcaaggtatctggaaagaacaaagaattttctgcagatcagatgtcagaaaatacggatcagagtgatgctgcagaactaaatcataaggaggaacatagcttgcatgttcaagatccatcttctagcagtaagaaggacttgaaaagcgcagttctgagtgagaaggctggcttcaattatgaaagccccagtaagggaggaaactttccctcctttccgcatgatgaggtgacagacagaaatatgttggctttctcatctccagctgctgggggagtctgtgagcccttgaagtctccgcaaagagcagaggcagatgaccctcaagatatggcctgcaccccctcaggggactcactggagacaaaggaagatcagaagatgtcaccaaaggctacagaggaaacagggcaagcacagagtggtcaagccaattgtcaaggtttgagcccagtttcagtggcctcaaaaaacccacaagtgccttcagatgggggtgtaagactgaataaatccaaaactgacttactggtgaatgacaacccagacccggcacctctgtctccagagcttcaggactttaaatgcaatatctgtggatatggttactacggcaacgaccccacagatctgattaagcacttccgaaagtatcacttaggactgcataaccgcaccaggcaagatgctgagctggacagcaaaatcttggcccttcataacatggtgcagttcagccattccaaagacttccagaaggtcaaccgttctgtgttttctggtgtgctgcaggacatcaattcttcaaggcctgttttactaaatgggacctatgatgtgcaggtggtattaaagataatcaaacattatcaagaagaaggacaaggaactgaagttgttcaaggagtgcttttgggtctggttgtagaagatcggcttgaaattaccaactgctttcctttccctcagcacacagaggatgatgctgactttgatgaagtccaatatcagatggaaatgatgcggagccttcgccatgtaaacattgatcatcttcacgtgggctggtatcagtccacatactatggctcattcgttacccgggcactcctggactctcagtttagttaccagcatgccattgaagaatctgtcgttctcatttatggttag

SEQ ID NO: 384 - DNA, 3588 bp, Homo sapiens
atggtccggaaaaagaacccccctctgagaaacgttgcaagtgaaggcgagggccagatcctggagcctataggtacagaaagcaaggtatctggaaagaacaaagaattttctgcagatcagatgtcagaaaatacggatcagagtgatgctgcagaactaaatcataaggaggaacatagcttgcatgttcaagatccatcttctagcagtaagaaggacttgaaaagcgcagttctgagtgagaaggctggcttcaattatgaaagccccagtaagggaggaaactttccctcctttccgcatgatgaggtgacagacagaaatatgttggctttctcatctccagctgctgggggagtctgtgagcccttgaagtctccgcaaagagcagaggcagatgaccctcaagatatggcctgcaccccctcaggggactcactggagacaaaggaagatcagaagatgtcaccaaaggctacagaggaaacagggcaagcacagagtggtcaagccaattgtcaaggtttgagcccagtttcagtggcctcaaaaaacccacaagtgccttcagatgggggtgtaagactgaataaatccaaaactgacttactggtgaatgacaacccagacccggcacctctgtctccagagcttcaggactttaaatgcaatatctgtggatatggttactacggcaacgaccccacagatctgattaagcacttccgaaagtatcacttaggactgcataaccgcaccaggcaagatgctgagctggacagcaaaatcttggcccttcataacatggtgcagttcagccattccaaagacttccagaaggtcaaccgttctgtgttttctggtgtgctgcaggacatcaattcttcaaggcctgttttactaaatgggacctatgatgtgcaggtgacttcaggtggaacattcattggcattggacggaaaacaccagattgccaagggaacaccaagtatttccgctgtaaattctgcaatttcacttatatgggcaactcatccaccgaattagaacaacattttcttcagactcacccaaacaaaataaaagcttctctcccctcctctgaggttgcaaaaccttcagagaaaaactctaacaagtccatccctgcacttcaatccagtgattctggagacttgggaaaatggcaggacaagataacagtcaaagcaggagatgacactcctgttgggtactcagtgcccataaagcccctcgattcctctagacaaaatggtacagaggccaccagttactactggtgtaaattttgtagtttcagctgtgagtcatctagctcacttaaactgctagaacattatggcaagcagcacggagcagtgcagtcaggcggccttaatccagagttaaatgataagctttccaggggctctgtcattaatcagaatgatctagccaaaagttcagaaggagagacaatgaccaagacagacaagagctcgagtggggctaaaaagaaggacttctccagcaagggagccgaggataatatggtaacgagctataattgtcagttctgtgacttccgatattccaaaagccatggccctgatgtaattgtagtggggccacttctccgtcattatcaacagctccataacattcacaagtgtaccattaaacactgtccattctgtcccagaggactttgcagcccagaaaagcaccttggagaaattacttatccgtttgcttgtagaaaaagtaattgttcccactgtgcactcttgcttctgcacttgtctcctggggcggctggaagctcgcgagtcaaacatcagtgccatcagtgttcattcaccacccctgacgtagatgtactcctctttcactatgaaagtgtgcatgagtcccaagcatcggatgtcaaacaagaagcaaatcacctgcaaggatcggatgggcagcagtctgtcaaggaaagcaaagaacactcatgtaccaaatgtgattttattacccaagtggaagaagagatttcccgacactacaggagagcacacagctgctacaaatgccgtcagtgcagttttacagctgccgatactcagtcactactggagcacttcaacactgttcactgccaggaacaggacatcactacagccaacggcgaagaggacggtcatgccatatccaccatcaaagaggagcccaaaattgacttcagggtctacaatctgctaactccagactctaaaatgggagagccagtttctgagagtgtggtgaagagagagaagctggaagagaaggacgggctcaaagagaaagtttggaccgagagttccagtgatgaccttcgcaatgtgacttggagaggggcagacatcctgcgggggagtccgtcatacacccaagcaagcctggggctgctgacgcctgtgtctggcacccaagagcagacaaagactctaagggatagtcccaatgtggaggccgcccatctggcgcgacctatttatggcttggctgtggaaaccaagggattcctgcagggggcgccagctggcggagagaagtctggggccctcccccagcagtatcctgcatcgggagaaaacaagtccaaggatgaatcccagtccctgttacgggtggtattaaagataatcaaacattatcaagaagaaggacaaggaactgaagttgttcaaggagtgcttttgggtctggttgtagaagatcggcttgaaattaccaactgctttcctttccctcagcacacagaggatgatgctgactttgatgaagtccaatatcagatggaaatgatgcggagccttcgccatgtaaacattgatcatcttcacgtgggctggtatcagtccacatactatggctcattcgttacccgggcactcctggactctcagtttagttaccagcatgccattgaagaatctgtcgttctcatttatgatcccataaaaactgcccaaggatctctctcactaaaggcatacagactgactcctaaactgatggaagtttgtaaagaaaaggatttttcccctgaagcattgaaaaaagcaaatatcacctttgagtacatgtttgaagaagtgccgattgtaattaaaaattcacatctgatcaatgtcctaatgtgggaacttgaaaagaagtcagctgttgcagataaacatgaattgctcagccttgccagcagcaatcatttggggaagaatctacagttgctgatggacagagtggatgaaatgagccaagatatagttaaatacaacacatacatgaggaatactagtaaacaacagcagcagaaacatcagtatcagcagcgtcgccagcaggagaatatgcagcgccagagccgaggagaacccccgctccctgaggaggacctgtccaaactcttcaaaccaccacagccgcctgccaggatggactcgctgctcattgcaggccagataaacacttactgccagaacatcaaggagttcactgcccaaaacttaggcaagctcttcatggcccaggctcttcaagaatacaacaactaa

SEQ ID NO: 385 - DNA, 2991 bp, Homo sapiens
atggtccggaaaaagaacccccctctgagaaacgttgcaagtgaaggcgagggccagatcctggagcctataggtacagaaagcaaggtatctggaaagaacaaagaattttctgcagatcagatgtcagaaaatacggatcagagtgatgctgcagaactaaatcataaggaggaacatagcttgcatgttcaagatccatcttctagcagtaagaaggacttgaaaagcgcagttctgagtgagaaggctggcttcaattatgaaagccccagtaagggaggaaactttccctcctttccgcatgatgaggtgacagacagaaatatgttggctttctcatctccagctgctgggggagtctgtgagcccttgaagtctccgcaaagagcagaggcagatgaccctcaagatatggcctgcaccccctcaggggactcactggagacaaaggaagatcagaagatgtcaccaaaggctacagaggaaacagggcaagcacagagtggtcaagccaattgtcaaggtttgagcccagtttcagtggcctcaaaaaacccacaagtgccttcagatgggggtgtaagactgaataaatccaaaactgacttactggtgaatgacaacccagacccggcacctctgtctccagagcttcaggactttaaatgcaatatctgtggatatggttactacggcaacgaccccacagatctgattaagcacttccgaaagtatcacttaggactgcataaccgcaccaggcaagatgctgagctggacagcaaaatcttggcccttcataacatggtgcagttcagccattccaaagacttccagaaggtcaaccgttctgtgttttctggtgtgctgcaggacatcaattcttcaaggcctgttttactaaatgggacctatgatgtgcaggtgacttcaggtggaacattcattggcattggacggaaaacaccagattgccaagggaacaccaagtatttccgctgtaaattctgcaatttcacttatatgggcaactcatccaccgaattagaacaacattttcttcagactcacccaaacaaaataaaagcttctctcccctcctctgaggttgcaaaaccttcagagaaaaactctaacaagtccatccctgcacttcaatccagtgattctggagacttgggaaaatggcaggacaagataacagtcaaagcaggagatgacactcctgttgggtactcagtgcccataaagcccctcgattcctctagacaaaatggtacagaggccaccagttactactggtgtaaattttgtagtttcagctgtgagtcatctagctcacttaaactgctagaacattatggcaagcagcacggagcagtgcagtcaggcggccttaatccagagttaaatgataagctttccaggggctctgtcattaatcagaatgatctagccaaaagttcagaaggagagacaatgaccaagacagacaagagctcgagtggggctaaaaagaaggacttctccagcaagggagccgaggataatatggtaacgagctataattgtcagttctgtgacttccgatattccaaaagccatggccctgatgtaattgtagtggggccacttctccgtcattatcaacagctccataacattcacaagtgtaccattaaacactgtccattctgtcccagaggactttgcagcccagaaaagcaccttggagaaattacttatccgtttgcttgtagaaaaagtaattgttcccactgtgcactcttgcttctgcacttgtctcctggggcggctggaagctcgcgagtcaaacatcagtgccatcagtgttcattcaccacccctgacgtagatgtactcctctttcactatgaaagtgtgcatgagtcccaagcatcggatgtcaaacaagaagcaaatcacctgcaaggatcggatgggcagcagtctgtcaaggaaagcaaagaacactcatgtaccaaatgtgattttattacccaagtggaagaagagatttcccgacactacaggagagcacacagctgctacaaatgccgtcagtgcagttttacagctgccgatactcagtcactactggagcacttcaacactgttcactgccaggaacaggacatcactacagccaacggcgaagaggacggtcatgccatatccaccatcaaagaggagcccaaaattgacttcagggtctacaatctgctaactccagactctaaaatgggagagccagtttctgagagtgtggtgaagagagagaagctggaagagaaggacgggctcaaagagaaagtttggaccgagagttccagtgatgaccttcgcaatgtgacttggagaggggcagacatcctgcgggggagtccgtcatacacccaagcaagcctggggctgctgacgcctgtgtctggcacccaagagcagacaaagactctaagggatagtcccaatgtggaggccgcccatctggcgcgacctatttatggcttggctgtggaaaccaagggattcctgcagggggcgccagctggcggagagaagtctggggccctcccccagcagtatcctgcatcgggagaaaacaagtccaaggatgaatcccagtccctgttacgggtggtattaaagataatcaaacattatcaagaagaaggacaaggaactgaagttgttcaaggagtgcttttgggtctggttgtagaagatcggcttgaaattaccaactgctttcctttccctcagcacacagaggatgatgctgactttgatgaagtccaatatcagatggaaatgatgcggagccttcgccatgtaaacattgatcatcttcacgtgggctggtatcagtccacatactatggctcattcgttacccgggcactcctggactctcagtttagttaccagcatgccattgaagaatctgtcgttctcatttatggttag

SEQ ID NO: 386 - DNA, 1062 bp, Homo sapiens
atggcgaaggtggagcaggtcctgagcctcgagccgcagcacgagctcaaattccgaggtgctggagaatctggtaaaagcaccattgtgaagcagatgaggatcctgcatgttaatgggtttaatggagacagtgagaaggcaaccaaagtgcaggacatcaaaaacaacctgaaagaggcgattgaaaccattgtggccgccatgagcaacctggtgccccccgtggagctggccaaccccgagaaccagttcagagtggactacatcctgagtgtgatgaacgtgcctgactttgacttccctcccgaattctatgagcatgccaaggctctgtgggaggatgaaggagtgcgtgcctgctacgaacgctccaacgagtaccagctgattgactgtgcccagtacttcctggacaagatcgacgtgatcaagcaggctgactatgtgccgagcgatcaggacctgcttcgctgccgtgtcctgacttctggaatctttgagaccaagttccaggtggacaaagtcaacttccacatgtttgacgtgggtggccagcgcgatgaacgccgcaagtggatccagtgcttcaacgatgtgactgccatcatcttcgtggtggccagcagcagctacaacatggtcatccgggaggacaaccagaccaaccgcctgcaggaggctctgaacctcttcaagagcatctggaacaacagatggctgcgcaccatctctgtgatcctgttcctcaacaagcaagatctgctcgctgagaaagtccttgctgggaaatcgaagattgaggactactttccagaatttgctcgctacactactcctgaggatgctactcccgagcccggagaggacccacgcgtgacccgggccaagtacttcattcgagatgagtttctgaggatcagcactgccagtggagatgggcgtcactactgctaccctcatttcacctgcgctgtggacactgagaacatccgccgtgtgttcaacgactgccgtgacatcattcagcgcatgcaccttcgtcagtacgagctgctctaa

SEQ ID NO: 387 - DNA, 1107 bp, Homo sapiens
atggcgaaggtggagcaggtcctgagcctcgagccgcagcacgagctcaaattccgaggtgctggagaatctggtaaaagcaccattgtgaagcagatgaggatcctgcatgttaatgggtttaatggagagggcggcgaagaggacccgcaggctgcaaggagcaacagcgatggcagtgagaaggcaaccaaagtgcaggacatcaaaaacaacctgaaagaggcgattgaaaccattgtggccgccatgagcaacctggtgccccccgtggagctggccaaccccgagaaccagttcagagtggactacatcctgagtgtgatgaacgtgcctgactttgacttccctcccgaattctatgagcatgccaaggctctgtgggaggatgaaggagtgcgtgcctgctacgaacgctccaacgagtaccagctgattgactgtgcccagtacttcctggacaagatcgacgtgatcaagcaggctgactatgtgccgagcgatcaggacctgcttcgctgccgtgtcctgacttctggaatctttgagaccaagttccaggtggacaaagtcaacttccacatgtttgacgtgggtggccagcgcgatgaacgccgcaagtggatccagtgcttcaacgatgtgactgccatcatcttcgtggtggccagcagcagctacaacatggtcatccgggaggacaaccagaccaaccgcctgcaggaggctctgaacctcttcaagagcatctggaacaacagatggctgcgcaccatctctgtgatcctgttcctcaacaagcaagatctgctcgctgagaaagtccttgctgggaaatcgaagattgaggactactttccagaatttgctcgctacactactcctgaggatgctactcccgagcccggagaggacccacgcgtgacccgggccaagtacttcattcgagatgagtttctgaggatcagcactgccagtggagatgggcgtcactactgctaccctcatttcacctgcgctgtggacactgagaacatccgccgtgtgttcaacgactgccgtgacatcattcagcgcatgcaccttcgtcagtacgagctgctctaa

SEQ ID NO: 388 - DNA, 1104 bp, Homo sapiens
atggcgaaggtggagcaggtcctgagcctcgagccgcagcacgagctcaaattccgaggtgctggagaatctggtaaaagcaccattgtgaagcagatgaggatcctgcatgttaatgggtttaatggagagggcggcgaagaggacccgcaggctgcaaggagcaacagcgatggtgagaaggcaaccaaagtgcaggacatcaaaaacaacctgaaagaggcgattgaaaccattgtggccgccatgagcaacctggtgccccccgtggagctggccaaccccgagaaccagttcagagtggactacatcctgagtgtgatgaacgtgcctgactttgacttccctcccgaattctatgagcatgccaaggctctgtgggaggatgaaggagtgcgtgcctgctacgaacgctccaacgagtaccagctgattgactgtgcccagtacttcctggacaagatcgacgtgatcaagcaggctgactatgtgccgagcgatcaggacctgcttcgctgccgtgtcctgacttctggaatctttgagaccaagttccaggtggacaaagtcaacttccacatgtttgacgtgggtggccagcgcgatgaacgccgcaagtggatccagtgcttcaacgatgtgactgccatcatcttcgtggtggccagcagcagctacaacatggtcatccgggaggacaaccagaccaaccgcctgcaggaggctctgaacctcttcaagagcatctggaacaacagatggctgcgcaccatctctgtgatcctgttcctcaacaagcaagatctgctcgctgagaaagtccttgctgggaaatcgaagattgaggactactttccagaatttgctcgctacactactcctgaggatgctactcccgagcccggagaggacccacgcgtgacccgggccaagtacttcattcgagatgagtttctgaggatcagcactgccagtggagatgggcgtcactactgctaccctcatttcacctgcgctgtggacactgagaacatccgccgtgtgttcaacgactgccgtgacatcattcagcgcatgcaccttcgtcagtacgagctgctctaa

SEQ ID NO: 389 - DNA, 1008 bp, Homo sapiens
atgaggatcctgcatgttaatgggtttaatggagagggcggcgaagaggacccgcaggctgcaaggagcaacagcgatggtgagaaggcaaccaaagtgcaggacatcaaaaacaacctgaaagaggcgattgaaaccattgtggccgccatgagcaacctggtgccccccgtggagctggccaaccccgagaaccagttcagagtggactacatcctgagtgtgatgaacgtgcctgactttgacttccctcccgaattctatgagcatgccaaggctctgtgggaggatgaaggagtgcgtgcctgctacgaacgctccaacgagtaccagctgattgactgtgcccagtacttcctggacaagatcgacgtgatcaagcaggctgactatgtgccgagcgatcaggacctgcttcgctgccgtgtcctgacttctggaatctttgagaccaagttccaggtggacaaagtcaacttccacatgtttgacgtgggtggccagcgcgatgaacgccgcaagtggatccagtgcttcaacgatgtgactgccatcatcttcgtggtggccagcagcagctacaacatggtcatccgggaggacaaccagaccaaccgcctgcaggaggctctgaacctcttcaagagcatctggaacaacagatggctgcgcaccatctctgtgatcctgttcctcaacaagcaagatctgctcgctgagaaagtccttgctgggaaatcgaagattgaggactactttccagaatttgctcgctacactactcctgaggatgctactcccgagcccggagaggacccacgcgtgacccgggccaagtacttcattcgagatgagtttctgaggatcagcactgccagtggagatgggcgtcactactgctaccctcatttcacctgcgctgtggacactgagaacatccgccgtgtgttcaacgactgccgtgacatcattcagcgcatgcaccttcgtcagtacgagctgctctaa

SEQ ID NO: 390 - DNA, 1059 bp, Homo sapiens
atggcgaaggtggagcaggtcctgagcctcgagccgcagcacgagctcaaattccgaggtgctggagaatctggtaaaagcaccattgtgaagcagatgaggatcctgcatgttaatgggtttaatggagatgagaaggcaaccaaagtgcaggacatcaaaaacaacctgaaagaggcgattgaaaccattgtggccgccatgagcaacctggtgccccccgtggagctggccaaccccgagaaccagttcagagtggactacatcctgagtgtgatgaacgtgcctgactttgacttccctcccgaattctatgagcatgccaaggctctgtgggaggatgaaggagtgcgtgcctgctacgaacgctccaacgagtaccagctgattgactgtgcccagtacttcctggacaagatcgacgtgatcaagcaggctgactatgtgccgagcgatcaggacctgcttcgctgccgtgtcctgacttctggaatctttgagaccaagttccaggtggacaaagtcaacttccacatgtttgacgtgggtggccagcgcgatgaacgccgcaagtggatccagtgcttcaacgatgtgactgccatcatcttcgtggtggccagcagcagctacaacatggtcatccgggaggacaaccagaccaaccgcctgcaggaggctctgaacctcttcaagagcatctggaacaacagatggctgcgcaccatctctgtgatcctgttcctcaacaagcaagatctgctcgctgagaaagtccttgctgggaaatcgaagattgaggactactttccagaatttgctcgctacactactcctgaggatgctactcccgagcccggagaggacccacgcgtgacccgggccaagtacttcattcgagatgagtttctgaggatcagcactgccagtggagatgggcgtcactactgctaccctcatttcacctgcgctgtggacactgagaacatccgccgtgtgttcaacgactgccgtgacatcattcagcgcatgcaccttcgtcagtacgagctgctctaa

SEQ ID NO: 391 - DNA, 1380 bp, Homo sapiens
atggtagaactagtgatctcacccagcctcactgtaaacagcgattgtctggataaactgaagtttaaccgtgctgacgctgctgtgtggactctgagtgacagacaaggcatcaccaaatcggcccccctgagagtgtcccagctcttctccagatcttgcccacgtgtcctcccccgccagccttccacagccatggcagcctacggccagacgcagtacagtgcggggatccagcaggctaccccctatacagcttacccacctccagcacaagcctatggaatcccttcctacagcatcaagacagaagacagcttgaaccattcccctggccagagtggattcctcagctatggctccagcttcagcacctcacccactggacagagcccatacacctaccagatgcacggcacaacagggttctatcaaggaggaaatggactgggcaacgcagccggtttcgggagtgtgcaccaggactatccttcctaccccggcttcccccagagccagtacccccagtattacggctcatcctacaaccctccctacgtcccggccagcagcatctgcccttcgcccctctccacgtccacctacgtcctccaggaggcatctcacaacgtccccaaccagagttccgagtcacttgctggtgaatacaacacacacaatggaccttccacaccagcgaaagagggagacacagacaggccgcaccgggcctccgacgggaagctccgaggccggtctaagaggagcagtgacccgtccccggcaggggacaatgagattgagcgtgtgttcgtgtgggacttggatgagacaataattatttttcactccttactcacggggacatttgcatccagatacgggaaggacaccacgacgtccgtgcgcattggccttatgatggaagagatgatcttcaaccttgcagatacacatctgttcttcaatgacctggaggattgtgaccagatccacgttgatgacgtctcatcagatgacaatggccaagatttaagcacatacaacttctccgctgacggcttccacagttcggccccaggagccaacctgtgcctgggctctggcgtgcacggcggcgtggactggatgaggaagctggccttccgctaccggcgggtgaaggagatgtacaatacctacaagaacaacgttggtgggaaggagagctgcttcgagaggataatgcagagattcggcagaaaagctgtctacgtggtgatcggtgatggtgtggaagaggagcaaggagcgaaaaagcacaacatgcctttctggcggatatcctgccacgcagacctggaggcactgaggcacgccctggagctggagtatttatag

SEQ ID NO: 392 - DNA, 1527 bp, Homo sapiens
atggtagaactagtgatctcacccagcctcactgtaaacagcgattgtctggataaactgaagtttaaccgtgctgacgctgctgtgtggactctgagtgacagacaaggcatcaccaaatcggcccccctgagagtgtcccagctcttctccagatcttgcccacgtgtcctcccccgccagccttccacagccatggcagcctacggccagacgcagtacagtgcggggatccagcaggctaccccctatacagcttacccacctccagcacaagcctatggaatcccttcctacagcatcaagacagaagacagcttgaaccattcccctggccagagtggattcctcagctatggctccagcttcagcacctcacccactggacagagcccatacacctaccagatgcacggcacaacagggttctatcaaggaggaaatggactgggcaacgcagccggtttcgggagtgtgcaccaggactatccttcctaccccggcttcccccagagccagtacccccagtattacggctcatcctacaaccctccctacgtcccggccagcagcatctgcccttcgcccctctccacgtccacctacgtcctccaggaggcatctcacaacgtccccaaccagagttccgagtcacttgctggtgaatacaacacacacaatggaccttccacaccagcgaaagagggagacacagacaggccgcaccgggcctccgacgggaagctccgaggccggtctaagaggagcagtgacccgtccccggcaggggacaatgagattgagcgtgtgttcgtgtgggacttggatgagacaataattatttttcactccttactcacggggacatttgcatccagatacgggaaggattgtgaccagatccacgttgatgacgtctcatcagatgacaatggccaagatttaagcacatacaacttctccgctgacggcttccacagttcggccccaggagccaacctgtgcctgggctctggcgtgcacggcggcgtggactggatgaggaagctggccttccgctaccggcgggtgaaggagatgtacaatacctacaagaacaacgttggtgggttgataggcactcccaaaagggagacctggctacagctccgagctgagctggaagctctcacagacctctggctgacccactccctgaaggcactaaacctcatcaactcccggcccaactgtgtcaatgtgctggtcaccaccactcaactaattcctgccctggccaaagtcctgctatatggcctggggtctgtgtttcctattgagaacatctacagtgcaaccaagacagggaaggagagctgcttcgagaggataatgcagagattcggcagaaaagctgtctacgtggtgatcggtgatggtgtggaagaggagcaaggagcgaaaaagcacaacatgcctttctggcggatatcctgccacgcagacctggaggcactgaggcacgccctggagctggagtatttatag

SEQ ID NO: 393 - DNA, 1617 bp, Homo sapiens
atggtagaactagtgatctcacccagcctcactgtaaacagcgattgtctggataaactgaagtttaaccgtgctgacgctgctgtgtggactctgagtgacagacaaggcatcaccaaatcggcccccctgagagtgtcccagctcttctccagatcttgcccacgtgtcctcccccgccagccttccacagccatggcagcctacggccagacgcagtacagtgcggggatccagcaggctaccccctatacagcttacccacctccagcacaagcctatggaatcccttcctacagcatcaagacagaagacagcttgaaccattcccctggccagagtggattcctcagctatggctccagcttcagcacctcacccactggacagagcccatacacctaccagatgcacggcacaacagggttctatcaaggaggaaatggactgggcaacgcagccggtttcgggagtgtgcaccaggactatccttcctaccccggcttcccccagagccagtacccccagtattacggctcatcctacaaccctccctacgtcccggccagcagcatctgcccttcgcccctctccacgtccacctacgtcctccaggaggcatctcacaacgtccccaaccagagttccgagtcacttgctggtgaatacaacacacacaatggaccttccacaccagcgaaagagggagacacagacaggccgcaccgggcctccgacgggaagctccgaggccggtctaagaggagcagtgacccgtccccggcaggggacaatgagattgagcgtgtgttcgtgtgggacttggatgagacaataattatttttcactccttactcacggggacatttgcatccagatacgggaaggacaccacgacgtccgtgcgcattggccttatgatggaagagatgatcttcaaccttgcagatacacatctgttcttcaatgacctggaggattgtgaccagatccacgttgatgacgtctcatcagatgacaatggccaagatttaagcacatacaacttctccgctgacggcttccacagttcggccccaggagccaacctgtgcctgggctctggcgtgcacggcggcgtggactggatgaggaagctggccttccgctaccggcgggtgaaggagatgtacaatacctacaagaacaacgttggtgggttgataggcactcccaaaagggagacctggctacagctccgagctgagctggaagctctcacagacctctggctgacccactccctgaaggcactaaacctcatcaactcccggcccaactgtgtcaatgtgctggtcaccaccactcaactaattcctgccctggccaaagtcctgctatatggcctggggtctgtgtttcctattgagaacatctacagtgcaaccaagacagggaaggagagctgcttcgagaggataatgcagagattcggcagaaaagctgtctacgtggtgatcggtgatggtgtggaagaggagcaaggagcgaaaaagcacaacatgcctttctggcggatatcctgccacgcagacctggaggcactgaggcacgccctggagctggagtatttatag

SEQ ID NO: 394 - DNA, 2700 bp, Homo sapiens
atggaggatggaaagcccgtttgggcgccacaccctacagatggatttcagatgggcaatattgtggatattggccccgacagcttaacaattgaacccttgaatcagaaaggcaagacatttttggctctcataaaccaagtgtttcctgcagaagaggacagtaaaaaagatgtggaagataactgttcactaatgtatttaaatgaagccacactgctccataatatcaaagttcgatatagtaaagacagaatttatacatatgtcgccaacattctgattgcagtgaatccatactttgacatacctaaaatatattcttcagaagcaataaagtcatatcaaggaaaatctcttgggacaagaccacctcatgtctttgcaattgctgataaagcttttcgagacatgaaggtgctcaagatgagtcagtctatcattgtatctggagaatcaggagccggcaaaacagaaaatacaaaatttgttctaagatacctgactgaatcctatggaacaggtcaagatattgatgacagaattgttgaagctaacccactcctagaagcctttggaaatgcgaagactgttcgcaacaataatagcagtcgatttgggaaatttgtagaaatacattttaatgaaaagagctcagttgttggaggatttgtttcacattatctcctagagaaatctaggatctgtgttcaaggcaaagaggaaagaaattatcatatcttttataggttgtgtgctggtgcttctgaagatattagagaaaaacttcatttgagttcaccagataattttcggtatttaaaccgaggctgcactagatactttgctaacaaagaaactgacaaacagattttacagaaccgcaaaagtcctgagtaccttaaggcaggttctatgaaagatcctctgctagatgaccatggtgattttattagaatgtgcacggctatgaaaaaaattggtttggatgatgaagaaaagcttgatctcttccgggtagtagctggcgtcctgcaccttggaaatattgattttgaggaagctggcagcacttcaggtggttgtaatctgaagaataaatctgctcagtctttggaatattgtgctgaattactgggtttggaccaagatgatcttcgagtaagtttgaccacaagagtcatgctaacaacagcagggggcaccaaaggaacagttataaaggtacctctgaaagtggagcaagcaaacaatgctcgtgatgccctggcaaagacagtgtatagccatctttttgatcatgtggtaaacagagtaaatcagtgttttccttttgaaacatcatcctattttattggagtcctagatattgctggttttgagtactttgagcataacagttttgaacaattttgcatcaactattgcaatgaaaaacttcaacaattttttaatgaaaggattctgaaggaggaacaagaactctatcaaaaagaaggtttaggtgttaatgaagtgcattatgtggataatcaggactgtatagatttaattgaagccaaattagtgggaatactggatattttggatgaagaaaatcgccttccccagccaagtgatcaacactttacatctgcagttcaccaaaagcacaaggatcattttcgactcactattcccagaaaatctaagctggcagttcataggaatatcagagacgacgaaggcttcattatcaggcattttgcgggggcagtgtgctatgaaacaacccagtttgtggagaaaaataatgatgctttacatatgtctcttgaatccttaatatgtgaatccagagataagtttatacgggaattatttgaatcatccacaaataacaacaaagatactaaacaaaaagcaggaaaacttagcttcatcagcgtgggaaacaagtttaagacacagttaaatttgcttctggataaacttcgaagtactggagcaagctttattcgttgcatcaaacctaacttaaagatgacaagccaccactttgaaggtgctcaaattctgtctcagcttcagtgttcagatggcttaagcaaaatcagactaaactatagcgatgaatcacctgaagctggtaaaatgcttgaagatgaactcgtcgacttctcagaagatcaggataaccaggatgatagcagtgacgatggattcctcgctgatgacaactgcagttcagaaataggacagtggcatttaaagcctactatctgtaaacaaccttgtatcctacttatggactcactccgaggcccttctcggtcaaatgttgtcaaaattttaagagagtatttagaagtggaatgggaagttaaaaaaggaagcaaaagaagtttttccaaagatgttatgaagggctctaatccaaaagtaccacagcaaaacaacttcagtgactgtggtgtatatgtattgcagtatgtagagagcttttttgagaatccaattctcagttttgaactacctatgaatttggcaaactggtttcctccaccaagaatgagaacaaaaagagaagaaatccgaaacataattctgaagctacaggaagatcagagcaaagagaaaagaaagcataaggacacttactcaacagaagcacctttaggcgaaggaacagaacaatatgtcaatagtatctcagattga

SEQ ID NO: 395 - DNA, 636 bp, Homo sapiens
atggaggatggaaagcccgtttgggcgccacaccctacagatggatttcagatgggcaatattgtggatattggccccgacagcttaacaattgaacccttgaatcagaaaggcaaggatgatagcagtgacgatggattcctcgctgatgacaactgcagttcagaaataggacagtggcatttaaagcctactatctgtaaacaaccttgtatcctacttatggactcactccgaggcccttctcggtcaaatgttgtcaaaattttaagagagtatttagaagtggaatgggaagttaaaaaaggaagcaaaagaagtttttccaaagatgttatgaagggctctaatccaaaagtaccacagcaaaacaacttcagtgactgtggtgtatatgtattgcagtatgtagagagcttttttgagaatccaattctcagttttgaactacctatgaatttggcaaactggtttcctccaccaagaatgagaacaaaaagagaagaaatccgaaacataattctgaagctacaggaagatcagagcaaagagaaaagaaagcataaggacacttactcaacagaagcacctttaggcgaaggaacagaacaatatgtcaatagtatctcagattga

SEQ ID NO: 396 - DNA, 1149 bp, Homo sapiens
atggtggactaccacgcggcgaaccagtcgtaccagtacggccccagcagcgcgggcaatggcgctggcggcgggggcagcatgggcgactacatggcccaggaggacgactgggaccgggacctgctgctggacccggcctgggagaagcagcagcgcaagaccttcacggcatggtgcaactcccacctgcggaaggcaggcacacagatcgagaacattgatgaggacttccgagacgggctcaagctcatgctgctcctggaggtcatatcaggggagcggttacctaagccggagcgggggaagatgagagtgcacaaaatcaacaatgtgaacaaagcgctggactttattgccagcaaaggcgtcaagctggtctccatcggggcagaagagattgtggacggcaacgcaaagatgaccctgggaatgatctggaccatcatccttaggttcgccatccaggacatctccgtggaagagacctcggccaaggaagggctccttctctggtgccagagaaagacagccccgtataagaacgtcaatgtgcagaacttccacatcaggtacaatcctgagaacctggccaccctggagcgctatgtagagacgcaggccaaggaaaatgcctatgatctggaagccaacctggctgtcctgaagctgtaccagttcaacccagccttctttcagaccacggtcaccgcccagatcctgctgaaggccctcaccaacttgccgcacacagacttcaccctgtgcaagtgcatgatcgaccaggcacatcaagaagaacggccaatccgacagattttgtacctcggggacctgctggagacctgccatttccaggccttctggcaagccctggatgaaaacatggacctcttggaaggtataactggctttgaagactctgtccgaaagtttatctgccatgttgtgggtatcacttaccagcacattgaccgctggctgctggccgagatgctcggggatctgtcggacagccagctaaaggtgtggatgagcaaatacggctggagtgccgacgagtcggggcagatcttcatctgtagccaagaagagagcattaaacccaagaacattgtggagaagattgactttgacagtgagtggtga

SEQ ID NO: 397 - DNA, 519 bp, Homo sapiens
atggtggactaccacgcggcgaaccagtcgtaccagtacggccccagcagcgcgggcaatggcgctggcggcgggggcagcatgggcgactacatggcccaggaggacgactgggaccgggacctgctgctggacccggcctgggagaagcagcagcgcaagcaagaagaacggccaatccgacagattttgtacctcggggacctgctggagacctgccatttccaggccttctggcaagccctggatgaaaacatggacctcttggaaggtataactggctttgaagactctgtccgaaagtttatctgccatgttgtgggtatcacttaccagcacattgaccgctggctgctggccgagatgctcggggatctgtcggacagccagctaaaggtgtggatgagcaaatacggctggagtgccgacgagtcggggcagatcttcatctgtagccaagaagagagcattaaacccaagaacattgtggagaagattgactttgacagtgagtggtga

SEQ ID NO: 398 - DNA, 540 bp, Homo sapiens
atggtggactaccacgcggcgaaccagtcgtaccagtacggccccagcagcgcgggcaatggcgctggcggcgggggcagcatgggcgactacatggcccaggaggacgactgggaccgggacctgctgctggacccggcctgggagaagcagcagcgcaagcaagaagaacggccaatccgacagattttgtacctcggggacctgctggagacctgccatttccaggccttctggcaagccctggatgaaaacatggacctcttggaaggtataactggctttgaagactctgtccgaaagtttatctgccatgttgtgggtatcacttaccagcacattgaccgctggctgctggccgagatgctcggggatctgtcggacagccagctaaaggtgtggatgagcaaatacggctggagtgccgacgagtcggggcagatcttcatctgtagccaagaagagagcattaaacccaagaacattgtggagaagattgactttgacagtgtgtccagcatcatggcctcctcccagtaa

SEQ ID NO: 399 - DNA, 465 bp, Homo sapiens
atggtggactaccacgcggcgaaccagtcgtaccagtacggccccagcagcgcgggcaatggcgctggcggcgggggcagcatgggcgactacatggcccaggaggacgactgggaccgggacctgctgctggacccggcctgggagaagcagcagcgcaagcaagccctggatgaaaacatggacctcttggaaggtataactggctttgaagactctgtccgaaagtttatctgccatgttgtgggtatcacttaccagcacattgaccgctggctgctggccgagatgctcggggatctgtcggacagccagctaaaggtgtggatgagcaaatacggctggagtgccgacgagtcggggcagatcttcatctgtagccaagaagagagcattaaacccaagaacattgtggagaagattgactttgacagtgtgtccagcatcatggcctcctcccagtaa

SEQ ID NO: 400 - DNA, 555 bp, Homo sapiens
atggtggactaccacgcggcgaaccagtcgtaccagtacggccccagcagcgcgggcaatggcgctggcggcgggggcagcatgggcgactacatggcccaggaggacgactgggaccgggacctgctgctggacccggcctgggagaagcagcagcgcaagaccttcacggcatggtgcaactcccacctgcggaaggcaggcacacagatcgagaacattgatgaggacttccgagacgggctcaagctcatgctgctcctggaggtcatatcaggggagcggttacctaagccggagcgggggaagatgagagtgcacaaaatcaacaatgtgaacaaagcgctggactttattgccagcaaaggcgtcaagctggtctccatcggggcagaagacagccagctaaaggtgtggatgagcaaatacggctggagtgccgacgagtcggggcagatcttcatctgtagccaagaagagagcattaaacccaagaacattgtggagaagattgactttgacagtgtgtccagcatcatggcctcctcccagtaa

SEQ ID NO: 401 - DNA, 1050 bp, Homo sapiens
atggtggactaccacgcggcgaaccagtcgtaccagtacggccccagcagcgcgggcaatggcgctggcggcgggggcagcatgggcgactacatggcccaggaggacgactgggaccgggacctgctgctggacccggcctgggagaagcagcagcgcaagaccttcacggcatggtgcaactcccacctgcggaaggcaggcacacagatcgagaacattgatgaggacttccgagacgggctcaagctcatgctgctcctggaggtcatatcaggggagcggttacctaagccggagcgggggaagatgagagtgcacaaaatcaacaatgtgaacaaagcgctggactttattgccagcaaaggcgtcaagctggtctccatcggggcagaagagattgtggacggcaacgcaaagatgaccctgggaatgatctggaccatcatccttaggttcgccatccaggacatctccgtggaagagacctcggccaaggaagggctccttctctggtgccagagaaagacagccccgtataagaacgtcaatgtgcagaacttccacatcaggtaccagttcaacccagccttctttcagaccacggtcaccgcccagatcctgctgaaggccctcaccaacttgccgcacacagacttcaccctgtgcaagtgcatgatcgaccaggcacatcaagaagaacggccaatccgacagattttgtacctcggggacctgctggagacctgccatttccaggccttctggcaagccctggatgaaaacatggacctcttggaaggtataactggctttgaagactctgtccgaaagtttatctgccatgttgtgggtatcacttaccagcacattgaccgctggctgctggccgagatgctcggggatctgtcggacagccagctaaaggtgtggatgagcaaatacggctggagtgccgacgagtcggggcagatcttcatctgtagccaagaagagagcattaaacccaagaacattgtggagaagattgactttgacagtgagtggtga

SEQ ID NO: 402 - DNA, 1071 bp, Homo sapiens
atggtggactaccacgcggcgaaccagtcgtaccagtacggccccagcagcgcgggcaatggcgctggcggcgggggcagcatgggcgactacatggcccaggaggacgactgggaccgggacctgctgctggacccggcctgggagaagcagcagcgcaagaccttcacggcatggtgcaactcccacctgcggaaggcaggcacacagatcgagaacattgatgaggacttccgagacgggctcaagctcatgctgctcctggaggtcatatcaggggagcggttacctaagccggagcgggggaagatgagagtgcacaaaatcaacaatgtgaacaaagcgctggactttattgccagcaaaggcgtcaagctggtctccatcggggcagaagagattgtggacggcaacgcaaagatgaccctgggaatgatctggaccatcatccttaggttcgccatccaggacatctccgtggaagagacctcggccaaggaagggctccttctctggtgccagagaaagacagccccgtataagaacgtcaatgtgcagaacttccacatcaggtaccagttcaacccagccttctttcagaccacggtcaccgcccagatcctgctgaaggccctcaccaacttgccgcacacagacttcaccctgtgcaagtgcatgatcgaccaggcacatcaagaagaacggccaatccgacagattttgtacctcggggacctgctggagacctgccatttccaggccttctggcaagccctggatgaaaacatggacctcttggaaggtataactggctttgaagactctgtccgaaagtttatctgccatgttgtgggtatcacttaccagcacattgaccgctggctgctggccgagatgctcggggatctgtcggacagccagctaaaggtgtggatgagcaaatacggctggagtgccgacgagtcggggcagatcttcatctgtagccaagaagagagcattaaacccaagaacattgtggagaagattgactttgacagtgtgtccagcatcatggcctcctcccagtaa

SEQ ID NO: 403 - DNA, 444 bp, Homo sapiens
atggtggactaccacgcggcgaaccagtcgtaccagtacggccccagcagcgcgggcaatggcgctggcggcgggggcagcatgggcgactacatggcccaggaggacgactgggaccgggacctgctgctggacccggcctgggagaagcagcagcgcaagcaagccctggatgaaaacatggacctcttggaaggtataactggctttgaagactctgtccgaaagtttatctgccatgttgtgggtatcacttaccagcacattgaccgctggctgctggccgagatgctcggggatctgtcggacagccagctaaaggtgtggatgagcaaatacggctggagtgccgacgagtcggggcagatcttcatctgtagccaagaagagagcattaaacccaagaacattgtggagaagattgactttgacagtgagtggtga

SEQ ID NO: 404 - DNA, 1170 bp, Homo sapiens
atggtggactaccacgcggcgaaccagtcgtaccagtacggccccagcagcgcgggcaatggcgctggcggcgggggcagcatgggcgactacatggcccaggaggacgactgggaccgggacctgctgctggacccggcctgggagaagcagcagcgcaagaccttcacggcatggtgcaactcccacctgcggaaggcaggcacacagatcgagaacattgatgaggacttccgagacgggctcaagctcatgctgctcctggaggtcatatcaggggagcggttacctaagccggagcgggggaagatgagagtgcacaaaatcaacaatgtgaacaaagcgctggactttattgccagcaaaggcgtcaagctggtctccatcggggcagaagagattgtggacggcaacgcaaagatgaccctgggaatgatctggaccatcatccttaggttcgccatccaggacatctccgtggaagagacctcggccaaggaagggctccttctctggtgccagagaaagacagccccgtataagaacgtcaatgtgcagaacttccacatcaggtacaatcctgagaacctggccaccctggagcgctatgtagagacgcaggccaaggaaaatgcctatgatctggaagccaacctggctgtcctgaagctgtaccagttcaacccagccttctttcagaccacggtcaccgcccagatcctgctgaaggccctcaccaacttgccgcacacagacttcaccctgtgcaagtgcatgatcgaccaggcacatcaagaagaacggccaatccgacagattttgtacctcggggacctgctggagacctgccatttccaggccttctggcaagccctggatgaaaacatggacctcttggaaggtataactggctttgaagactctgtccgaaagtttatctgccatgttgtgggtatcacttaccagcacattgaccgctggctgctggccgagatgctcggggatctgtcggacagccagctaaaggtgtggatgagcaaatacggctggagtgccgacgagtcggggcagatcttcatctgtagccaagaagagagcattaaacccaagaacattgtggagaagattgactttgacagtgtgtccagcatcatggcctcctcccagtaa

SEQ ID NO: 405 - DNA, 1737 bp, Homo sapiens
atggagccggacgtgccccttcctcagaccctcctctcccatcccagctacctcaaggtctttgtccccgattacacgcgggagcttctgctggagctgcgggactgcgtgtccaatgggagcctgggctgccccgtgcgtctcaccgtgggcccggtcaccctgcctagcaacttccagaaggtgctcacctgcaccggtgccccctggccctgccgcctgctgctgccctcaccgccctgggaccggtggctgcaagtgacagctgagagcctggtggggcccctcgggacagtggctttcagtgctgtagctgccctcacagcttgcaggccacggagcgtgaccatccagccccttctgcagagcagccaaaaccagagcttcaatgcctcctctggtctgctgtccccgagccccgaccaccaggacctgggcaggagtggcagggtggaccgcagccccttctgcctcacaaactacccagtcacgcgggaggacatggacgtggtgtcggtgcacttccagcccctggacagggtctcggtgagggtgtgttcggacacgccctccgtgatgcggctgcgcctgaacaccggcatggacagcgggggttccctcaccatctccctgcgggccaacaagacagagatgcggaacgagaccgtcgtagtggcctgcgtgaatgctgcctcgcccttccttggcttcaatacttcgctcaactgcaccacagccttcttccagggctaccctttgtctctgagcgcctggtctcgcagggccaacctcatcatcccctacccagagacagacaactggtacctctccctgcagctcatgtgccctgagaatgctgaggactgtgagcaggctgtggtccacgtggagaccaccttgtacctggtgccctgtttgaacgattgtggaccctatggccagtgcctcctgctccgcagacacagctacctgtatgccagctgcagctgcaaggcaggctggcgtgggtggagctgcacggacaacagcacagcccagacggtggcccagcagagggcggccacactgctgctcacgctcagcaacctcatgttcctggcccccatcgccgtctcagtgcggcgattcttcctggtggaggcctccgtctacgcctacaccatgttcttctccacgttctaccacgcctgcgaccagcccggggaggcggtgctgtgcatcctcagctacgacacgctgcagtactgcgacttcttgggctccggggcggccatctgggtcaccatcctgtgcatggcacggctcaagacagtcctgaaatacgtgctgtttcttctgggtacactggtcatcgccatgtccttgcagctggaccgcaggggcatgtggaacatgctggggccctgcctctttgccttcgtgatcatggcctccatgtgggcttaccgctgcgggcaccggcgccagtgctaccccacctcgtggcagcgctgggccttctacctcctgcccggcgtctctatggcctctgtgggcatcgccatctacacctccatgatgactagcgacaactactactacacccacagcatctggcacatcctgctggccgggagcgcagccttgctgctgccgccacctgaccagcccgccgagccctgggcctgctcgcagaaattcccctgccactatcagatctgcaagaacgatcgggaggaactgtacgcagtgacgtga

SEQ ID NO: 406 - DNA, 1074 bp, Homo sapiens
atgccttcaattaagttgcagagttctgatggagagatatttgaagttgatgtggaaattgccaaacaatctgtgactattaagaccatgttggaagatttgggaatggatgatgaaggagatgatgacccagttcctctaccaaatgtgaatgcagcaatattaaaaaaggtcattcagtggtgcacccaccacaaggatgaccctcctcctcctgaagatgatgagaacaaagaaaagcgaacagatgatatccctgtttgggaccaagaattcctgaaagttgaccaaggaacactttttgaactcattctggctgcaaactacttagacatcaaaggtttgcttgatgttacatgcaagactgttgccaatatgatcaaggggaaaactcctgaggagattcgcaagaccttcaatatcaaaaatgactttactgaagaggaggaagcccaggttcgttaccgtgaacgcatcaccattcttcgagggaatcatgagagcagacagatcacacaagtttatggtttctatgatgaatgtttaagaaaatatggaaatgcaaatgtttggaaatattttacagatctttttgactatcttcctctcactgccttggtggatgggcagatcttctgtctacatggtggtctctcgccatctatagatacactggatcatatcagagcacttgatcgcctacaagaagttccccatgagggtccaatgtgtgacttgctgtggtcagatccagatgaccgtggtggttggggtatatctcctcgaggagctggttacacctttgggcaagatatttctgagacatttaatcatgccaatggcctcacgttggtgtctagagctcaccagctagtgatggagggatataactggtgccatgaccggaatgtagtaacgattttcagtgctccaaactattgttatcgttgtggtaaccaagctgcaatcatggaacttgacgatactctaaaatactctttcttgcagtttgacccagcacctcgtagaggcgagccacatgttactcgtcgtaccccagactacttcctgtaa

SEQ ID NO: 407 - DNA, 1284 bp, Homo sapiens
atgccttcaattaagttgcagagttctgatggagagatatttgaagttgatgtggaaattgccaaacaatctgtgactattaagaccatgttggaagatttgggaatggatgatgaaggagatgatgacccagttcctctaccaaatgtgaatgcagcaatattaaaaaaggtcattcagtggtgcacccaccacaaggatgaccctcctcctcctgaagatgatgagaacaaagaaaagcgaacagatgatatccctgtttgggaccaagaattcctgaaagttgaccaaggaacactttttgaactcattctggctgcaaactacttagacatcaaaggtttgcttgatgttacatgcaagactgttgccaatatgatcaaggggaaaactcctgaggagattcgcaagaccttcaatatcaaaaatgactttactgaagaggaggaagcccaggctaaagaaatcctgacaaaagaatccaacgtgcaagaggttcgatgtccagttactgtctgtggagatgtgcatgggcaatttcatgatctcatggaactgtttagaattggtggcaaatcaccagatacaaattacttgtttatgggagattatgttgacagaggatattattcagttgaaacagttacactgcttgtagctcttaaggttcgttaccgtgaacgcatcaccattcttcgagggaatcatgagagcagacagatcacacaagtttatggtttctatgatgaatgtttaagaaaatatggaaatgcaaatgtttggaaatattttacagatctttttgactatcttcctctcactgccttggtggatgggcagatcttctgtctacatggtggtctctcgccatctatagatacactggatcatatcagagcacttgatcgcctacaagaagttccccatgagggtccaatgtgtgacttgctgtggtcagatccagatgaccgtggtggttggggtatatctcctcgaggagctggttacacctttgggcaagatatttctgagacatttaatcatgccaatggcctcacgttggtgtctagagctcaccagctagtgatggagggatataactggtgccatgaccggaatgtagtaacgattttcagtgctccaaactattgttatcgttgtggtaaccaagctgcaatcatggaacttgacgatactctaaaatactctttcttgcagtttgacccagcacctcgtagaggcgagccacatgttactcgtcgtaccccagactacttcctgtaa

SEQ ID NO: 408 - DNA, 720 bp, Homo sapiens
atgccttcaattaagttgcagagttctgatggagagatatttgaagttgatgtggaaattgccaaacaatctgtgactattaagaccatgttggaagatttgggaatggatgatgaaggagatgatgacccagttcctctaccaaatgtgaatgcagcaatattaaaaaaggtcattcagtggtgcacccaccacaaggatgaccctcctcctcctgaagatgatgagaacaaagaaaagcgaacagatgatatccctgtttgggaccaagaattcctgaaagttgaccaaggaacactttttgaactcattctggctgcaaactacttagacatcaaaggtttgcttgatgttacatgcaagactgttgccaatatgatcaaggggaaaactcctgaggagattcgcaagaccttcaatatcaaaaatgactttactgaagaggaggaagcccaggctaaagaaatcctgacaaaagaatccaacgtgcaagaggttcgatgtccagttactgtctgtggagatgtgcatgggcaatttcatgatctcatggaactgtttagaattggtggcaaatcaccagatacaaattacttgtttatgggagattatgttgacagaggatattattcagttgaaacagttacactgcttgtagctcttaaggtaatttcaattttatgttggggcatgttgaaatgggtaagacagtcctcttga

SEQ ID NO: 409 - DNA, 810 bp, Homo sapiens
atgccttcaattaagttgcagagttctgatggagagatatttgaagttgatgtggaaattgccaaacaatctgtgactattaagaccatgttggaagatttgggaatggatgatgaaggagatgatgacccagttcctctaccaaatgtgaatgcagcaatattaaaaaaggtcattcagtggtgcacccaccacaaggatgaccctcctcctcctgaagatgatgagaacaaagaaaagcgaacagatgatatccctgtttgggaccaagaattcctgaaagttgaccaaggaacactttttgaactcattctggctgcaaactacttagacatcaaaggtttgcttgatgttacatgcaagactgttgccaatatgatcaaggggaaaactcctgaggagattcgcaagaccttcaatatcaaaaatgactttactgaagaggaggaagcccagggtccaatgtgtgacttgctgtggtcagatccagatgaccgtggtggttggggtatatctcctcgaggagctggttacacctttgggcaagatatttctgagacatttaatcatgccaatggcctcacgttggtgtctagagctcaccagctagtgatggagggatataactggtgccatgaccggaatgtagtaacgattttcagtgctccaaactattgttatcgttgtggtaaccaagctgcaatcatggaacttgacgatactctaaaatactctttcttgcagtttgacccagcacctcgtagaggcgagccacatgttactcgtcgtaccccagactacttcctgtaa

SEQ ID NO: 410 - DNA, 525 bp, Homo sapiens
atgccttcaattaagttgcagagttctgatggagagatatttgaagttgatgtggaaattgccaaacaatctgtgactattaagaccatgttggaagatttgggaatggatgatgaaggagatgatgacccagttcctctaccaaatgtgaatgcagcaatattaaaaaagggtccaatgtgtgacttgctgtggtcagatccagatgaccgtggtggttggggtatatctcctcgaggagctggttacacctttgggcaagatatttctgagacatttaatcatgccaatggcctcacgttggtgtctagagctcaccagctagtgatggagggatataactggtgccatgaccggaatgtagtaacgattttcagtgctccaaactattgttatcgttgtggtaaccaagctgcaatcatggaacttgacgatactctaaaatactctttcttgcagtttgacccagcacctcgtagaggcgagccacatgttactcgtcgtaccccagactacttcctgtaa

SEQ ID NO: 411 - DNA, 1002 bp, Homo sapiens
atgctctacaagcaactgcgtcaggcctgtgaagaccacgtccaggcacagatccttccgtttagagaatcattcttgcgagcattccaggcccacaaagaagaaaactgggctctgcctgtcatgtatgcagtagcgcttgaccttcgagtgtttgccaataatgcagatcaacagttggtaaagaaaggaaaaagcaaagttggggacatgttggaaaaagcagcagagttactgatgagctgtttccgggtctgtgccagcgacacccgtgctggtatagaggactctaagaagtggggcatgctgtttctggtgaaccagctgtttaaaatctacttcaagatcaacaaactccatttatgtaaacccctaattagagcaattgacagctcaaacctgaaagacgattacagcactgcacagagagtaacatacaaatactacgttggacgcaaggctatgtttgacagcgattttaagcaagctgaggagtacctgtcatttgcctttgagcattgtcaccgttctagtcagaagaacaaaaggatgattctgatctatttgcttccagtaaaaatgctattgggtcacatgcccactgtggagctcctgaaaaagtatcacctgatgcagtttgcggaagtaaccagagctgtgagcgagggcaacctgctgctgctgcacgaggcgctggcgaagcacgaggccttcttcattcgctgcggaatcttcctcatcctggagaagctgaagatcatcacctacaggaacctctttaagaaagtgtatttgttactgaaaacacaccagctgtctctggatgcttttctggttgccttgaagttcatgcaggtggaggacgtggacattgacgaagttcagtgtattctggctaacttgatatacatgggacacgtcaaaggctacatatcgcatcagcatcagaagctggtggtcagcaagcagaacccatttcctcccctgtccacggtgtgttga

SEQ ID NO: 412 - DNA, 1302 bp, Homo sapiens
atggcggacgaggccccgcggaagggcagcttctcggcgctcgtgggccgcaccaacggcctcaccaagcccgcggccctggccgccgcgcccgccaagccggggggcgcgggcggctccaagaagctggtcatcaagaacttccgagacagacctcggctgcccgacaactacacgcaggacacgtggcggaagctgcacgaggcggtgcgggccgtgcagagcagcacctccatcaggtacaacctcgaggagctctaccaggctgtggaaaatctctgttctcacaaagtctccccaatgctctacaagcaactgcgtcaggcctgtgaagaccacgtccaggcacagatccttccgtttagagaatcattcttgcgagcattccaggcccacaaagaagaaaactgggctctgcctgtcatgtatgcagtagcgcttgaccttcgagtgtttgccaataatgcagatcaacagttggtaaagaaaggaaaaagcaaagttggggacatgttggaaaaagcagcagagttactgatgagctgtttccgggtctgtgccagcgacacccgtgctggtatagaggactctaagaagtggggcatgctgtttctggtgaaccagctgtttaaaatctacttcaagatcaacaaactccatttatgtaaacccctaattagagcaattgacagctcaaacctgaaagacgattacagcactgcacagagagtaacatacaaatactacgttggacgcaaggctatgtttgacagcgattttaagcaagctgaggagtacctgtcatttgcctttgagcattgtcaccgttctagtcagaagaacaaaaggatgattctgatctatttgcttccagtaaaaatgctattgggtcacatgcccactgtggagctcctgaaaaagtatcacctgatgcagtttgcggaagtaaccagagctgtgagcgagggcaacctgctgctgctgcacgaggcgctggcgaagcacgaggccttcttcattcgctgcggaatcttcctcatcctggagaagctgaagatcatcacctacaggaacctctttaagaaagtgtatttgttactgaaaacacaccagctgtctctggatgcttttctggttgccttgaagttcatgcaggtggaggacgtggacattgacgaagttcagtgtattctggctaacttgatatacatgggacacgtcaaaggctacatatcgcatcagcatcagaagctggtggtcagcaagcagaacccatttcctcccctgtccacggtgtgttga

SEQ ID NO: 413 - DNA, 1587 bp, Homo sapiens
atgaggcgacgaaggaggcgggacggcttttacccagccccggacttccgagacagggaagctgaggacatggcaggagtgtttgacatagacctggaccagccagaggacgcgggctctgaggatgagctggaggaggggggtcagttaaatgaaagcatggaccatgggggagttggaccatatgaacttggcatggaacattgtgagaaatttgaaatctcagaaactagtgtgaacagagggccagaaaaaatcagaccagaatgttttgagctacttcgggtacttggtaaagggggctatggaaaggtttttcaagtacgaaaagtaacaggagcaaatactgggaaaatatttgccatgaaggtgcttaaaaaggcaatgatagtaagaaatgctaaagatacagctcatacaaaagcagaacggaatattctggaggaagtaaagcatcccttcatcgtggatttaatttatgcctttcagactggtggaaaactctacctcatccttgagtatctcagtggaggagaactatttatgcagttagaaagagagggaatatttatggaagacactgcctgcttttacttggcagaaatctccatggctttggggcatttacatcaaaaggggatcatctacagagacctgaagccggagaatatcatgcttaatcaccaaggtcatgtgaaactaacagactttggactatgcaaagaatctattcatgatggaacagtcacacacacattttgtggaacaatagaatacatggcccctgaaatcttgatgagaagtggccacaatcgtgctgtggattggtggagtttgggagcattaatgtatgacatgctgactggagcacccccattcactggggagaatagaaagaaaacaattgacaaaatcctcaaatgtaaactcaatttgcctccctacctcacacaagaagccagagatctgcttaaaaagctgctgaaaagaaatgctgcttctcgtctgggagctggtcctggggacgctggagaagttcaagctcatccattctttagacacattaactgggaagaacttctggctcgaaaggtggagcccccctttaaacctctgttgcaatctgaagaggatgtaagtcagtttgattccaagtttacacgtcagacacctgtcgacagcccagatgactcaactctcagtgaaagtgccaatcaggtctttctgggttttacatatgtggctccatctgtacttgaaagtgtgaaagaaaagttttcctttgaaccaaaaatccgatcacctcgaagatttattggcagcccacgaacacctgtcagtgctgtccccggcataggtccatctctgcagaagccatttcaggagtacctggaggctcaacggcagaagcttcaccacaaaagcgaaatgggcacaccacagggagaaaactggttgtcctggatgtttgaaaagttggtcgttgtcatggtgtgttacttcatcctatctatcattaactccatggcacaaagttatgccaaacgaatccagcagcggttgaactcagaggagaaaactaaataa

SEQ ID NO: 414 - DNA, 693 bp, Homo sapiens
atggaacattgtgagaaatttgaaatctcagaaactagtgtgaacagagggccagaaaaaatcagaccagaatgttttgagctacttcgggtacttggtaaagggggctatggaaaggtttttcaagtacgaaaagtaacaggagcaaatactgggaaaatatttgccatgaaggtgcttaaaaaggactttgcctcccgggccaaactggcagttcaaaaactagtacagaaagttggattttttggaattttggcctgtgcttcaattccaaatcctttatttgatctggctggaataacgtgtggacactttctggtacctttttggaccttctttggtgcaaccctaattggaaaagcaataataaaaatgcatatccagaaaatttttgttataataacattcagcaagcacatagtggagcaaatggtggctttcattggtgctgtccccggcataggtccatctctgcagaagccatttcaggagtacctggaggctcaacggcagaagcttcaccacaaaagcgaaatgggcacaccacagggagaaaactggttgtcctggatgtttgaaaagttggtcgttgtcatggtgtgttacttcatcctatctatcattaactccatggcacaaagttatgccaaacgaatccagcagcggttgaactcagaggagaaaactaaataa

SEQ ID NO: 415 - DNA, 1428 bp, Homo sapiens
atggaccatgggggagttggaccatatgaacttggcatggaacattgtgagaaatttgaaatctcagaaactagtgtgaacagagggccagaaaaaatcagaccagaatgttttgagctacttcgggtacttggtaaagggggctatggaaaggtttttcaagtacgaaaagtaacaggagcaaatactgggaaaatatttgccatgaaggtgcttaaaaaggcaatgatagtaagaaatgctaaagatacagctcatacaaaagcagaacggaatattctggaggaagtaaagcatcccttcatcgtggatttaatttatgcctttcagactggtggaaaactctacctcatccttgagtatctcagtggaggagaactatttatgcagttagaaagagagggaatatttatggaagacactgcctgcttttacttggcagaaatctccatggctttggggcatttacatcaaaaggggatcatctacagagacctgaagccggagaatatcatgcttaatcaccaaggtcatgtgaaactaacagactttggactatgcaaagaatctattcatgatggaacagtcacacacacattttgtggaacaatagaatacatggcccctgaaatcttgatgagaagtggccacaatcgtgctgtggattggtggagtttgggagcattaatgtatgacatgctgactggagcacccccattcactggggagaatagaaagaaaacaattgacaaaatcctcaaatgtaaactcaatttgcctccctacctcacacaagaagccagagatctgcttaaaaagctgctgaaaagaaatgctgcttctcgtctgggagctggtcctggggacgctggagaagttcaagctcatccattctttagacacattaactgggaagaacttctggctcgaaaggtggagcccccctttaaacctctgttgcaatctgaagaggatgtaagtcagtttgattccaagtttacacgtcagacacctgtcgacagcccagatgactcaactctcagtgaaagtgccaatcaggtctttctgggttttacatatgtggctccatctgtacttgaaagtgtgaaagaaaagttttcctttgaaccaaaaatccgatcacctcgaagatttattggcagcccacgaacacctgtcagtgctgtccccggcataggtccatctctgcagaagccatttcaggagtacctggaggctcaacggcagaagcttcaccacaaaagcgaaatgggcacaccacagggagaaaactggttgtcctggatgtttgaaaagttggtcgttgtcatggtgtgttacttcatcctatctatcattaactccatggcacaaagttatgccaaacgaatccagcagcggttgaactcagaggagaaaactaaataa

SEQ ID NO: 416 - DNA, 1539 bp, Homo sapiens
atggaacattgtgagaaatttgaaatctcagaaactagtgtgaacagagggccagaaaaaatcagaccagaatgttttgagctacttcgggtacttggtaaagggggctatggaaaggtttttcaagtacgaaaagtaacaggagcaaatactgggaaaatatttgccatgaaggtgcttaaaaaggcaatgatagtaagaaatgctaaagatacagctcatacaaaagcagaacggaatattctggaggaagtaaagcatcccttcatcgtggatttaatttatgcctttcagactggtggaaaactctacctcatccttgagtatctcagtggaggagaactatttatgcagttagaaagagagggaatatttatggaagacactgcctgcttttacttggcagaaatctccatggctttggggcatttacatcaaaaggggatcatctacagagacctgaagccggagaatatcatgcttaatcaccaaggtcatgtgaaactaacagactttggactatgcaaagaatctattcatgatggaacagtcacacacacattttgtggaacaatagaatacatggcccctgaaatcttgatgagaagtggccacaatcgtgctgtggattggtggagtttgggagcattaatgtatgacatgctgactggagcacccccattcactggggagaatagaaagaaaacaattgacaaaatcctcaaatgtaaactcaatttgcctccctacctcacacaagaagccagagatctgcttaaaaagctgctgaaaagaaatgctgcttctcgtctgggagctggtcctggggacgctggagaagttcaagctcatccattctttagacacattaactgggaagaacttctggctcgaaaggtggagcccccctttaaacctctgttgcaatctgaagaggatgtaagtcagtttgattccaagtttacacgtcagacacctgtcgacagcccagatgactcaactctcagtgaaagtgccaatcaggtctttctggactttgcctcccgggccaaactggcagttcaaaaactagtacagaaagttggattttttggaattttggcctgtgcttcaattccaaatcctttatttgatctggctggaataacgtgtggacactttctggtacctttttggaccttctttggtgcaaccctaattggaaaagcaataataaaaatgcatatccagaaaatttttgttataataacattcagcaagcacatagtggagcaaatggtggctttcattggtgctgtccccggcataggtccatctctgcagaagccatttcaggagtacctggaggctcaacggcagaagcttcaccacaaaagcgaaatgggcacaccacagggagaaaactggttgtcctggatgtttgaaaagttggtcgttgtcatggtgtgttacttcatcctatctatcattaactccatggcacaaagttatgccaaacgaatccagcagcggttgaactcagaggagaaaactaaataa

SEQ ID NO: 417 - DNA, 729 bp, Homo sapiens
atggaccatgggggagttggaccatatgaacttggcatggaacattgtgagaaatttgaaatctcagaaactagtgtgaacagagggccagaaaaaatcagaccagaatgttttgagctacttcgggtacttggtaaagggggctatggaaaggtttttcaagtacgaaaagtaacaggagcaaatactgggaaaatatttgccatgaaggtgcttaaaaaggactttgcctcccgggccaaactggcagttcaaaaactagtacagaaagttggattttttggaattttggcctgtgcttcaattccaaatcctttatttgatctggctggaataacgtgtggacactttctggtacctttttggaccttctttggtgcaaccctaattggaaaagcaataataaaaatgcatatccagaaaatttttgttataataacattcagcaagcacatagtggagcaaatggtggctttcattggtgctgtccccggcataggtccatctctgcagaagccatttcaggagtacctggaggctcaacggcagaagcttcaccacaaaagcgaaatgggcacaccacagggagaaaactggttgtcctggatgtttgaaaagttggtcgttgtcatggtgtgttacttcatcctatctatcattaactccatggcacaaagttatgccaaacgaatccagcagcggttgaactcagaggagaaaactaaataa

SEQ ID NO: 418 - DNA, 1734 bp, Homo sapiens
atgaggcgacgaaggaggcgggacggcttttacccagccccggacttccgagacagggaagctgaggacatggcaggagtgtttgacatagacctggaccagccagaggacgcgggctctgaggatgagctggaggaggggggtcagttaaatgaaagcatggaccatgggggagttggaccatatgaacttggcatggaacattgtgagaaatttgaaatctcagaaactagtgtgaacagagggccagaaaaaatcagaccagaatgttttgagctacttcgggtacttggtaaagggggctatggaaaggtttttcaagtacgaaaagtaacaggagcaaatactgggaaaatatttgccatgaaggtgcttaaaaaggcaatgatagtaagaaatgctaaagatacagctcatacaaaagcagaacggaatattctggaggaagtaaagcatcccttcatcgtggatttaatttatgcctttcagactggtggaaaactctacctcatccttgagtatctcagtggaggagaactatttatgcagttagaaagagagggaatatttatggaagacactgcctgcttttacttggcagaaatctccatggctttggggcatttacatcaaaaggggatcatctacagagacctgaagccggagaatatcatgcttaatcaccaaggtcatgtgaaactaacagactttggactatgcaaagaatctattcatgatggaacagtcacacacacattttgtggaacaatagaatacatggcccctgaaatcttgatgagaagtggccacaatcgtgctgtggattggtggagtttgggagcattaatgtatgacatgctgactggagcacccccattcactggggagaatagaaagaaaacaattgacaaaatcctcaaatgtaaactcaatttgcctccctacctcacacaagaagccagagatctgcttaaaaagctgctgaaaagaaatgctgcttctcgtctgggagctggtcctggggacgctggagaagttcaagctcatccattctttagacacattaactgggaagaacttctggctcgaaaggtggagcccccctttaaacctctgttgcaatctgaagaggatgtaagtcagtttgattccaagtttacacgtcagacacctgtcgacagcccagatgactcaactctcagtgaaagtgccaatcaggtctttctggactttgcctcccgggccaaactggcagttcaaaaactagtacagaaagttggattttttggaattttggcctgtgcttcaattccaaatcctttatttgatctggctggaataacgtgtggacactttctggtacctttttggaccttctttggtgcaaccctaattggaaaagcaataataaaaatgcatatccagaaaatttttgttataataacattcagcaagcacatagtggagcaaatggtggctttcattggtgctgtccccggcataggtccatctctgcagaagccatttcaggagtacctggaggctcaacggcagaagcttcaccacaaaagcgaaatgggcacaccacagggagaaaactggttgtcctggatgtttgaaaagttggtcgttgtcatggtgtgttacttcatcctatctatcattaactccatggcacaaagttatgccaaacgaatccagcagcggttgaactcagaggagaaaactaaataa

SEQ ID NO: 419 - DNA, 645 bp, Homo sapiens
atgtggggtatcggtacagcaatcggagagctgcctccatatttcatggccagagcagctcgcctctcaggtgctgaaccagatgatgaagagtatcaggaatttgaagagatgctggaacatgcagagtctgcacaagactttgcctcccgggccaaactggcagttcaaaaactagtacagaaagttggattttttggaattttggcctgtgcttcaattccaaatcctttatttgatctggctggaataacgtgtggacactttctggtacctttttggaccttctttggtgcaaccctaattggaaaagcaataataaaaatgcatatccagaaaatttttgttataataacattcagcaagcacatagtggagcaaatggtggctttcattggtgctgtccccggcataggtccatctctgcagaagccatttcaggagtacctggaggctcaacggcagaagcttcaccacaaaagcgaaatgggcacaccacagggagaaaactggttgtcctggatgtttgaaaagttggtcgttgtcatggtgtgttacttcatcctatctatcattaactccatggcacaaagttatgccaaacgaatccagcagcggttgaactcagaggagaaaactaaataa

SEQ ID NO: 420 - DNA, 1392 bp, Homo sapiens
atggaacattgtgagaaatttgaaatctcagaaactagtgtgaacagagggccagaaaaaatcagaccagaatgttttgagctacttcgggtacttggtaaagggggctatggaaaggtttttcaagtacgaaaagtaacaggagcaaatactgggaaaatatttgccatgaaggtgcttaaaaaggcaatgatagtaagaaatgctaaagatacagctcatacaaaagcagaacggaatattctggaggaagtaaagcatcccttcatcgtggatttaatttatgcctttcagactggtggaaaactctacctcatccttgagtatctcagtggaggagaactatttatgcagttagaaagagagggaatatttatggaagacactgcctgcttttacttggcagaaatctccatggctttggggcatttacatcaaaaggggatcatctacagagacctgaagccggagaatatcatgcttaatcaccaaggtcatgtgaaactaacagactttggactatgcaaagaatctattcatgatggaacagtcacacacacattttgtggaacaatagaatacatggcccctgaaatcttgatgagaagtggccacaatcgtgctgtggattggtggagtttgggagcattaatgtatgacatgctgactggagcacccccattcactggggagaatagaaagaaaacaattgacaaaatcctcaaatgtaaactcaatttgcctccctacctcacacaagaagccagagatctgcttaaaaagctgctgaaaagaaatgctgcttctcgtctgggagctggtcctggggacgctggagaagttcaagctcatccattctttagacacattaactgggaagaacttctggctcgaaaggtggagcccccctttaaacctctgttgcaatctgaagaggatgtaagtcagtttgattccaagtttacacgtcagacacctgtcgacagcccagatgactcaactctcagtgaaagtgccaatcaggtctttctgggttttacatatgtggctccatctgtacttgaaagtgtgaaagaaaagttttcctttgaaccaaaaatccgatcacctcgaagatttattggcagcccacgaacacctgtcagtgctgtccccggcataggtccatctctgcagaagccatttcaggagtacctggaggctcaacggcagaagcttcaccacaaaagcgaaatgggcacaccacagggagaaaactggttgtcctggatgtttgaaaagttggtcgttgtcatggtgtgttacttcatcctatctatcattaactccatggcacaaagttatgccaaacgaatccagcagcggttgaactcagaggagaaaactaaataa

SEQ ID NO: 421 - DNA, 567 bp, Homo sapiens
atgaggcgacgaaggaggcgggacggcttttacccagccccggacttccgagacagggaagctgaggacatggcaggagtgtttgacatagacctggaccagccagaggacgcgggctctgaggatgagctggaggaggggattccaaatcctttatttgatctggctggaataacgtgtggacactttctggtacctttttggaccttctttggtgcaaccctaattggaaaagcaataataaaaatgcatatccagaaaatttttgttataataacattcagcaagcacatagtggagcaaatggtggctttcattggtgctgtccccggcataggtccatctctgcagaagccatttcaggagtacctggaggctcaacggcagaagcttcaccacaaaagcgaaatgggcacaccacagggagaaaactggttgtcctggatgtttgaaaagttggtcgttgtcatggtgtgttacttcatcctatctatcattaactccatggcacaaagttatgccaaacgaatccagcagcggttgaactcagaggagaaaactaaataa

SEQ ID NO: 422 - DNA, 366 bp, Homo sapiens
atggaccatgggggagttggaccatatgaacttggcatggaacattgtgagaaatttgaaatctcagaaactagtgtgaacagagggccagaaaaaatcagaccagaatgttttgagctacttcgggtacttggtaaagggggctatggaaaggtttttcaagtacgaaaagtaacaggagcaaatactgggaaaatatttgccatgaaggtgcttaaaaagggagaaaactggttgtcctggatgtttgaaaagttggtcgttgtcatggtgtgttacttcatcctatctatcattaactccatggcacaaagttatgccaaacgaatccagcagcggttgaactcagaggagaaaactaaataa

SEQ ID NO: 423 - DNA, 780 bp, Homo sapiens
atgaggcgacgaaggaggcgggacggcttttacccagccccggacttccgagacagggaagctgaggacatggcaggagtgtttgacatagacctggaccagccagaggacgcgggctctgaggatgagctggaggaggggggtatcggtacagcaatcggagagctgcctccatatttcatggccagagcagctcgcctctcaggtgctgaaccagatgatgaagagtatcaggaatttgaagagatgctggaacatgcagagtctgcacaagactttgcctcccgggccaaactggcagttcaaaaactagtacagaaagttggattttttggaattttggcctgtgcttcaattccaaatcctttatttgatctggctggaataacgtgtggacactttctggtacctttttggaccttctttggtgcaaccctaattggaaaagcaataataaaaatgcatatccagaaaatttttgttataataacattcagcaagcacatagtggagcaaatggtggctttcattggtgctgtccccggcataggtccatctctgcagaagccatttcaggagtacctggaggctcaacggcagaagcttcaccacaaaagcgaaatgggcacaccacagggagaaaactggttgtcctggatgtttgaaaagttggtcgttgtcatggtgtgttacttcatcctatctatcattaactccatggcacaaagttatgccaaacgaatccagcagcggttgaactcagaggagaaaactaaataa

SEQ ID NO: 424 - DNA, 525 bp, Homo sapiens
atgaggcgacgaaggaggcgggacggcttttacccagccccggacttccgagacagggaagctgaggacatggcaggagtgtttgacatagacctggaccagccagaggacgcgggctctgaggatgagctggaggaggggggtcagttaaatgaaagcatggaccatgggggagttggaccatatgaacttggcatggaacattgtgagaaatttgaaatctcagaaactagtgtgaacagagggccagaaaaaatcagaccagaatgttttgagctacttcgggtacttggtaaagggggctatggaaaggtttttcaagtacgaaaagtaacaggagcaaatactgggaaaatatttgccatgaaggtgcttaaaaagggagaaaactggttgtcctggatgtttgaaaagttggtcgttgtcatggtgtgttacttcatcctatctatcattaactccatggcacaaagttatgccaaacgaatccagcagcggttgaactcagaggagaaaactaaataa

SEQ ID NO: 425 - DNA, 1119 bp, Homo sapiens
atgaggcgacgaaggaggcgggacggcttttacccagccccggacttccgagacagggaagctgaggacatggcaggagtgtttgacatagacctggaccagccagaggacgcgggctctgaggatgagctggaggaggggggtcagttaaatgaaagcatggaccatgggggagttggaccatatgaacttggcatggaacattgtgagaaatttgaaatctcagaaactagtgtgaacagagggccagaaaaaatcagaccagaatgttttgagctacttcgggtacttggtaaagggggctatggaaagggtccacatatagcctcagttacattagctgcttatgaatgcaattcagttaattttcccgaaccaccctatcctgatcagattatttgtccagatgaagagggcactgaaggaaccatttctttgtggagtatcatctcaaaagttaggattgaagcctgcatgtggggtatcggtacagcaatcggagagctgcctccatatttcatggccagagcagctcgcctctcaggtgctgaaccagatgatgaagagtatcaggaatttgaagagatgctggaacatgcagagtctgcacaagactttgcctcccgggccaaactggcagttcaaaaactagtacagaaagttggattttttggaattttggcctgtgcttcaattccaaatcctttatttgatctggctggaataacgtgtggacactttctggtacctttttggaccttctttggtgcaaccctaattggaaaagcaataataaaaatgcatatccagaaaatttttgttataataacattcagcaagcacatagtggagcaaatggtggctttcattggtgctgtccccggcataggtccatctctgcagaagccatttcaggagtacctggaggctcaacggcagaagcttcaccacaaaagcgaaatgggcacaccacagggagaaaactggttgtcctggatgtttgaaaagttggtcgttgtcatggtgtgttacttcatcctatctatcattaactccatggcacaaagttatgccaaacgaatccagcagcggttgaactcagaggagaaaactaaataa

SEQ ID NO: 426 - DNA, 297 bp, Homo sapiens
atggaccatgggggagttggaccatatgaacttggcatggaacattgtgagaaatttgaaatctcagaaactagtgtgaacagagggccagaaaaaatcagaccagaatgttttgagctacttcgggtacttggtaaagggggctatggaaagggagaaaactggttgtcctggatgtttgaaaagttggtcgttgtcatggtgtgttacttcatcctatctatcattaactccatggcacaaagttatgccaaacgaatccagcagcggttgaactcagaggagaaaactaaataa

SEQ ID NO: 427 - DNA, 1188 bp, Homo sapiens
atgaggcgacgaaggaggcgggacggcttttacccagccccggacttccgagacagggaagctgaggacatggcaggagtgtttgacatagacctggaccagccagaggacgcgggctctgaggatgagctggaggaggggggtcagttaaatgaaagcatggaccatgggggagttggaccatatgaacttggcatggaacattgtgagaaatttgaaatctcagaaactagtgtgaacagagggccagaaaaaatcagaccagaatgttttgagctacttcgggtacttggtaaagggggctatggaaaggtttttcaagtacgaaaagtaacaggagcaaatactgggaaaatatttgccatgaaggtgcttaaaaagggtccacatatagcctcagttacattagctgcttatgaatgcaattcagttaattttcccgaaccaccctatcctgatcagattatttgtccagatgaagagggcactgaaggaaccatttctttgtggagtatcatctcaaaagttaggattgaagcctgcatgtggggtatcggtacagcaatcggagagctgcctccatatttcatggccagagcagctcgcctctcaggtgctgaaccagatgatgaagagtatcaggaatttgaagagatgctggaacatgcagagtctgcacaagactttgcctcccgggccaaactggcagttcaaaaactagtacagaaagttggattttttggaattttggcctgtgcttcaattccaaatcctttatttgatctggctggaataacgtgtggacactttctggtacctttttggaccttctttggtgcaaccctaattggaaaagcaataataaaaatgcatatccagaaaatttttgttataataacattcagcaagcacatagtggagcaaatggtggctttcattggtgctgtccccggcataggtccatctctgcagaagccatttcaggagtacctggaggctcaacggcagaagcttcaccacaaaagcgaaatgggcacaccacagggagaaaactggttgtcctggatgtttgaaaagttggtcgttgtcatggtgtgttacttcatcctatctatcattaactccatggcacaaagttatgccaaacgaatccagcagcggttgaactcagaggagaaaactaaataa

SEQ ID NO: 428 - DNA, 888 bp, Homo sapiens
atgaggcgacgaaggaggcgggacggcttttacccagccccggacttccgagacagggaagctgaggacatggcaggagtgtttgacatagacctggaccagccagaggacgcgggctctgaggatgagctggaggaggggggtcagttaaatgaaagcatggaccatgggggagttggaccatatgaacttggcatggaacattgtgagaaatttgaaatctcagaaactagtgtgaacagagggccagaaaaaatcagaccagaatgttttgagctacttcgggtacttggtaaagggggctatggaaaggtttttcaagtacgaaaagtaacaggagcaaatactgggaaaatatttgccatgaaggtgcttaaaaaggactttgcctcccgggccaaactggcagttcaaaaactagtacagaaagttggattttttggaattttggcctgtgcttcaattccaaatcctttatttgatctggctggaataacgtgtggacactttctggtacctttttggaccttctttggtgcaaccctaattggaaaagcaataataaaaatgcatatccagaaaatttttgttataataacattcagcaagcacatagtggagcaaatggtggctttcattggtgctgtccccggcataggtccatctctgcagaagccatttcaggagtacctggaggctcaacggcagaagcttcaccacaaaagcgaaatgggcacaccacagggagaaaactggttgtcctggatgtttgaaaagttggtcgttgtcatggtgtgttacttcatcctatctatcattaactccatggcacaaagttatgccaaacgaatccagcagcggttgaactcagaggagaaaactaaataa

SEQ ID NO: 429 - DNA, 1518 bp, Homo sapiens
atgaggcgacgaaggaggcgggacggcttttacccagccccggacttccgagacagggaagctgaggacatggcaggagtgtttgacatagacctggaccagccagaggacgcgggctctgaggatgagctggaggaggggggtcagttaaatgaaagcatggaccatgggggagttggaccatatgaacttggcatggaacattgtgagaaatttgaaatctcagaaactagtgtgaacagagggccagaaaaaatcagaccagaatgttttgagctacttcgggtacttggtaaagggggctatggaaaggcaatgatagtaagaaatgctaaagatacagctcatacaaaagcagaacggaatattctggaggaagtaaagcatcccttcatcgtggatttaatttatgcctttcagactggtggaaaactctacctcatccttgagtatctcagtggaggagaactatttatgcagttagaaagagagggaatatttatggaagacactgcctgcttttacttggcagaaatctccatggctttggggcatttacatcaaaaggggatcatctacagagacctgaagccggagaatatcatgcttaatcaccaaggtcatgtgaaactaacagactttggactatgcaaagaatctattcatgatggaacagtcacacacacattttgtggaacaatagaatacatggcccctgaaatcttgatgagaagtggccacaatcgtgctgtggattggtggagtttgggagcattaatgtatgacatgctgactggagcacccccattcactggggagaatagaaagaaaacaattgacaaaatcctcaaatgtaaactcaatttgcctccctacctcacacaagaagccagagatctgcttaaaaagctgctgaaaagaaatgctgcttctcgtctgggagctggtcctggggacgctggagaagttcaagctcatccattctttagacacattaactgggaagaacttctggctcgaaaggtggagcccccctttaaacctctgttgcaatctgaagaggatgtaagtcagtttgattccaagtttacacgtcagacacctgtcgacagcccagatgactcaactctcagtgaaagtgccaatcaggtctttctgggttttacatatgtggctccatctgtacttgaaagtgtgaaagaaaagttttcctttgaaccaaaaatccgatcacctcgaagatttattggcagcccacgaacacctgtcagtgctgtccccggcataggtccatctctgcagaagccatttcaggagtacctggaggctcaacggcagaagcttcaccacaaaagcgaaatgggcacaccacagggagaaaactggttgtcctggatgtttgaaaagttggtcgttgtcatggtgtgttacttcatcctatctatcattaactccatggcacaaagttatgccaaacgaatccagcagcggttgaactcagaggagaaaactaaataa

SEQ ID NO: 430 - DNA, 450 bp, Homo sapiens
atgaggcgacgaaggaggcgggacggcttttacccagccccggacttccgagacagggaagctgaggacatggcaggagtgtttgacatagacctggaccagccagaggacgcgggctctgaggatgagctggaggaggggaaaatttttgttataataacattcagcaagcacatagtggagcaaatggtggctttcattggtgctgtccccggcataggtccatctctgcagaagccatttcaggagtacctggaggctcaacggcagaagcttcaccacaaaagcgaaatgggcacaccacagggagaaaactggttgtcctggatgtttgaaaagttggtcgttgtcatggtgtgttacttcatcctatctatcattaactccatggcacaaagttatgccaaacgaatccagcagcggttgaactcagaggagaaaactaaataa

SEQ ID NO: 431 - DNA, 960 bp, Homo sapiens
atggaccatgggggagttggaccatatgaacttggcatggaacattgtgagaaatttgaaatctcagaaactagtgtgaacagagggccagaaaaaatcagaccagaatgttttgagctacttcgggtacttggtaaagggggctatggaaagggtccacatatagcctcagttacattagctgcttatgaatgcaattcagttaattttcccgaaccaccctatcctgatcagattatttgtccagatgaagagggcactgaaggaaccatttctttgtggagtatcatctcaaaagttaggattgaagcctgcatgtggggtatcggtacagcaatcggagagctgcctccatatttcatggccagagcagctcgcctctcaggtgctgaaccagatgatgaagagtatcaggaatttgaagagatgctggaacatgcagagtctgcacaagactttgcctcccgggccaaactggcagttcaaaaactagtacagaaagttggattttttggaattttggcctgtgcttcaattccaaatcctttatttgatctggctggaataacgtgtggacactttctggtacctttttggaccttctttggtgcaaccctaattggaaaagcaataataaaaatgcatatccagaaaatttttgttataataacattcagcaagcacatagtggagcaaatggtggctttcattggtgctgtccccggcataggtccatctctgcagaagccatttcaggagtacctggaggctcaacggcagaagcttcaccacaaaagcgaaatgggcacaccacagggagaaaactggttgtcctggatgtttgaaaagttggtcgttgtcatggtgtgttacttcatcctatctatcattaactccatggcacaaagttatgccaaacgaatccagcagcggttgaactcagaggagaaaactaaataa

SEQ ID NO: 432 - DNA, 834 bp, Homo sapiens
atgaggcgacgaaggaggcgggacggcttttacccagccccggacttccgagacagggaagctgaggacatggcaggagtgtttgacatagacctggaccagccagaggacgcgggctctgaggatgagctggaggaggggggtcagttaaatgaaagcatggaccatgggggagttggaccatatgaacttggcatggaacattgtgagaaatttgaaatctcagaaactagtgtgaacagagggccagaaaaaatcagaccagaatgttttgagctacttcgggtacttggtaaagggggctatggaaaggtttttcaagtacgaaaagtaacaggagcaaatactgggaaaatatttgccatgaaggtgcttaaaaaggcaatgatagtaagaaatgctaaagatacagctcatacaaaagcagaacggaatattctggaggaagtaaagcatcccttcatcgtggatttaatttatgcctttcagactggtggaaaactctacctcatccttgagtatctcagtggaggagaactatttatgcagttagaaagagagggaatatttatggaagacactgcctgtgctgtccccggcataggtccatctctgcagaagccatttcaggagtacctggaggctcaacggcagaagcttcaccacaaaagcgaaatgggcacaccacagggagaaaactggttgtcctggatgtttgaaaagttggtcgttgtcatggtgtgttacttcatcctatctatcattaactccatggcacaaagttatgccaaacgaatccagcagcggttgaactcagaggagaaaactaaataa

SEQ ID NO: 433 - DNA, 285 bp, Homo sapiens
atgaggcgacgaaggaggcgggacggcttttacccagccccggacttccgagacagggaagctgaggacatggcaggagtgtttgacatagacctggaccagccagaggacgcgggctctgaggatgagctggaggaggggggagaaaactggttgtcctggatgtttgaaaagttggtcgttgtcatggtgtgttacttcatcctatctatcattaactccatggcacaaagttatgccaaacgaatccagcagcggttgaactcagaggagaaaactaaataa

SEQ ID NO: 434 - DNA, 993 bp, Homo sapiens
atggaacattgtgagaaatttgaaatctcagaaactagtgtgaacagagggccagaaaaaatcagaccagaatgttttgagctacttcgggtacttggtaaagggggctatggaaaggtttttcaagtacgaaaagtaacaggagcaaatactgggaaaatatttgccatgaaggtgcttaaaaagggtccacatatagcctcagttacattagctgcttatgaatgcaattcagttaattttcccgaaccaccctatcctgatcagattatttgtccagatgaagagggcactgaaggaaccatttctttgtggagtatcatctcaaaagttaggattgaagcctgcatgtggggtatcggtacagcaatcggagagctgcctccatatttcatggccagagcagctcgcctctcaggtgctgaaccagatgatgaagagtatcaggaatttgaagagatgctggaacatgcagagtctgcacaagactttgcctcccgggccaaactggcagttcaaaaactagtacagaaagttggattttttggaattttggcctgtgcttcaattccaaatcctttatttgatctggctggaataacgtgtggacactttctggtacctttttggaccttctttggtgcaaccctaattggaaaagcaataataaaaatgcatatccagaaaatttttgttataataacattcagcaagcacatagtggagcaaatggtggctttcattggtgctgtccccggcataggtccatctctgcagaagccatttcaggagtacctggaggctcaacggcagaagcttcaccacaaaagcgaaatgggcacaccacagggagaaaactggttgtcctggatgtttgaaaagttggtcgttgtcatggtgtgttacttcatcctatctatcattaactccatggcacaaagttatgccaaacgaatccagcagcggttgaactcagaggagaaaactaaataa

SEQ ID NO: 435 - DNA, 1269 bp, Homo sapiens
atggaccatgggggagttggaccatatgaacttggcatggaacattgtgagaaatttgaaatctcagaaactagtgtgaacagagggccagaaaaaatcagaccagaatgttttgagctacttcgggtacttggtaaagggggctatggaaaggtttttcaagtacgaaaagtaacaggagcaaatactgggaaaatatttgccatgaaggtgcttaaaaaggcaatgatagtaagaaatgctaaagatacagctcatacaaaagcagaacggaatattctggaggaagtaaagcatcccttcatcgtggatttaatttatgcctttcagactggtggaaaactctacctcatccttgagtatctcagtggaggagaactatttatgcagttagaaagagagggaatatttatggaagacactgcctgcttttacttggcagaaatctccatggctttggggcatttacatcaaaaggggatcatctacagagacctgaagccggagaatatcatgcttaatcaccaaggtcatgtgaaactaacagactttggactatgcaaagaatctattcatgatggaacagtcacacacacattttgtggaacaatagaatacatggcccctgaaatcttgatgagaagtggccacaatcgtgctgtggattggtggagtttgggagcattaatgtatgacatgctgactggagcacccccattcactggggagaatagaaagaaaacaattgacaaaatcctcaaatgtaaactcaatttgcctccctacctcacacaagaagccagagatctgcttaaaaagctgctgaaaagaaatgctgcttctcgtctgggagctggtcctggggacgctggagaagttcaagctcatccattctttagacacattaactgggaagaacttctggctcgaaaggtggagcccccctttaaacctctgttgaaaatttttgttataataacattcagcaagcacatagtggagcaaatggtggctttcattggtgctgtccccggcataggtccatctctgcagaagccatttcaggagtacctggaggctcaacggcagaagcttcaccacaaaagcgaaatgggcacaccacagggagaaaactggttgtcctggatgtttgaaaagttggtcgttgtcatggtgtgttacttcatcctatctatcattaactccatggcacaaagttatgccaaacgaatccagcagcggttgaactcagaggagaaaactaaataa

SEQ ID NO: 436 - DNA, 612 bp, Homo sapiens
atggaacattgtgagaaatttgaaatctcagaaactagtgtgaacagagggccagaaaaaatcagaccagaatgttttgagctacttcgggtacttggtaaagggggctatggaaaggtttttcaagtacgaaaagtaacaggagcaaatactgggaaaatatttgccatgaaggtgcttaaaaagattccaaatcctttatttgatctggctggaataacgtgtggacactttctggtacctttttggaccttctttggtgcaaccctaattggaaaagcaataataaaaatgcatatccagaaaatttttgttataataacattcagcaagcacatagtggagcaaatggtggctttcattggtgctgtccccggcataggtccatctctgcagaagccatttcaggagtacctggaggctcaacggcagaagcttcaccacaaaagcgaaatgggcacaccacagggagaaaactggttgtcctggatgtttgaaaagttggtcgttgtcatggtgtgttacttcatcctatctatcattaactccatggcacaaagttatgccaaacgaatccagcagcggttgaactcagaggagaaaactaaataa

SEQ ID NO: 437 - DNA, 330 bp, Homo sapiens
atggaacattgtgagaaatttgaaatctcagaaactagtgtgaacagagggccagaaaaaatcagaccagaatgttttgagctacttcgggtacttggtaaagggggctatggaaaggtttttcaagtacgaaaagtaacaggagcaaatactgggaaaatatttgccatgaaggtgcttaaaaagggagaaaactggttgtcctggatgtttgaaaagttggtcgttgtcatggtgtgttacttcatcctatctatcattaactccatggcacaaagttatgccaaacgaatccagcagcggttgaactcagaggagaaaactaaataa

SEQ ID NO: 438 - DNA, 1359 bp, Homo sapiens
atgaggcgacgaaggaggcgggacggcttttacccagccccggacttccgagacagggaagctgaggacatggcaggagtgtttgacatagacctggaccagccagaggacgcgggctctgaggatgagctggaggaggggggtcagttaaatgaaagcatggaccatgggggagttggaccatatgaacttggcatggaacattgtgagaaatttgaaatctcagaaactagtgtgaacagagggccagaaaaaatcagaccagaatgttttgagctacttcgggtacttggtaaagggggctatggaaaggcaatgatagtaagaaatgctaaagatacagctcatacaaaagcagaacggaatattctggaggaagtaaagcatcccttcatcgtggatttaatttatgcctttcagactggtggaaaactctacctcatccttgagtatctcagtggaggagaactatttatgcagttagaaagagagggaatatttatggaagacactgcctgcttttacttggcagaaatctccatggctttggggcatttacatcaaaaggggatcatctacagagacctgaagccggagaatatcatgcttaatcaccaaggtcatgtgaaactaacagactttggactatgcaaagaatctattcatgatggaacagtcacacacacattttgtggaacaatagaatacatggcccctgaaatcttgatgagaagtggccacaatcgtgctgtggattggtggagtttgggagcattaatgtatgacatgctgactggagcacccccattcactggggagaatagaaagaaaacaattgacaaaatcctcaaatgtaaactcaatttgcctccctacctcacacaagaagccagagatctgcttaaaaagctgctgaaaagaaatgctgcttctcgtctgggagctggtcctggggacgctggagaagttcaagctcatccattctttagacacattaactgggaagaacttctggctcgaaaggtggagcccccctttaaacctctgttgaaaatttttgttataataacattcagcaagcacatagtggagcaaatggtggctttcattggtgctgtccccggcataggtccatctctgcagaagccatttcaggagtacctggaggctcaacggcagaagcttcaccacaaaagcgaaatgggcacaccacagggagaaaactggttgtcctggatgtttgaaaagttggtcgttgtcatggtgtgttacttcatcctatctatcattaactccatggcacaaagttatgccaaacgaatccagcagcggttgaactcagaggagaaaactaaataa

SEQ ID NO: 439 - DNA, 438 bp, Homo sapiens
atgaggcgacgaaggaggcgggacggcttttacccagccccggacttccgagacagggaagctgaggacatggcaggagtgtttgacatagacctggaccagccagaggacgcgggctctgaggatgagctggaggaggggggtcagttaaatgaaagcatggaccatgggggagttggaccatatgaacttgctgtccccggcataggtccatctctgcagaagccatttcaggagtacctggaggctcaacggcagaagcttcaccacaaaagcgaaatgggcacaccacagggagaaaactggttgtcctggatgtttgaaaagttggtcgttgtcatggtgtgttacttcatcctatctatcattaactccatggcacaaagttatgccaaacgaatccagcagcggttgaactcagaggagaaaactaaataa

SEQ ID NO: 440 - DNA, 639 bp, Homo sapiens
atggaacattgtgagaaatttgaaatctcagaaactagtgtgaacagagggccagaaaaaatcagaccagaatgttttgagctacttcgggtacttggtaaagggggctatggaaaggtttttcaagtacgaaaagtaacaggagcaaatactgggaaaatatttgccatgaaggtgcttaaaaaggcaatgatagtaagaaatgctaaagatacagctcatacaaaagcagaacggaatattctggaggaagtaaagcatcccttcatcgtggatttaatttatgcctttcagactggtggaaaactctacctcatccttgagtatctcagtggaggagaactatttatgcagttagaaagagagggaatatttatggaagacactgcctgtgctgtccccggcataggtccatctctgcagaagccatttcaggagtacctggaggctcaacggcagaagcttcaccacaaaagcgaaatgggcacaccacagggagaaaactggttgtcctggatgtttgaaaagttggtcgttgtcatggtgtgttacttcatcctatctatcattaactccatggcacaaagttatgccaaacgaatccagcagcggttgaactcagaggagaaaactaaataa

SEQ ID NO: 441 - DNA, 948 bp, Homo sapiens
atgaggcgacgaaggaggcgggacggcttttacccagccccggacttccgagacagggaagctgaggacatggcaggagtgtttgacatagacctggaccagccagaggacgcgggctctgaggatgagctggaggaggggggtccacatatagcctcagttacattagctgcttatgaatgcaattcagttaattttcccgaaccaccctatcctgatcagattatttgtccagatgaagagggcactgaaggaaccatttctttgtggagtatcatctcaaaagttaggattgaagcctgcatgtggggtatcggtacagcaatcggagagctgcctccatatttcatggccagagcagctcgcctctcaggtgctgaaccagatgatgaagagtatcaggaatttgaagagatgctggaacatgcagagtctgcacaagactttgcctcccgggccaaactggcagttcaaaaactagtacagaaagttggattttttggaattttggcctgtgcttcaattccaaatcctttatttgatctggctggaataacgtgtggacactttctggtacctttttggaccttctttggtgcaaccctaattggaaaagcaataataaaaatgcatatccagaaaatttttgttataataacattcagcaagcacatagtggagcaaatggtggctttcattggtgctgtccccggcataggtccatctctgcagaagccatttcaggagtacctggaggctcaacggcagaagcttcaccacaaaagcgaaatgggcacaccacagggagaaaactggttgtcctggatgtttgaaaagttggtcgttgtcatggtgtgttacttcatcctatctatcattaactccatggcacaaagttatgccaaacgaatccagcagcggttgaactcagaggagaaaactaaataa

SEQ ID NO: 442 - DNA, 1665 bp, Homo sapiens
atgaggcgacgaaggaggcgggacggcttttacccagccccggacttccgagacagggaagctgaggacatggcaggagtgtttgacatagacctggaccagccagaggacgcgggctctgaggatgagctggaggaggggggtcagttaaatgaaagcatggaccatgggggagttggaccatatgaacttggcatggaacattgtgagaaatttgaaatctcagaaactagtgtgaacagagggccagaaaaaatcagaccagaatgttttgagctacttcgggtacttggtaaagggggctatggaaaggcaatgatagtaagaaatgctaaagatacagctcatacaaaagcagaacggaatattctggaggaagtaaagcatcccttcatcgtggatttaatttatgcctttcagactggtggaaaactctacctcatccttgagtatctcagtggaggagaactatttatgcagttagaaagagagggaatatttatggaagacactgcctgcttttacttggcagaaatctccatggctttggggcatttacatcaaaaggggatcatctacagagacctgaagccggagaatatcatgcttaatcaccaaggtcatgtgaaactaacagactttggactatgcaaagaatctattcatgatggaacagtcacacacacattttgtggaacaatagaatacatggcccctgaaatcttgatgagaagtggccacaatcgtgctgtggattggtggagtttgggagcattaatgtatgacatgctgactggagcacccccattcactggggagaatagaaagaaaacaattgacaaaatcctcaaatgtaaactcaatttgcctccctacctcacacaagaagccagagatctgcttaaaaagctgctgaaaagaaatgctgcttctcgtctgggagctggtcctggggacgctggagaagttcaagctcatccattctttagacacattaactgggaagaacttctggctcgaaaggtggagcccccctttaaacctctgttgcaatctgaagaggatgtaagtcagtttgattccaagtttacacgtcagacacctgtcgacagcccagatgactcaactctcagtgaaagtgccaatcaggtctttctggactttgcctcccgggccaaactggcagttcaaaaactagtacagaaagttggattttttggaattttggcctgtgcttcaattccaaatcctttatttgatctggctggaataacgtgtggacactttctggtacctttttggaccttctttggtgcaaccctaattggaaaagcaataataaaaatgcatatccagaaaatttttgttataataacattcagcaagcacatagtggagcaaatggtggctttcattggtgctgtccccggcataggtccatctctgcagaagccatttcaggagtacctggaggctcaacggcagaagcttcaccacaaaagcgaaatgggcacaccacagggagaaaactggttgtcctggatgtttgaaaagttggtcgttgtcatggtgtgttacttcatcctatctatcattaactccatggcacaaagttatgccaaacgaatccagcagcggttgaactcagaggagaaaactaaataa

SEQ ID NO: 443 - DNA, 675 bp, Homo sapiens
atggaccatgggggagttggaccatatgaacttggcatggaacattgtgagaaatttgaaatctcagaaactagtgtgaacagagggccagaaaaaatcagaccagaatgttttgagctacttcgggtacttggtaaagggggctatggaaaggtttttcaagtacgaaaagtaacaggagcaaatactgggaaaatatttgccatgaaggtgcttaaaaaggcaatgatagtaagaaatgctaaagatacagctcatacaaaagcagaacggaatattctggaggaagtaaagcatcccttcatcgtggatttaatttatgcctttcagactggtggaaaactctacctcatccttgagtatctcagtggaggagaactatttatgcagttagaaagagagggaatatttatggaagacactgcctgtgctgtccccggcataggtccatctctgcagaagccatttcaggagtacctggaggctcaacggcagaagcttcaccacaaaagcgaaatgggcacaccacagggagaaaactggttgtcctggatgtttgaaaagttggtcgttgtcatggtgtgttacttcatcctatctatcattaactccatggcacaaagttatgccaaacgaatccagcagcggttgaactcagaggagaaaactaaataa

SEQ ID NO: 444 - DNA, 1233 bp, Homo sapiens
atggaacattgtgagaaatttgaaatctcagaaactagtgtgaacagagggccagaaaaaatcagaccagaatgttttgagctacttcgggtacttggtaaagggggctatggaaaggtttttcaagtacgaaaagtaacaggagcaaatactgggaaaatatttgccatgaaggtgcttaaaaaggcaatgatagtaagaaatgctaaagatacagctcatacaaaagcagaacggaatattctggaggaagtaaagcatcccttcatcgtggatttaatttatgcctttcagactggtggaaaactctacctcatccttgagtatctcagtggaggagaactatttatgcagttagaaagagagggaatatttatggaagacactgcctgcttttacttggcagaaatctccatggctttggggcatttacatcaaaaggggatcatctacagagacctgaagccggagaatatcatgcttaatcaccaaggtcatgtgaaactaacagactttggactatgcaaagaatctattcatgatggaacagtcacacacacattttgtggaacaatagaatacatggcccctgaaatcttgatgagaagtggccacaatcgtgctgtggattggtggagtttgggagcattaatgtatgacatgctgactggagcacccccattcactggggagaatagaaagaaaacaattgacaaaatcctcaaatgtaaactcaatttgcctccctacctcacacaagaagccagagatctgcttaaaaagctgctgaaaagaaatgctgcttctcgtctgggagctggtcctggggacgctggagaagttcaagctcatccattctttagacacattaactgggaagaacttctggctcgaaaggtggagcccccctttaaacctctgttgaaaatttttgttataataacattcagcaagcacatagtggagcaaatggtggctttcattggtgctgtccccggcataggtccatctctgcagaagccatttcaggagtacctggaggctcaacggcagaagcttcaccacaaaagcgaaatgggcacaccacagggagaaaactggttgtcctggatgtttgaaaagttggtcgttgtcatggtgtgttacttcatcctatctatcattaactccatggcacaaagttatgccaaacgaatccagcagcggttgaactcagaggagaaaactaaataa

SEQ ID NO: 445 - DNA, 279 bp, Homo sapiens
atggaccatgggggagttggaccatatgaacttgctgtccccggcataggtccatctctgcagaagccatttcaggagtacctggaggctcaacggcagaagcttcaccacaaaagcgaaatgggcacaccacagggagaaaactggttgtcctggatgtttgaaaagttggtcgttgtcatggtgtgttacttcatcctatctatcattaactccatggcacaaagttatgccaaacgaatccagcagcggttgaactcagaggagaaaactaaataa

SEQ ID NO: 446 - DNA, 456 bp, Homo sapiens
atgaggcgacgaaggaggcgggacggcttttacccagccccggacttccgagacagggaagctgaggacatggcaggagtgtttgacatagacctggaccagccagaggacgcgggctctgaggatgagctggaggaggggggtcagttaaatgaaagcatggaccatgggggagttggaccatatgaacttggcatggaacattgtgagaaatttgaaatctcagaaactagtgtgaacagagggccagaaaaaatcagaccagaatgttttgagctacttcgggtacttggtaaagggggctatggaaagggagaaaactggttgtcctggatgtttgaaaagttggtcgttgtcatggtgtgttacttcatcctatctatcattaactccatggcacaaagttatgccaaacgaatccagcagcggttgaactcagaggagaaaactaaataa

SEQ ID NO: 447 - DNA, 765 bp, Homo sapiens
atgaggcgacgaaggaggcgggacggcttttacccagccccggacttccgagacagggaagctgaggacatggcaggagtgtttgacatagacctggaccagccagaggacgcgggctctgaggatgagctggaggaggggggtcagttaaatgaaagcatggaccatgggggagttggaccatatgaacttggcatggaacattgtgagaaatttgaaatctcagaaactagtgtgaacagagggccagaaaaaatcagaccagaatgttttgagctacttcgggtacttggtaaagggggctatggaaaggcaatgatagtaagaaatgctaaagatacagctcatacaaaagcagaacggaatattctggaggaagtaaagcatcccttcatcgtggatttaatttatgcctttcagactggtggaaaactctacctcatccttgagtatctcagtggaggagaactatttatgcagttagaaagagagggaatatttatggaagacactgcctgtgctgtccccggcataggtccatctctgcagaagccatttcaggagtacctggaggctcaacggcagaagcttcaccacaaaagcgaaatgggcacaccacagggagaaaactggttgtcctggatgtttgaaaagttggtcgttgtcatggtgtgttacttcatcctatctatcattaactccatggcacaaagttatgccaaacgaatccagcagcggttgaactcagaggagaaaactaaataa

SEQ ID NO: 448 - DNA, 648 bp, Homo sapiens
atgaggcgacgaaggaggcgggacggcttttacccagccccggacttccgagacagggaagctgaggacatggcaggagtgtttgacatagacctggaccagccagaggacgcgggctctgaggatgagctggaggagggggactttgcctcccgggccaaactggcagttcaaaaactagtacagaaagttggattttttggaattttggcctgtgcttcaattccaaatcctttatttgatctggctggaataacgtgtggacactttctggtacctttttggaccttctttggtgcaaccctaattggaaaagcaataataaaaatgcatatccagaaaatttttgttataataacattcagcaagcacatagtggagcaaatggtggctttcattggtgctgtccccggcataggtccatctctgcagaagccatttcaggagtacctggaggctcaacggcagaagcttcaccacaaaagcgaaatgggcacaccacagggagaaaactggttgtcctggatgtttgaaaagttggtcgttgtcatggtgtgttacttcatcctatctatcattaactccatggcacaaagttatgccaaacgaatccagcagcggttgaactcagaggagaaaactaaataa

SEQ ID NO: 449 - DNA, 1575 bp, Homo sapiens
atggaccatgggggagttggaccatatgaacttggcatggaacattgtgagaaatttgaaatctcagaaactagtgtgaacagagggccagaaaaaatcagaccagaatgttttgagctacttcgggtacttggtaaagggggctatggaaaggtttttcaagtacgaaaagtaacaggagcaaatactgggaaaatatttgccatgaaggtgcttaaaaaggcaatgatagtaagaaatgctaaagatacagctcatacaaaagcagaacggaatattctggaggaagtaaagcatcccttcatcgtggatttaatttatgcctttcagactggtggaaaactctacctcatccttgagtatctcagtggaggagaactatttatgcagttagaaagagagggaatatttatggaagacactgcctgcttttacttggcagaaatctccatggctttggggcatttacatcaaaaggggatcatctacagagacctgaagccggagaatatcatgcttaatcaccaaggtcatgtgaaactaacagactttggactatgcaaagaatctattcatgatggaacagtcacacacacattttgtggaacaatagaatacatggcccctgaaatcttgatgagaagtggccacaatcgtgctgtggattggtggagtttgggagcattaatgtatgacatgctgactggagcacccccattcactggggagaatagaaagaaaacaattgacaaaatcctcaaatgtaaactcaatttgcctccctacctcacacaagaagccagagatctgcttaaaaagctgctgaaaagaaatgctgcttctcgtctgggagctggtcctggggacgctggagaagttcaagctcatccattctttagacacattaactgggaagaacttctggctcgaaaggtggagcccccctttaaacctctgttgcaatctgaagaggatgtaagtcagtttgattccaagtttacacgtcagacacctgtcgacagcccagatgactcaactctcagtgaaagtgccaatcaggtctttctggactttgcctcccgggccaaactggcagttcaaaaactagtacagaaagttggattttttggaattttggcctgtgcttcaattccaaatcctttatttgatctggctggaataacgtgtggacactttctggtacctttttggaccttctttggtgcaaccctaattggaaaagcaataataaaaatgcatatccagaaaatttttgttataataacattcagcaagcacatagtggagcaaatggtggctttcattggtgctgtccccggcataggtccatctctgcagaagccatttcaggagtacctggaggctcaacggcagaagcttcaccacaaaagcgaaatgggcacaccacagggagaaaactggttgtcctggatgtttgaaaagttggtcgttgtcatggtgtgttacttcatcctatctatcattaactccatggcacaaagttatgccaaacgaatccagcagcggttgaactcagaggagaaaactaaataa

SEQ ID NO: 450 - DNA, 807 bp, Homo sapiens
atgaggcgacgaaggaggcgggacggcttttacccagccccggacttccgagacagggaagctgaggacatggcaggagtgtttgacatagacctggaccagccagaggacgcgggctctgaggatgagctggaggaggggggtcagttaaatgaaagcatggaccatgggggagttggaccatatgaacttggcatggaacattgtgagaaatttgaaatctcagaaactagtgtgaacagagggccagaaaaaatcagaccagaatgttttgagctacttcgggtacttggtaaagggggctatggaaaggtttttcaagtacgaaaagtaacaggagcaaatactgggaaaatatttgccatgaaggtgcttaaaaagattccaaatcctttatttgatctggctggaataacgtgtggacactttctggtacctttttggaccttctttggtgcaaccctaattggaaaagcaataataaaaatgcatatccagaaaatttttgttataataacattcagcaagcacatagtggagcaaatggtggctttcattggtgctgtccccggcataggtccatctctgcagaagccatttcaggagtacctggaggctcaacggcagaagcttcaccacaaaagcgaaatgggcacaccacagggagaaaactggttgtcctggatgtttgaaaagttggtcgttgtcatggtgtgttacttcatcctatctatcattaactccatggcacaaagttatgccaaacgaatccagcagcggttgaactcagaggagaaaactaaataa

SEQ ID NO: 451 - DNA, 624 bp, Homo sapiens
atggaacattgtgagaaatttgaaatctcagaaactagtgtgaacagagggccagaaaaaatcagaccagaatgttttgagctacttcgggtacttggtaaagggggctatggaaaggactttgcctcccgggccaaactggcagttcaaaaactagtacagaaagttggattttttggaattttggcctgtgcttcaattccaaatcctttatttgatctggctggaataacgtgtggacactttctggtacctttttggaccttctttggtgcaaccctaattggaaaagcaataataaaaatgcatatccagaaaatttttgttataataacattcagcaagcacatagtggagcaaatggtggctttcattggtgctgtccccggcataggtccatctctgcagaagccatttcaggagtacctggaggctcaacggcagaagcttcaccacaaaagcgaaatgggcacaccacagggagaaaactggttgtcctggatgtttgaaaagttggtcgttgtcatggtgtgttacttcatcctatctatcattaactccatggcacaaagttatgccaaacgaatccagcagcggttgaactcagaggagaaaactaaataa

SEQ ID NO: 452 - DNA, 1029 bp, Homo sapiens
atggaccatgggggagttggaccatatgaacttggcatggaacattgtgagaaatttgaaatctcagaaactagtgtgaacagagggccagaaaaaatcagaccagaatgttttgagctacttcgggtacttggtaaagggggctatggaaaggtttttcaagtacgaaaagtaacaggagcaaatactgggaaaatatttgccatgaaggtgcttaaaaagggtccacatatagcctcagttacattagctgcttatgaatgcaattcagttaattttcccgaaccaccctatcctgatcagattatttgtccagatgaagagggcactgaaggaaccatttctttgtggagtatcatctcaaaagttaggattgaagcctgcatgtggggtatcggtacagcaatcggagagctgcctccatatttcatggccagagcagctcgcctctcaggtgctgaaccagatgatgaagagtatcaggaatttgaagagatgctggaacatgcagagtctgcacaagactttgcctcccgggccaaactggcagttcaaaaactagtacagaaagttggattttttggaattttggcctgtgcttcaattccaaatcctttatttgatctggctggaataacgtgtggacactttctggtacctttttggaccttctttggtgcaaccctaattggaaaagcaataataaaaatgcatatccagaaaatttttgttataataacattcagcaagcacatagtggagcaaatggtggctttcattggtgctgtccccggcataggtccatctctgcagaagccatttcaggagtacctggaggctcaacggcagaagcttcaccacaaaagcgaaatgggcacaccacagggagaaaactggttgtcctggatgtttgaaaagttggtcgttgtcatggtgtgttacttcatcctatctatcattaactccatggcacaaagttatgccaaacgaatccagcagcggttgaactcagaggagaaaactaaataa

SEQ ID NO: 453 - DNA, 1941 bp, Homo sapiens
atgcttttgcgaagtgcaggaaaattaaatgtgggcaccaagaaagaggatggtgagagtacagcccccaccccccgtccaaaggtcttgcgttgtaaatgccaccaccattgtccagaagactcagtcaacaatatttgcagcacagacggatattgtttcacgatgatagaagaggatgactctgggttgcctgtggtcacttctggttgcctaggactagaaggctcagattttcagtgtcgggacactcccattcctcatcaaagaagatcaattgaatgctgcacagaaaggaacgaatgtaataaagacctacaccctacactgcctccattgaaaaacagagattttgttgatggacctatacaccacagggctttacttatatctgtgactgtctgtagtttgctcttggtccttatcatattattttgttacttccggtataaaagacaagaaaccagacctcgatacagcattgggttagaacaggatgaaacttacattcctcctggagaatccctgagagacttaattgagcagtctcagagctcaggaagtggatcaggcctccctctgctgctaaaagatggcggcaaggcagcccaggcaaatgtaagaataggcgatgtggttctcagcattgatggaataaatgcacaaggaatgactcatcttgaagcccagaataagattaagggttgtacaggctctttgaatatgactctgcaaagagcatctgctgcacccaagcctgagccggttcctgttcaaaagcccacagtcaccagcgtgtgttccgagacttctcaggagctagcagagggacagagaagaggatcccagggtgacagtaaacagcaaaatgggaaaatcccacctaaacgcccaccaagaaaacacattgtggagcgctatacagagttttatcatgtacccactcacagtgatgccagcaagaagagactgattgaggatactgaagactggcgtccaaggactggaacaactcagtctcgctctttccgaatccttgcccagatcactgggactgaacatttgaaagaatctgaagccgataatacaaagaaggcaaataactctcaggagccttctccgcagttggcttcctcggtagcttccacacggagcatgcccgagagcctggacagcccaacctctggcagaccaggggttaccagcctcacagctgcagctgccttcaagcctgtaggatccactggcgtcatcaagtcaccaagctggcaacggccaaaccaaggagtaccttccactggaagaatctcaaacagcgctacttactcaggatcagtggcaccagccaactcagctttgggacaaacccagccaagtgaccaggacactttagtgcaaagagctgagcacattccagcagggaaacgaactccgatgtgcgcccattgtaaccaggtcatcagaggaccattcttagtggcactggggaaatcttggcacccagaagaattcaactgcgctcactgcaaaaatacaatggcctacattggatttgtagaggagaaaggagccctgtattgtgagctgtgctatgagaaattctttgcccctgaatgtggtcgatgccaaaggaagatccttggagaagtcatcagtgcgttgaaacaaacttggcatgtttcctgttttgtgtgtgtagcctgtggaaagcccattcggaacaatgtttttcacttggaggatggtgaaccctactgtgagactgattattatgccctctttggtactatatgccatggatgtgaatttcccatagaagctggtgacatgttcctggaagctctgggctacacctggcatgacacttgctttgtatgctcagtgtgttgtgaaagtttggaaggtcagacctttttctccaagaaggacaagcccctgtaa

SEQ ID NO: 454 - DNA, 2706 bp, Homo sapiens
atgcttttgcgaagtgcaggaaaattaaatgtgggcaccaagaaagaggatggtgagagtacagcccccaccccccgtccaaaggtcttgcgttgtaaatgccaccaccattgtccagaagactcagtcaacaatatttgcagcacagacggatattgtttcacgatgatagaagaggatgactctgggttgcctgtggtcacttctggttgcctaggactagaaggctcagattttcagtgtcgggacactcccattcctcatcaaagaagatcaattgaatgctgcacagaaaggaacgaatgtaataaagacctacaccctacactgcctccattgaaaaacagagattttgttgatggacctatacaccacagggctttacttatatctgtgactgtctgtagtttgctcttggtccttatcatattattttgttacttccggtataaaagacaagaaaccagacctcgatacagcattgggttagaacaggatgaaacttacattcctcctggagaatccctgagagacttaattgagcagtctcagagctcaggaagtggatcaggcctccctctgctggtccaaaggactatagctaagcagattcagatggtgaaacagattggaaaaggtcgctatggggaagtttggatgggaaagtggcgtggcgaaaaggtagctgtgaaagtgttcttcaccacagaggaagccagctggttcagagagacagaaatatatcagacagtgttgatgaggcatgaaaacattttgggtttcattgctgcagatatcaaagggacagggtcctggacccagttgtacctaatcacagactatcatgaaaatggttccctttatgattatctgaagtccaccaccctagacgctaaatcaatgctgaagttagcctactcttctgtcagtggcttatgtcatttacacacagaaatctttagtactcaaggcaaaccagcaattgcccatcgagatctgaaaagtaaaaacattctggtgaagaaaaatggaacttgctgtattgctgacctgggcctggctgttaaatttattagagcatctgctgcacccaagcctgagccggttcctgttcaaaagcccacagtcaccagcgtgtgttccgagacttctcaggagctagcagagggacagagaagaggatcccagggtgacagtaaacagcaaaatgggaaaatcccacctaaacgcccaccaagaaaacacattgtggagcgctatacagagttttatcatgtacccactcacagtgatgccagcaagaagagactgattgaggatactgaagactggcgtccaaggactggaacaactcagtctcgctctttccgaatccttgcccagatcactgggactgaacatttgaaagaatctgaagccgataatacaaagaaggcaaagtttgacagtgctctggaagacctacctaagagtggacctcaccctcctgcaactcctcaggtgttaactattggtagccaagtggccacactttctaaagtagcaactacttattctagtttaagcagctccacaggaaatgtggaagattctttcgaaggttttcgaaacttttctaccttctcttctcctgctagatatagtgctgcagttctgagcagcgcagctgctactgtgtctgctgttattgctacaaaaaccaggctctacactcctgaaagatatcactcactcctggatgcactttgcatcagccctgtctccaagcctttagctttttcctatctgcagtcctcaaggaaatcaactggctctatccatgttaagaaaacaagtaactctcaggagccttctccgcagttggcttcctcggtagcttccacacggagcatgcccgagagcctggacagcccaacctctggcagaccaggggttaccagcctcacagctgcagctgccttcaagcctgtaggatccactggcgtcatcaagtcaccaagctggcaacggccaaaccaaggagtaccttccactggaagaatctcaaacagcgctacttactcaggatcagtggcaccagccaactcagctttgggacaaacccagccaagtgaccaggacactttagtgcaaagagctgagcacattccagcagggaaacgaactccgatgtgcgcccattgtaaccaggtcatcagaggaccattcttagtggcactggggaaatcttggcacccagaagaattcaactgcgctcactgcaaaaatacaatggcctacattggatttgtagaggagaaaggagccctgtattgtgagctgtgctatgagaaattctttgcccctgaatgtggtcgatgccaaaggaagatccttggagaagtcatcagtgcgttgaaacaaacttggcatgtttcctgttttgtgtgtgtagcctgtggaaagcccattcggaacaatgtttttcacttggaggatggtgaaccctactgtgagactgattattatgccctctttggtactatatgccatggatgtgaatttcccatagaagctggtgacatgttcctggaagctctgggctacacctggcatgacacttgctttgtatgctcagtgtgttgtgaaagtttggaaggtcagacctttttctccaagaaggacaagcccctgtgtaagaaacatgctcattctgtgaatttttga

SEQ ID NO: 455 - DNA, 645 bp, Homo sapiens
atgagcaactacagtgtgtcactggttggcccagctccttggggtttccggctgcagggcggtaaggatttcaacatgcctctgacaatctctagtctaaaagatggcggcaaggcagcccaggcaaatgtaagaataggcgatgtggttctcagcattgatggaataaatgcacaaggaatgactcatcttgaagcccagaataagattaagggttgtacaggctctttgaatatgactctgcaaagagcatctgctgcacccaagcctgagccggttcctgttcaaaagaaaacacaagtgacaaataaccctggcactgtgaaaatcccacctaaacgcccaccaagaaaacacattgtggagcgctatacagagttttatcatgtacccactcacagtgatgccagcaagaagagactgattgaggatactgaagactggcgtccaaggactggaacaactcagtctcgctctttccgaatccttgcccagatcactgggactgaacatttgaaagaatctgaagccgataatacaaagaaggcaaaggaaaagataccccttcacgtctttagtcccaaatacacaaaattacgtgactggcaccatgaagtttcagcacgtgctcttaacgtacagtga

SEQ ID NO: 456 - DNA, 2367 bp, Homo sapiens
atgcttttgcgaagtgcaggaaaattaaatgtgggcaccaagaaagaggatggtgagagtacagcccccaccccccgtccaaaggtcttgcgttgtaaatgccaccaccattgtccagaagactcagtcaacaatatttgcagcacagacggatattgtttcacgatgatagaagaggatgactctgggttgcctgtggtcacttctggttgcctaggactagaaggctcagattttcagtgtcgggacactcccattcctcatcaaagaagatcaattgaatgctgcacagaaaggaacgaatgtaataaagacctacaccctacactgcctccattgaaaaacagagattttgttgatggacctatacaccacagggctttacttatatctgtgactgtctgtagtttgctcttggtccttatcatattattttgttacttccggtataaaagacaagaaaccagacctcgatacagcattgggttagaacaggatgaaacttacattcctcctggagaatccctgagagacttaattgagcagtctcagagctcaggaagtggatcaggcctccctctgctgctaaaagatggcggcaaggcagcccaggcaaatgtaagaataggcgatgtggttctcagcattgatggaataaatgcacaaggaatgactcatcttgaagcccagaataagattaagggttgtacaggctctttgaatatgactctgcaaagagcatctgctgcacccaagcctgagccggttcctgttcaaaagcccacagtcaccagcgtgtgttccgagacttctcaggagctagcagagggacagagaagaggatcccagggtgacagtaaacagcaaaatgggaaaatcccacctaaacgcccaccaagaaaacacattgtggagcgctatacagagttttatcatgtacccactcacagtgatgccagcaagaagagactgattgaggatactgaagactggcgtccaaggactggaacaactcagtctcgctctttccgaatccttgcccagatcactgggactgaacatttgaaagaatctgaagccgataatacaaagaaggcaaagtttgacagtgctctggaagacctacctaagagtggacctcaccctcctgcaactcctcaggtgttaactattggtagccaagtggccacactttctaaagtagcaactacttattctagtttaagcagctccacaggaaatgtggaagattctttcgaaggttttcgaaacttttctaccttctcttctcctgctagatatagtgctgcagttctgagcagcgcagctgctactgtgtctgctgttattgctacaaaaaccaggctctacactcctgaaagatatcactcactcctggatgcactttgcatcagccctgtctccaagcctttagctttttcctatctgcagtcctcaaggaaatcaactggctctatccatgttaagaaaacaagtaactctcaggagccttctccgcagttggcttcctcggtagcttccacacggagcatgcccgagagcctggacagcccaacctctggcagaccaggggttaccagcctcacagctgcagctgccttcaagcctgtaggatccactggcgtcatcaagtcaccaagctggcaacggccaaaccaaggagtaccttccactggaagaatctcaaacagcgctacttactcaggatcagtggcaccagccaactcagctttgggacaaacccagccaagtgaccaggacactttagtgcaaagagctgagcacattccagcagggaaacgaactccgatgtgcgcccattgtaaccaggtcatcagaggaccattcttagtggcactggggaaatcttggcacccagaagaattcaactgcgctcactgcaaaaatacaatggcctacattggatttgtagaggagaaaggagccctgtattgtgagctgtgctatgagaaattctttgcccctgaatgtggtcgatgccaaaggaagatccttggagaagtcatcagtgcgttgaaacaaacttggcatgtttcctgttttgtgtgtgtagcctgtggaaagcccattcggaacaatgtttttcacttggaggatggtgaaccctactgtgagactgattattatgccctctttggtactatatgccatggatgtgaatttcccatagaagctggtgacatgttcctggaagctctgggctacacctggcatgacacttgctttgtatgctcagtgtgttgtgaaagtttggaaggtcagacctttttctccaagaaggacaagcccctgtgtaagaaacatgctcattctgtgaatttttga

SEQ ID NO: 457 - DNA, 984 bp, Homo sapiens
atgcttttgcgaagtgcaggaaaattaaatgtgggcaccaagaaagaggatggtgagagtacagcccccaccccccgtccaaaggtcttgcgttgtaaatgccaccaccattgtccagaagactcagtcaacaatatttgcagtaactctcaggagccttctccgcagttggcttcctcggtagcttccacacggagcatgcccgagagcctggacagcccaacctctggcagaccaggggttaccagcctcacagctgcagctgccttcaagcctgtaggatccactggcgtcatcaagtcaccaagctggcaacggccaaaccaaggagtaccttccactggaagaatctcaaacagcgctacttactcaggatcagtggcaccagccaactcagctttgggacaaacccagccaagtgaccaggacactttagtgcaaagagctgagcacattccagcagggaaacgaactccgatgtgcgcccattgtaaccaggtcatcagaggaccattcttagtggcactggggaaatcttggcacccagaagaattcaactgcgctcactgcaaaaatacaatggcctacattggatttgtagaggagaaaggagccctgtattgtgagctgtgctatgagaaattctttgcccctgaatgtggtcgatgccaaaggaagatccttggagaagtcatcagtgcgttgaaacaaacttggcatgtttcctgttttgtgtgtgtagcctgtggaaagcccattcggaacaatgtttttcacttggaggatggtgaaccctactgtgagactgattattatgccctctttggtactatatgccatggatgtgaatttcccatagaagctggtgacatgttcctggaagctctgggctacacctggcatgacacttgctttgtatgctcagtgtgttgtgaaagtttggaaggtcagacctttttctccaagaaggacaagcccctgtaa

SEQ ID NO: 458 - DNA, 1134 bp, Homo sapiens
atgcttttgcgaagtgcaggaaaattaaatgtgggcaccaagaaagaggatggtgagagtacagcccccaccccccgtccaaaggtcttgcgttgtaaatgccaccaccattgtccagaagactcagtcaacaatatttgcagcacagacggatattgtttcacgatgatagaagaggatgactctgggttgcctgtggtcacttctggttgcctaggactagaaggctcagattttcagtgtcgggacactcccattcctcatcaaagaagatcaattgaatgctgcacagaaaggaacgaatgtaataaagacctacaccctacactgcctccattgaaaaacagagattttgttgatggacctatacaccacagggctttacttatatctgtgactgtctgtagtttgctcttggtccttatcatattattttgttacttccggtataaaagacaagaaaccagacctcgatacagcattgggttagaacaggatgaaacttacattcctcctggagaatccctgagagacttaattgagcagtctcagagctcaggaagtggatcaggcctccctctgctgctaaaagatggcggcaaggcagcccaggcaaatgtaagaataggcgatgtggttctcagcattgatggaataaatgcacaaggaatgactcatcttgaagcccagaataagattaagggttgtacaggctctttgaatatgactctgcaaagagcatctgctgcacccaagcctgagccggttcctgttcaaaagaaaacacaagtgacaaataaccctggcactgtgaaaatcccacctaaacgcccaccaagaaaacacattgtggagcgctatacagagttttatcatgtacccactcacagtgatgccagcaagaagagactgattgaggatactgaagactggcgtccaaggactggaacaactcagtctcgctctttccgaatccttgcccagatcactgggactgaacatttgaaagaatctgaagccgataatacaaagaaggcaaaggaaaagataccccttcacgtctttagtcccaaatacacaaaattacgtgactggcaccatgaagtttcagcacgtgctcttaacgtacagtga

SEQ ID NO: 459 - DNA, 1452 bp, Homo sapiens
atgagcaactacagtgtgtcactggttggcccagctccttggggtttccggctgcagggcggtaaggatttcaacatgcctctgacaatctctagtctaaaagatggcggcaaggcagcccaggcaaatgtaagaataggcgatgtggttctcagcattgatggaataaatgcacaaggaatgactcatcttgaagcccagaataagattaagggttgtacaggctctttgaatatgactctgcaaagagcatctgctgcacccaagcctgagccggttcctgttcaaaagcccacagtcaccagcgtgtgttccgagacttctcaggagctagcagagggacagagaagaggatcccagggtgacagtaaacagcaaaatgggaaaatcccacctaaacgcccaccaagaaaacacattgtggagcgctatacagagttttatcatgtacccactcacagtgatgccagcaagaagagactgattgaggatactgaagactggcgtccaaggactggaacaactcagtctcgctctttccgaatccttgcccagatcactgggactgaacatttgaaagaatctgaagccgataatacaaagaaggcaaataactctcaggagccttctccgcagttggcttcctcggtagcttccacacggagcatgcccgagagcctggacagcccaacctctggcagaccaggggttaccagcctcacagctgcagctgccttcaagcctgtaggatccactggcgtcatcaagtcaccaagctggcaacggccaaaccaaggagtaccttccactggaagaatctcaaacagcgctacttactcaggatcagtggcaccagccaactcagctttgggacaaacccagccaagtgaccaggacactttagtgcaaagagctgagcacattccagcagggaaacgaactccgatgtgcgcccattgtaaccaggtcatcagaggaccattcttagtggcactggggaaatcttggcacccagaagaattcaactgcgctcactgcaaaaatacaatggcctacattggatttgtagaggagaaaggagccctgtattgtgagctgtgctatgagaaattctttgcccctgaatgtggtcgatgccaaaggaagatccttggagaagtcatcagtgcgttgaaacaaacttggcatgtttcctgttttgtgtgtgtagcctgtggaaagcccattcggaacaatgtttttcacttggaggatggtgaaccctactgtgagactgattattatgccctctttggtactatatgccatggatgtgaatttcccatagaagctggtgacatgttcctggaagctctgggctacacctggcatgacacttgctttgtatgctcagtgtgttgtgaaagtttggaaggtcagacctttttctccaagaaggacaagcccctgtaa

SEQ ID NO: 460 - DNA, 1947 bp, Homo sapiens
atgcttttgcgaagtgcaggaaaattaaatgtgggcaccaagaaagaggatggtgagagtacagcccccaccccccgtccaaaggtcttgcgttgtaaatgccaccaccattgtccagaagactcagtcaacaatatttgcagcacagacggatattgtttcacgatgatagaagaggatgactctgggttgcctgtggtcacttctggttgcctaggactagaaggctcagattttcagtgtcgggacactcccattcctcatcaaagaagatcaattgaatgctgcacagaaaggaacgaatgtaataaagacctacaccctacactgcctccattgaaaaacagagattttgttgatggacctatacaccacagggctttacttatatctgtgactgtctgtagtttgctcttggtccttatcatattattttgttacttccggtataaaagacaagaaaccagacctcgatacagcattgggttagaacaggatgaaacttacattcctcctggagaatccctgagagacttaattgagcagtctcagagctcaggaagtggatcaggcctccctctgctggtccaaaggactatagctaagcagattcagatggtgaaacagattggaaaaggtcgctatggggaagtttggatgggaaagtggcgtggcgaaaaggtagctgtgaaagtgttcttcaccacagaggaagccagctggttcagagagacagaaatatatcagacagtgttgatgaggcatgaaaacattttgggtttcattgctgcagatatcaaagggacagggtcctggacccagttgtacctaatcacagactatcatgaaaatggttccctttatgattatctgaagtccaccaccctagacgctaaatcaatgctgaagttagcctactcttctgtcagtggcttatgtcatttacacacagaaatctttagtactcaaggcaaaccagcaattgcccatcgagatctgaaaagtaaaaacattctggtgaagaaaaatggaacttgctgtattgctgacctgggcctggctgttaaatttattagtaactctcaggagccttctccgcagttggcttcctcggtagcttccacacggagcatgcccgagagcctggacagcccaacctctggcagaccaggggttaccagcctcacagctgcagctgccttcaagcctgtaggatccactggcgtcatcaagtcaccaagctggcaacggccaaaccaaggagtaccttccactggaagaatctcaaacagcgctacttactcaggatcagtggcaccagccaactcagctttgggacaaacccagccaagtgaccaggacactttagtgcaaagagctgagcacattccagcagggaaacgaactccgatgtgcgcccattgtaaccaggtcatcagaggaccattcttagtggcactggggaaatcttggcacccagaagaattcaactgcgctcactgcaaaaatacaatggcctacattggatttgtagaggagaaaggagccctgtattgtgagctgtgctatgagaaattctttgcccctgaatgtggtcgatgccaaaggaagatccttggagaagtcatcagtgcgttgaaacaaacttggcatgtttcctgttttgtgtgtgtagcctgtggaaagcccattcggaacaatgtttttcacttggaggatggtgaaccctactgtgagactgattattatgccctctttggtactatatgccatggatgtgaatttcccatagaagctggtgacatgttcctggaagctctgggctacacctggcatgacacttgctttgtatgctcagtgtgttgtgaaagtttggaaggtcagacctttttctccaagaaggacaagcccctgtgtaagaaacatgctcattctgtgaatttttga

SEQ ID NO: 461 - DNA, 2619 bp, Homo sapiens
atgcttttgcgaagtgcaggaaaattaaatgtgggcaccaagaaagaggatggtgagagtacagcccccaccccccgtccaaaggtcttgcgttgtaaatgccaccaccattgtccagaagactcagtcaacaatatttgcagcacagacggatattgtttcacgatgatagaagaggatgactctgggttgcctgtggtcacttctggttgcctaggactagaaggctcagattttcagtgtcgggacactcccattcctcatcaaagaagatcaattgaatgctgcacagaaaggaacgaatgtaataaagacctacaccctacactgcctccattgaaaaacagagattttgttgatggacctatacaccacagggctttacttatatctgtgactgtctgtagtttgctcttggtccttatcatattattttgttacttccggtataaaagacaagaaaccagacctcgatacagcattgggttagaacaggatgaaacttacattcctcctggagaatccctgagagacttaattgagcagtctcagagctcaggaagtggatcaggcctccctctgctggtccaaaggactatagctaagcagattcagatggtgaaacagattggaaaaggtcgctatggggaagtttggatgggaaagtggcgtggcgaaaaggtagctgtgaaagtgttcttcaccacagaggaagccagctggttcagagagacagaaatatatcagacagtgttgatgaggcatgaaaacattttgggtttcattgctgcagatatcaaagggacagggtcctggacccagttgtacctaatcacagactatcatgaaaatggttccctttatgattatctgaagtccaccaccctagacgctaaatcaatgctgaagttagcctactcttctgtcagtggcttatgtcatttacacacagaaatctttagtactcaaggcaaaccagcaattgcccatcgagatctgaaaagtaaaaacattctggtgaagaaaaatggaacttgctgtattgctgacctgggcctggctgttaaatttattagagcatctgctgcacccaagcctgagccggttcctgttcaaaagggagaacctaaagaagtagttaaacctgtgcccattacatctcctgctgtgtccaaagtcacttccacaaacaacatggcctacaataaggcaccacggccttttggttctgtgtcttcaccaaaagtcacatccatcccatcaccatcgtctgccttcaccccagcccatgcgaccacctcatcacatgcttccccttcacccgtggctgccgtcactcctcccctgttcgctgcatctggactgcatgctaatgccaatcttagtgctgaccagtctccatctgcactgagcgctggtaaaactgcagttaatgtcccacggcagcccacagtcaccagcgtgtgttccgagacttctcaggagctagcagagggacagagaagaggatcccagggtgacagtaaacagcaaaatggcccaccaagaaaacacattgtggagcgctatacagagttttatcatgtacccactcacagtgatgccagcaagaagagactgattgaggatactgaagactggcgtccaaggactggaacaactcagtctcgctctttccgaatccttgcccagatcactgggactgaacatttgaaagaatctgaagccgataatacaaagaaggcaaataactctcaggagccttctccgcagttggcttcctcggtagcttccacacggagcatgcccgagagcctggacagcccaacctctggcagaccaggggttaccagcctcacagctgcagctgccttcaagcctgtaggatccactggcgtcatcaagtcaccaagctggcaacggccaaaccaaggagtaccttccactggaagaatctcaaacagcgctacttactcaggatcagtggcaccagccaactcagctttgggacaaacccagccaagtgaccaggacactttagtgcaaagagctgagcacattccagcagggaaacgaactccgatgtgcgcccattgtaaccaggtcatcagaggaccattcttagtggcactggggaaatcttggcacccagaagaattcaactgcgctcactgcaaaaatacaatggcctacattggatttgtagaggagaaaggagccctgtattgtgagctgtgctatgagaaattctttgcccctgaatgtggtcgatgccaaaggaagatccttggagaagtcatcagtgcgttgaaacaaacttggcatgtttcctgttttgtgtgtgtagcctgtggaaagcccattcggaacaatgtttttcacttggaggatggtgaaccctactgtgagactgattattatgccctctttggtactatatgccatggatgtgaatttcccatagaagctggtgacatgttcctggaagctctgggctacacctggcatgacacttgctttgtatgctcagtgtgttgtgaaagtttggaaggtcagacctttttctccaagaaggacaagcccctgtgtaagaaacatgctcattctgtgaatttttga

SEQ ID NO: 462 - DNA, 2280 bp, Homo sapiens
atgcttttgcgaagtgcaggaaaattaaatgtgggcaccaagaaagaggatggtgagagtacagcccccaccccccgtccaaaggtcttgcgttgtaaatgccaccaccattgtccagaagactcagtcaacaatatttgcagcacagacggatattgtttcacgatgatagaagaggatgactctgggttgcctgtggtcacttctggttgcctaggactagaaggctcagattttcagtgtcgggacactcccattcctcatcaaagaagatcaattgaatgctgcacagaaaggaacgaatgtaataaagacctacaccctacactgcctccattgaaaaacagagattttgttgatggacctatacaccacagggctttacttatatctgtgactgtctgtagtttgctcttggtccttatcatattattttgttacttccggtataaaagacaagaaaccagacctcgatacagcattgggttagaacaggatgaaacttacattcctcctggagaatccctgagagacttaattgagcagtctcagagctcaggaagtggatcaggcctccctctgctgctaaaagatggcggcaaggcagcccaggcaaatgtaagaataggcgatgtggttctcagcattgatggaataaatgcacaaggaatgactcatcttgaagcccagaataagattaagggttgtacaggctctttgaatatgactctgcaaagagcatctgctgcacccaagcctgagccggttcctgttcaaaagggagaacctaaagaagtagttaaacctgtgcccattacatctcctgctgtgtccaaagtcacttccacaaacaacatggcctacaataaggcaccacggccttttggttctgtgtcttcaccaaaagtcacatccatcccatcaccatcgtctgccttcaccccagcccatgcgaccacctcatcacatgcttccccttcacccgtggctgccgtcactcctcccctgttcgctgcatctggactgcatgctaatgccaatcttagtgctgaccagtctccatctgcactgagcgctggtaaaactgcagttaatgtcccacggcagcccacagtcaccagcgtgtgttccgagacttctcaggagctagcagagggacagagaagaggatcccagggtgacagtaaacagcaaaatggcccaccaagaaaacacattgtggagcgctatacagagttttatcatgtacccactcacagtgatgccagcaagaagagactgattgaggatactgaagactggcgtccaaggactggaacaactcagtctcgctctttccgaatccttgcccagatcactgggactgaacatttgaaagaatctgaagccgataatacaaagaaggcaaataactctcaggagccttctccgcagttggcttcctcggtagcttccacacggagcatgcccgagagcctggacagcccaacctctggcagaccaggggttaccagcctcacagctgcagctgccttcaagcctgtaggatccactggcgtcatcaagtcaccaagctggcaacggccaaaccaaggagtaccttccactggaagaatctcaaacagcgctacttactcaggatcagtggcaccagccaactcagctttgggacaaacccagccaagtgaccaggacactttagtgcaaagagctgagcacattccagcagggaaacgaactccgatgtgcgcccattgtaaccaggtcatcagaggaccattcttagtggcactggggaaatcttggcacccagaagaattcaactgcgctcactgcaaaaatacaatggcctacattggatttgtagaggagaaaggagccctgtattgtgagctgtgctatgagaaattctttgcccctgaatgtggtcgatgccaaaggaagatccttggagaagtcatcagtgcgttgaaacaaacttggcatgtttcctgttttgtgtgtgtagcctgtggaaagcccattcggaacaatgtttttcacttggaggatggtgaaccctactgtgagactgattattatgccctctttggtactatatgccatggatgtgaatttcccatagaagctggtgacatgttcctggaagctctgggctacacctggcatgacacttgctttgtatgctcagtgtgttgtgaaagtttggaaggtcagacctttttctccaagaaggacaagcccctgtgtaagaaacatgctcattctgtgaatttttga

SEQ ID NO: 463 - DNA, 1425 bp, Homo sapiens
atggcctacaataaggcaccacggccttttggttctgtgtcttcaccaaaagtcacatccatcccatcaccatcgtctgccttcaccccagcccatgcgaccacctcatcacatgcttccccttcacccgtggctgccgtcactcctcccctgttcgctgcatctggactgcatgctaatgccaatcttagtgctgaccagtctccatctgcactgagcgctggtaaaactgcagttaatgtcccacggcagcccacagtcaccagcgtgtgttccgagacttctcaggagctagcagagggacagagaagaggatcccagggtgacagtaaacagcaaaatggcccaccaagaaaacacattgtggagcgctatacagagttttatcatgtacccactcacagtgatgccagcaagaagagactgattgaggatactgaagactggcgtccaaggactggaacaactcagtctcgctctttccgaatccttgcccagatcactgggactgaacatttgaaagaatctgaagccgataatacaaagaaggcaaataactctcaggagccttctccgcagttggcttcctcggtagcttccacacggagcatgcccgagagcctggacagcccaacctctggcagaccaggggttaccagcctcacagctgcagctgccttcaagcctgtaggatccactggcgtcatcaagtcaccaagctggcaacggccaaaccaaggagtaccttccactggaagaatctcaaacagcgctacttactcaggatcagtggcaccagccaactcagctttgggacaaacccagccaagtgaccaggacactttagtgcaaagagctgagcacattccagcagggaaacgaactccgatgtgcgcccattgtaaccaggtcatcagaggaccattcttagtggcactggggaaatcttggcacccagaagaattcaactgcgctcactgcaaaaatacaatggcctacattggatttgtagaggagaaaggagccctgtattgtgagctgtgctatgagaaattctttgcccctgaatgtggtcgatgccaaaggaagatccttggagaagtcatcagtgcgttgaaacaaacttggcatgtttcctgttttgtgtgtgtagcctgtggaaagcccattcggaacaatgtttttcacttggaggatggtgaaccctactgtgagactgattattatgccctctttggtactatatgccatggatgtgaatttcccatagaagctggtgacatgttcctggaagctctgggctacacctggcatgacacttgctttgtatgctcagtgtgttgtgaaagtttggaaggtcagacctttttctccaagaaggacaagcccctgtgtaagaaacatgctcattctgtgaatttttga

SEQ ID NO: 464 - DNA, 1194 bp, Homo sapiens
atgcttttgcgaagtgcaggaaaattaaatgtgggcaccaagaaagaggatggtgagagtacagcccccaccccccgtccaaaggtcttgcgttgtaaatgccaccaccattgtccagaagactcagtcaacaatatttgcagcacagacggatattgtttcacgatgatagaagaggatgactctgggttgcctgtggtcacttctggttgcctaggactagaaggctcagattttcagtgtcgggacactcccattcctcatcaaagaagatcaattgaatgctgcacagaaaggaacgaatgtaataaagacctacaccctacactgcctccattgaaaaacagagattttgttgatggacctatacaccacagggctttacttatatctgtgactgtctgtagtttgctcttggtccttatcatattattttgttacttccggtataaaagacaagaaaccagacctcgatacagcattgggttagaacaggatgaaacttacattcctcctggagaatccctgagagacttaattgagcagtctcagagctcaggaagtggatcaggcctccctctgctgctaaaagatggcggcaaggcagcccaggcaaatgtaagaataggcgatgtggttctcagcattgatggaataaatgcacaaggaatgactcatcttgaagcccagaataagattaagggttgtacaggctctttgaatatgactctgcaaagagcatctgctgcacccaagcctgagccggttcctgttcaaaagcccacagtcaccagcgtgtgttccgagacttctcaggagctagcagagggacagagaagaggatcccagggtgacagtaaacagcaaaatgggaaaatcccacctaaacgcccaccaagaaaacacattgtggagcgctatacagagttttatcatgtacccactcacagtgatgccagcaagaagagactgattgaggatactgaagactggcgtccaaggactggaacaactcagtctcgctctttccgaatccttgcccagatcactgggactgaacatttgaaagaatctgaagccgataatacaaagaaggcaaaggaaaagataccccttcacgtctttagtcccaaatacacaaaattacgtgactggcaccatgaagtttcagcacgtgctcttaacgtacagtga

SEQ ID NO: 465 - DNA, 2292 bp, Homo sapiens
atgcttttgcgaagtgcaggaaaattaaatgtgggcaccaagaaagaggatggtgagagtacagcccccaccccccgtccaaaggtcttgcgttgtaaatgccaccaccattgtccagaagactcagtcaacaatatttgcagcacagacggatattgtttcacgatgatagaagaggatgactctgggttgcctgtggtcacttctggttgcctaggactagaaggctcagattttcagtgtcgggacactcccattcctcatcaaagaagatcaattgaatgctgcacagaaaggaacgaatgtaataaagacctacaccctacactgcctccattgaaaaacagagattttgttgatggacctatacaccacagggctttacttatatctgtgactgtctgtagtttgctcttggtccttatcatattattttgttacttccggtataaaagacaagaaaccagacctcgatacagcattgggttagaacaggatgaaacttacattcctcctggagaatccctgagagacttaattgagcagtctcagagctcaggaagtggatcaggcctccctctgctggtccaaaggactatagctaagcagattcagatggtgaaacagattggaaaaggtcgctatggggaagtttggatgggaaagtggcgtggcgaaaaggtagctgtgaaagtgttcttcaccacagaggaagccagctggttcagagagacagaaatatatcagacagtgttgatgaggcatgaaaacattttgggtttcattgctgcagatatcaaagggacagggtcctggacccagttgtacctaatcacagactatcatgaaaatggttccctttatgattatctgaagtccaccaccctagacgctaaatcaatgctgaagttagcctactcttctgtcagtggcttatgtcatttacacacagaaatctttagtactcaaggcaaaccagcaattgcccatcgagatctgaaaagtaaaaacattctggtgaagaaaaatggaacttgctgtattgctgacctgggcctggctgttaaatttattagagcatctgctgcacccaagcctgagccggttcctgttcaaaagcccacagtcaccagcgtgtgttccgagacttctcaggagctagcagagggacagagaagaggatcccagggtgacagtaaacagcaaaatggcccaccaagaaaacacattgtggagcgctatacagagttttatcatgtacccactcacagtgatgccagcaagaagagactgattgaggatactgaagactggcgtccaaggactggaacaactcagtctcgctctttccgaatccttgcccagatcactgggactgaacatttgaaagaatctgaagccgataatacaaagaaggcaaataactctcaggagccttctccgcagttggcttcctcggtagcttccacacggagcatgcccgagagcctggacagcccaacctctggcagaccaggggttaccagcctcacagctgcagctgccttcaagcctgtaggatccactggcgtcatcaagtcaccaagctggcaacggccaaaccaaggagtaccttccactggaagaatctcaaacagcgctacttactcaggatcagtggcaccagccaactcagctttgggacaaacccagccaagtgaccaggacactttagtgcaaagagctgagcacattccagcagggaaacgaactccgatgtgcgcccattgtaaccaggtcatcagaggaccattcttagtggcactggggaaatcttggcacccagaagaattcaactgcgctcactgcaaaaatacaatggcctacattggatttgtagaggagaaaggagccctgtattgtgagctgtgctatgagaaattctttgcccctgaatgtggtcgatgccaaaggaagatccttggagaagtcatcagtgcgttgaaacaaacttggcatgtttcctgttttgtgtgtgtagcctgtggaaagcccattcggaacaatgtttttcacttggaggatggtgaaccctactgtgagactgattattatgccctctttggtactatatgccatggatgtgaatttcccatagaagctggtgacatgttcctggaagctctgggctacacctggcatgacacttgctttgtatgctcagtgtgttgtgaaagtttggaaggtcagacctttttctccaagaaggacaagcccctgtgtaagaaacatgctcattctgtgaatttttga

SEQ ID NO: 466 - DNA, 1533 bp, Homo sapiens
atgcttttgcgaagtgcaggaaaattaaatgtgggcaccaagaaagaggatggtgagagtacagcccccaccccccgtccaaaggtcttgcgttgtaaatgccaccaccattgtccagaagactcagtcaacaatatttgcagcacagacggatattgtttcacgatgatagaagaggatgactctgggttgcctgtggtcacttctggttgcctaggactagaaggctcagattttcagtgtcgggacactcccattcctcatcaaagaagatcaattgaatgctgcacagaaaggaacgaatgtaataaagacctacaccctacactgcctccattgaaaaacagagattttgttgatggacctatacaccacagggctttacttatatctgtgactgtctgtagtttgctcttggtccttatcatattattttgttacttccggtataaaagacaagaaaccagacctcgatacagcattgggttagaacaggatgaaacttacattcctcctggagaatccctgagagacttaattgagcagtctcagagctcaggaagtggatcaggcctccctctgctggtccaaaggactatagctaagcagattcagatggtgaaacagattggaaaaggtcgctatggggaagtttggatgggaaagtggcgtggcgaaaaggtagctgtgaaagtgttcttcaccacagaggaagccagctggttcagagagacagaaatatatcagacagtgttgatgaggcatgaaaacattttgggtttcattgctgcagatatcaaagggacagggtcctggacccagttgtacctaatcacagactatcatgaaaatggttccctttatgattatctgaagtccaccaccctagacgctaaatcaatgctgaagttagcctactcttctgtcagtggcttatgtcatttacacacagaaatctttagtactcaaggcaaaccagcaattgcccatcgagatctgaaaagtaaaaacattctggtgaagaaaaatggaacttgctgtattgctgacctgggcctggctgttaaatttattagagcatctgctgcacccaagcctgagccggttcctgttcaaaagcccacagtcaccagcgtgtgttccgagacttctcaggagctagcagagggacagagaagaggatcccagggtgacagtaaacagcaaaatgggaaaatcccacctaaacgcccaccaagaaaacacattgtggagcgctatacagagttttatcatgtacccactcacagtgatgccagcaagaagagactgattgaggatactgaagactggcgtccaaggactggaacaactcagtctcgctctttccgaatccttgcccagatcactgggactgaacatttgaaagaatctgaagccgataatacaaagaaggcaaaggaaaagataccccttcacgtctttagtcccaaatacacaaaattacgtgactggcaccatgaagtttcagcacgtgctcttaacgtacagtga

SEQ ID NO: 467 - DNA, 816 bp, Homo sapiens
atgcccgagagcctggacagcccaacctctggcagaccaggggttaccagcctcacagctgcagctgccttcaagcctgtaggatccactggcgtcatcaagtcaccaagctggcaacggccaaaccaaggagtaccttccactggaagaatctcaaacagcgctacttactcaggatcagtggcaccagccaactcagctttgggacaaacccagccaagtgaccaggacactttagtgcaaagagctgagcacattccagcagggaaacgaactccgatgtgcgcccattgtaaccaggtcatcagaggaccattcttagtggcactggggaaatcttggcacccagaagaattcaactgcgctcactgcaaaaatacaatggcctacattggatttgtagaggagaaaggagccctgtattgtgagctgtgctatgagaaattctttgcccctgaatgtggtcgatgccaaaggaagatccttggagaagtcatcagtgcgttgaaacaaacttggcatgtttcctgttttgtgtgtgtagcctgtggaaagcccattcggaacaatgtttttcacttggaggatggtgaaccctactgtgagactgattattatgccctctttggtactatatgccatggatgtgaatttcccatagaagctggtgacatgttcctggaagctctgggctacacctggcatgacacttgctttgtatgctcagtgtgttgtgaaagtttggaaggtcagacctttttctccaagaaggacaagcccctgtgtaagaaacatgctcattctgtgaatttttga

SEQ ID NO: 468 - DNA, 1917 bp, Homo sapiens
atgcttttgcgaagtgcaggaaaattaaatgtgggcaccaagaaagaggatggtgagagtacagcccccaccccccgtccaaaggtcttgcgttgtaaatgccaccaccattgtccagaagactcagtcaacaatatttgcagcacagacggatattgtttcacgatgatagaagaggatgactctgggttgcctgtggtcacttctggttgcctaggactagaaggctcagattttcagtgtcgggacactcccattcctcatcaaagaagatcaattgaatgctgcacagaaaggaacgaatgtaataaagacctacaccctacactgcctccattgaaaaacagagattttgttgatggacctatacaccacagggctttacttatatctgtgactgtctgtagtttgctcttggtccttatcatattattttgttacttccggtataaaagacaagaaaccagacctcgatacagcattgggttagaacaggatgaaacttacattcctcctggagaatccctgagagacttaattgagcagtctcagagctcaggaagtggatcaggcctccctctgctggtccaaaggactatagctaagcagattcagatggtgaaacagattggaaaaggtcgctatggggaagtttggatgggaaagtggcgtggcgaaaaggtagctgtgaaagtgttcttcaccacagaggaagccagctggttcagagagacagaaatatatcagacagtgttgatgaggcatgaaaacattttgggtttcattgctgcagatatcaaagggacagggtcctggacccagttgtacctaatcacagactatcatgaaaatggttccctttatgattatctgaagtccaccaccctagacgctaaatcaatgctgaagttagcctactcttctgtcagtggcttatgtcatttacacacagaaatctttagtactcaaggcaaaccagcaattgcccatcgagatctgaaaagtaaaaacattctggtgaagaaaaatggaacttgctgtattgctgacctgggcctggctgttaaatttattagtaactctcaggagccttctccgcagttggcttcctcggtagcttccacacggagcatgcccgagagcctggacagcccaacctctggcagaccaggggttaccagcctcacagctgcagctgccttcaagcctgtaggatccactggcgtcatcaagtcaccaagctggcaacggccaaaccaaggagtaccttccactggaagaatctcaaacagcgctacttactcaggatcagtggcaccagccaactcagctttgggacaaacccagccaagtgaccaggacactttagtgcaaagagctgagcacattccagcagggaaacgaactccgatgtgcgcccattgtaaccaggtcatcagaggaccattcttagtggcactggggaaatcttggcacccagaagaattcaactgcgctcactgcaaaaatacaatggcctacattggatttgtagaggagaaaggagccctgtattgtgagctgtgctatgagaaattctttgcccctgaatgtggtcgatgccaaaggaagatccttggagaagtcatcagtgcgttgaaacaaacttggcatgtttcctgttttgtgtgtgtagcctgtggaaagcccattcggaacaatgtttttcacttggaggatggtgaaccctactgtgagactgattattatgccctctttggtactatatgccatggatgtgaatttcccatagaagctggtgacatgttcctggaagctctgggctacacctggcatgacacttgctttgtatgctcagtgtgttgtgaaagtttggaaggtcagacctttttctccaagaaggacaagcccctgtaa

SEQ ID NO: 469 - DNA, 1473 bp, Homo sapiens
atgcttttgcgaagtgcaggaaaattaaatgtgggcaccaagaaagaggatggtgagagtacagcccccaccccccgtccaaaggtcttgcgttgtaaatgccaccaccattgtccagaagactcagtcaacaatatttgcagcacagacggatattgtttcacgatgatagaagaggatgactctgggttgcctgtggtcacttctggttgcctaggactagaaggctcagattttcagtgtcgggacactcccattcctcatcaaagaagatcaattgaatgctgcacagaaaggaacgaatgtaataaagacctacaccctacactgcctccattgaaaaacagagattttgttgatggacctatacaccacagggctttacttatatctgtgactgtctgtagtttgctcttggtccttatcatattattttgttacttccggtataaaagacaagaaaccagacctcgatacagcattgggttagaacaggatgaaacttacattcctcctggagaatccctgagagacttaattgagcagtctcagagctcaggaagtggatcaggcctccctctgctggtccaaaggactatagctaagcagattcagatggtgaaacagattggaaaaggtcgctatggggaagtttggatgggaaagtggcgtggcgaaaaggtagctgtgaaagtgttcttcaccacagaggaagccagctggttcagagagacagaaatatatcagacagtgttgatgaggcatgaaaacattttgggtttcattgctgcagatatcaaagggacagggtcctggacccagttgtacctaatcacagactatcatgaaaatggttccctttatgattatctgaagtccaccaccctagacgctaaatcaatgctgaagttagcctactcttctgtcagtggcttatgtcatttacacacagaaatctttagtactcaaggcaaaccagcaattgcccatcgagatctgaaaagtaaaaacattctggtgaagaaaaatggaacttgctgtattgctgacctgggcctggctgttaaatttattagagcatctgctgcacccaagcctgagccggttcctgttcaaaagaaaacacaagtgacaaataaccctggcactgtgaaaatcccacctaaacgcccaccaagaaaacacattgtggagcgctatacagagttttatcatgtacccactcacagtgatgccagcaagaagagactgattgaggatactgaagactggcgtccaaggactggaacaactcagtctcgctctttccgaatccttgcccagatcactgggactgaacatttgaaagaatctgaagccgataatacaaagaaggcaaaggaaaagataccccttcacgtctttagtcccaaatacacaaaattacgtgactggcaccatgaagtttcagcacgtgctcttaacgtacagtga

SEQ ID NO: 470 - DNA, 1878 bp, Homo sapiens
atgagcaactacagtgtgtcactggttggcccagctccttggggtttccggctgcagggcggtaaggatttcaacatgcctctgacaatctctagtctaaaagatggcggcaaggcagcccaggcaaatgtaagaataggcgatgtggttctcagcattgatggaataaatgcacaaggaatgactcatcttgaagcccagaataagattaagggttgtacaggctctttgaatatgactctgcaaagagcatctgctgcacccaagcctgagccggttcctgttcaaaagcccacagtcaccagcgtgtgttccgagacttctcaggagctagcagagggacagagaagaggatcccagggtgacagtaaacagcaaaatgggaaaatcccacctaaacgcccaccaagaaaacacattgtggagcgctatacagagttttatcatgtacccactcacagtgatgccagcaagaagagactgattgaggatactgaagactggcgtccaaggactggaacaactcagtctcgctctttccgaatccttgcccagatcactgggactgaacatttgaaagaatctgaagccgataatacaaagaaggcaaagtttgacagtgctctggaagacctacctaagagtggacctcaccctcctgcaactcctcaggtgttaactattggtagccaagtggccacactttctaaagtagcaactacttattctagtttaagcagctccacaggaaatgtggaagattctttcgaaggttttcgaaacttttctaccttctcttctcctgctagatatagtgctgcagttctgagcagcgcagctgctactgtgtctgctgttattgctacaaaaaccaggctctacactcctgaaagatatcactcactcctggatgcactttgcatcagccctgtctccaagcctttagctttttcctatctgcagtcctcaaggaaatcaactggctctatccatgttaagaaaacaagtaactctcaggagccttctccgcagttggcttcctcggtagcttccacacggagcatgcccgagagcctggacagcccaacctctggcagaccaggggttaccagcctcacagctgcagctgccttcaagcctgtaggatccactggcgtcatcaagtcaccaagctggcaacggccaaaccaaggagtaccttccactggaagaatctcaaacagcgctacttactcaggatcagtggcaccagccaactcagctttgggacaaacccagccaagtgaccaggacactttagtgcaaagagctgagcacattccagcagggaaacgaactccgatgtgcgcccattgtaaccaggtcatcagaggaccattcttagtggcactggggaaatcttggcacccagaagaattcaactgcgctcactgcaaaaatacaatggcctacattggatttgtagaggagaaaggagccctgtattgtgagctgtgctatgagaaattctttgcccctgaatgtggtcgatgccaaaggaagatccttggagaagtcatcagtgcgttgaaacaaacttggcatgtttcctgttttgtgtgtgtagcctgtggaaagcccattcggaacaatgtttttcacttggaggatggtgaaccctactgtgagactgattattatgccctctttggtactatatgccatggatgtgaatttcccatagaagctggtgacatgttcctggaagctctgggctacacctggcatgacacttgctttgtatgctcagtgtgttgtgaaagtttggaaggtcagacctttttctccaagaaggacaagcccctgtgtaagaaacatgctcattctgtgaatttttga

SEQ ID NO: 471 - DNA, 1014 bp, Homo sapiens
atgcttttgcgaagtgcaggaaaattaaatgtgggcaccaagaaagaggatggtgagagtacagcccccaccccccgtccaaaggtcttgcgttgtaaatgccaccaccattgtccagaagactcagtcaacaatatttgcagtaactctcaggagccttctccgcagttggcttcctcggtagcttccacacggagcatgcccgagagcctggacagcccaacctctggcagaccaggggttaccagcctcacagctgcagctgccttcaagcctgtaggatccactggcgtcatcaagtcaccaagctggcaacggccaaaccaaggagtaccttccactggaagaatctcaaacagcgctacttactcaggatcagtggcaccagccaactcagctttgggacaaacccagccaagtgaccaggacactttagtgcaaagagctgagcacattccagcagggaaacgaactccgatgtgcgcccattgtaaccaggtcatcagaggaccattcttagtggcactggggaaatcttggcacccagaagaattcaactgcgctcactgcaaaaatacaatggcctacattggatttgtagaggagaaaggagccctgtattgtgagctgtgctatgagaaattctttgcccctgaatgtggtcgatgccaaaggaagatccttggagaagtcatcagtgcgttgaaacaaacttggcatgtttcctgttttgtgtgtgtagcctgtggaaagcccattcggaacaatgtttttcacttggaggatggtgaaccctactgtgagactgattattatgccctctttggtactatatgccatggatgtgaatttcccatagaagctggtgacatgttcctggaagctctgggctacacctggcatgacacttgctttgtatgctcagtgtgttgtgaaagtttggaaggtcagacctttttctccaagaaggacaagcccctgtgtaagaaacatgctcattctgtgaatttttga

SEQ ID NO: 472 - DNA, 1791 bp, Homo sapiens
atgagcaactacagtgtgtcactggttggcccagctccttggggtttccggctgcagggcggtaaggatttcaacatgcctctgacaatctctagtctaaaagatggcggcaaggcagcccaggcaaatgtaagaataggcgatgtggttctcagcattgatggaataaatgcacaaggaatgactcatcttgaagcccagaataagattaagggttgtacaggctctttgaatatgactctgcaaagagcatctgctgcacccaagcctgagccggttcctgttcaaaagggagaacctaaagaagtagttaaacctgtgcccattacatctcctgctgtgtccaaagtcacttccacaaacaacatggcctacaataaggcaccacggccttttggttctgtgtcttcaccaaaagtcacatccatcccatcaccatcgtctgccttcaccccagcccatgcgaccacctcatcacatgcttccccttcacccgtggctgccgtcactcctcccctgttcgctgcatctggactgcatgctaatgccaatcttagtgctgaccagtctccatctgcactgagcgctggtaaaactgcagttaatgtcccacggcagcccacagtcaccagcgtgtgttccgagacttctcaggagctagcagagggacagagaagaggatcccagggtgacagtaaacagcaaaatggcccaccaagaaaacacattgtggagcgctatacagagttttatcatgtacccactcacagtgatgccagcaagaagagactgattgaggatactgaagactggcgtccaaggactggaacaactcagtctcgctctttccgaatccttgcccagatcactgggactgaacatttgaaagaatctgaagccgataatacaaagaaggcaaataactctcaggagccttctccgcagttggcttcctcggtagcttccacacggagcatgcccgagagcctggacagcccaacctctggcagaccaggggttaccagcctcacagctgcagctgccttcaagcctgtaggatccactggcgtcatcaagtcaccaagctggcaacggccaaaccaaggagtaccttccactggaagaatctcaaacagcgctacttactcaggatcagtggcaccagccaactcagctttgggacaaacccagccaagtgaccaggacactttagtgcaaagagctgagcacattccagcagggaaacgaactccgatgtgcgcccattgtaaccaggtcatcagaggaccattcttagtggcactggggaaatcttggcacccagaagaattcaactgcgctcactgcaaaaatacaatggcctacattggatttgtagaggagaaaggagccctgtattgtgagctgtgctatgagaaattctttgcccctgaatgtggtcgatgccaaaggaagatccttggagaagtcatcagtgcgttgaaacaaacttggcatgtttcctgttttgtgtgtgtagcctgtggaaagcccattcggaacaatgtttttcacttggaggatggtgaaccctactgtgagactgattattatgccctctttggtactatatgccatggatgtgaatttcccatagaagctggtgacatgttcctggaagctctgggctacacctggcatgacacttgctttgtatgctcagtgtgttgtgaaagtttggaaggtcagacctttttctccaagaaggacaagcccctgtgtaagaaacatgctcattctgtgaatttttga

SEQ ID NO: 473 - DNA, 705 bp, Homo sapiens
atgagcaactacagtgtgtcactggttggcccagctccttggggtttccggctgcagggcggtaaggatttcaacatgcctctgacaatctctagtctaaaagatggcggcaaggcagcccaggcaaatgtaagaataggcgatgtggttctcagcattgatggaataaatgcacaaggaatgactcatcttgaagcccagaataagattaagggttgtacaggctctttgaatatgactctgcaaagagcatctgctgcacccaagcctgagccggttcctgttcaaaagcccacagtcaccagcgtgtgttccgagacttctcaggagctagcagagggacagagaagaggatcccagggtgacagtaaacagcaaaatgggaaaatcccacctaaacgcccaccaagaaaacacattgtggagcgctatacagagttttatcatgtacccactcacagtgatgccagcaagaagagactgattgaggatactgaagactggcgtccaaggactggaacaactcagtctcgctctttccgaatccttgcccagatcactgggactgaacatttgaaagaatctgaagccgataatacaaagaaggcaaaggaaaagataccccttcacgtctttagtcccaaatacacaaaattacgtgactggcaccatgaagtttcagcacgtgctcttaacgtacagtga

SEQ ID NO: 474 - DNA, 1464 bp, Homo sapiens
atgagcaactacagtgtgtcactggttggcccagctccttggggtttccggctgcagggcggtaaggatttcaacatgcctctgacaatctctagtctaaaagatggcggcaaggcagcccaggcaaatgtaagaataggcgatgtggttctcagcattgatggaataaatgcacaaggaatgactcatcttgaagcccagaataagattaagggttgtacaggctctttgaatatgactctgcaaagagcatctgctgcacccaagcctgagccggttcctgttcaaaagcccacagtcaccagcgtgtgttccgagacttctcaggagctagcagagggacagagaagaggatcccagggtgacagtaaacagcaaaatggcccaccaagaaaacacattgtggagcgctatacagagttttatcatgtacccactcacagtgatgccagcaagaagagactgattgaggatactgaagactggcgtccaaggactggaacaactcagtctcgctctttccgaatccttgcccagatcactgggactgaacatttgaaagaatctgaagccgataatacaaagaaggcaaataactctcaggagccttctccgcagttggcttcctcggtagcttccacacggagcatgcccgagagcctggacagcccaacctctggcagaccaggggttaccagcctcacagctgcagctgccttcaagcctgtaggatccactggcgtcatcaagtcaccaagctggcaacggccaaaccaaggagtaccttccactggaagaatctcaaacagcgctacttactcaggatcagtggcaccagccaactcagctttgggacaaacccagccaagtgaccaggacactttagtgcaaagagctgagcacattccagcagggaaacgaactccgatgtgcgcccattgtaaccaggtcatcagaggaccattcttagtggcactggggaaatcttggcacccagaagaattcaactgcgctcactgcaaaaatacaatggcctacattggatttgtagaggagaaaggagccctgtattgtgagctgtgctatgagaaattctttgcccctgaatgtggtcgatgccaaaggaagatccttggagaagtcatcagtgcgttgaaacaaacttggcatgtttcctgttttgtgtgtgtagcctgtggaaagcccattcggaacaatgtttttcacttggaggatggtgaaccctactgtgagactgattattatgccctctttggtactatatgccatggatgtgaatttcccatagaagctggtgacatgttcctggaagctctgggctacacctggcatgacacttgctttgtatgctcagtgtgttgtgaaagtttggaaggtcagacctttttctccaagaaggacaagcccctgtgtaagaaacatgctcattctgtgaatttttga

SEQ ID NO: 475 - DNA, 1953 bp, Homo sapiens
atgcttttgcgaagtgcaggaaaattaaatgtgggcaccaagaaagaggatggtgagagtacagcccccaccccccgtccaaaggtcttgcgttgtaaatgccaccaccattgtccagaagactcagtcaacaatatttgcagcacagacggatattgtttcacgatgatagaagaggatgactctgggttgcctgtggtcacttctggttgcctaggactagaaggctcagattttcagtgtcgggacactcccattcctcatcaaagaagatcaattgaatgctgcacagaaaggaacgaatgtaataaagacctacaccctacactgcctccattgaaaaacagagattttgttgatggacctatacaccacagggctttacttatatctgtgactgtctgtagtttgctcttggtccttatcatattattttgttacttccggtataaaagacaagaaaccagacctcgatacagcattgggttagaacaggatgaaacttacattcctcctggagaatccctgagagacttaattgagcagtctcagagctcaggaagtggatcaggcctccctctgctgctaaaagatggcggcaaggcagcccaggcaaatgtaagaataggcgatgtggttctcagcattgatggaataaatgcacaaggaatgactcatcttgaagcccagaataagattaagggttgtacaggctctttgaatatgactctgcaaagagcatctgctgcacccaagcctgagccggttcctgttcaaaagcccacagtcaccagcgtgtgttccgagacttctcaggagctagcagagggacagagaagaggatcccagggtgacagtaaacagcaaaatggcccaccaagaaaacacattgtggagcgctatacagagttttatcatgtacccactcacagtgatgccagcaagaagagactgattgaggatactgaagactggcgtccaaggactggaacaactcagtctcgctctttccgaatccttgcccagatcactgggactgaacatttgaaagaatctgaagccgataatacaaagaaggcaaataactctcaggagccttctccgcagttggcttcctcggtagcttccacacggagcatgcccgagagcctggacagcccaacctctggcagaccaggggttaccagcctcacagctgcagctgccttcaagcctgtaggatccactggcgtcatcaagtcaccaagctggcaacggccaaaccaaggagtaccttccactggaagaatctcaaacagcgctacttactcaggatcagtggcaccagccaactcagctttgggacaaacccagccaagtgaccaggacactttagtgcaaagagctgagcacattccagcagggaaacgaactccgatgtgcgcccattgtaaccaggtcatcagaggaccattcttagtggcactggggaaatcttggcacccagaagaattcaactgcgctcactgcaaaaatacaatggcctacattggatttgtagaggagaaaggagccctgtattgtgagctgtgctatgagaaattctttgcccctgaatgtggtcgatgccaaaggaagatccttggagaagtcatcagtgcgttgaaacaaacttggcatgtttcctgttttgtgtgtgtagcctgtggaaagcccattcggaacaatgtttttcacttggaggatggtgaaccctactgtgagactgattattatgccctctttggtactatatgccatggatgtgaatttcccatagaagctggtgacatgttcctggaagctctgggctacacctggcatgacacttgctttgtatgctcagtgtgttgtgaaagtttggaaggtcagacctttttctccaagaaggacaagcccctgtgtaagaaacatgctcattctgtgaatttttga

SEQ ID NO: 476 - DNA, 519 bp, Homo sapiens
atggcggacagcgccagcgagagcgacacggacggggcggggggcaacagcagcagctcggccgccatgcagtcgtcctgctcgtcgacctcgggcggcggcggtggcggcgggggaggcggcggcggtgggaagtcggggggcattgtcatctcgccgttccgcctggaggagctcaccaaccgcctggcctcgctgcagcaagagaacaaggtgctgaagatagagctggagacctacaaactgaagtgcaaggcactgcaggaggagaaccgcgacctgcgcaaagccagcgtgaccatccaagccagggctgagcaggaagaagaattcattagtaacactttattcaagaaaattcaggctttgcagaaggagaaagaaacccttgctgtaaattatgagaaagaagaagaattcctcactaatgagctctccagaaaattgatgcagggagaaggttttaaggtgaaaacgaagaaagaaatccggcatgtggaaaagaagagccactcgtaa

SEQ ID NO: 477 - DNA, 1707 bp, Homo sapiens
atggcggacagcgccagcgagagcgacacggacggggcggggggcaacagcagcagctcggccgccatgcagtcgtcctgctcgtcgacctcgggcggcggcggtggcggcgggggaggcggcggcggtgggaagtcggggggcattgtcatctcgccgttccgcctggaggagctcaccaaccgcctggcctcgctgcagcaagagaacaaggtgctgaagatagagctggagacctacaaactgaagtgcaaggcactgcaggaggagaaccgcgacctgcgcaaagccagcgtgaccatcattagagacaccagccaagagccctgtggtcgtctgtcttttctgaaagaaccaaagacaacaaaaggactgcctcaaacagcggtttgcaacttaaatatcactctgccagcacataaaaagattgagaaaacagatagacgacagagcttcgcatccttagctttacgtaagcgctacagctacttgactgagcctggaatgagtccacagagtccatgtgaacggacagatatcaggatggcaatagtagccgatcacctgggacttagttggacagaactggcaagggaactgaatttttcagtggatgaaatcaatcaaatacgtgtggaaaatccaaattctttaatttctcagagcttcatgttattaaaaaaatgggttaccagagacggaaaaaatgccacaactgatgccttaacttcggtcttgacaaaaattaatcgaatagatatagtgacactgctagaaggaccaatatttgattatggaaatatttcaggcaccagaagttttgcagatgagaacaatgttttccatgaccctgttgatggttatccttcccttcaagtggaactggaaacccccacagggttgcactacacaccacctacccctttccagcaagatgattattttagtgatatctctagcatagaatctccccttagaacccctagtagactgagtgatgggctagtgccttcccaggggaacatagagcattccgcagatggacctccagtcgtaactgcagaagacgcttccttagaagacagcaaactggaagactcagtgcctttaacagaaatgcctgaagcagtggatgtagatgagagccagttggagaatgtatgtctgagttggcagaatgagacatcaagtggaaacctagagtcctgcgctcaagctcgaagagtaactggtgggttactagatcgactggatgacagccctgaccagtgtagagattccattacctcatatctcaaaggagaagctggcaaatttgaagcaaatggaagccatacagaaatcactccagaagcaaagacaaaatcttactttccagaatcccaaaatgatgtaggaaaacagagtaccaaggaaactctgaaaccaaaaatacatggatctggtcatgttgaagaaccagcatcaccactagcagcatatcagaaatctctagaagaaaccagcaagcttataatagaagagactaaaccctgtgtgcctgtcagtatgaaaaagatgagtaggacttctccagcagatggcaagccaaggcttagcctccatgaagaagaggggtccagtgggtctgagcaaaagcagggagaaggttttaaggtgaaaacgaagaaagaaatccggcatgtggaaaagaagagccactcgtaa

SEQ ID NO: 478 - DNA, 1974 bp, Homo sapiens
atggcggacagcgccagcgagagcgacacggacggggcggggggcaacagcagcagctcggccgccatgcagtcgtcctgctcgtcgacctcgggcggcggcggtggcggcgggggaggcggcggcggtgggaagtcggggggcattgtcatctcgccgttccgcctggaggagctcaccaaccgcctggcctcgctgcagcaagagaacaaggtgctgaagatagagctggagacctacaaactgaagtgcaaggcactgcaggaggagaaccgcgacctgcgcaaagccagcgtgaccatccaagccagggctgagcaggaagaagaattcattagtaacactttattcaagaaaattcaggctttgcagaaggagaaagaaacccttgctgtaaattatgagaaagaagaagaattcctcactaatgagctctccagaaaattgatgcagttgcagcatgagaaagccgaactagaacagcatcttgaacaagagcaggaatttcaggtcaacaaactgatgaagaaaattaaaaaactggagaatgacaccatttctaagcaacttacattagaacagttgagacgggagaagattgaccttgaaaatacattggaacaagaacaagaagcactagttaatcgcctctggaaaaggatggataagcttgaagctgaaaagcgaatcctgcaggaaaaattagaccagcccgtctctgctccaccatcgcctagagatatctccatggagattgattctccagaaaatatgatgcgtcacatcaggtttttaaagaatgaagtggaacggctgaagaagcaactgagagctgctcagttacagcattcagagaaaatggcacagtatctggaggaggaacgtcacatgagagaagagaacttgaggctccagaggaagctgcagagggagatggagagaagagaagccctctgtcgacagctctccgagagtgagtccagcttagaaatggacgacgaaaggtattttaatgagatgtctgcacaaggattaagacctcgcactgtgtccagcccgatcccttacacaccttctccgagttcaagcaggcctatatcacctgaacttgatagcccagaagagttagggaaaaagcgtatctgcaggattatcacgaaagatttcccccagtattttgcagtggtttcccggattaagcaggaaagcaaccagattggtcctgaaggtggaattctgagcagcaccacagtgccccttgttcaagcatctttcccagagggtgccctaactaaaagaattcgagtgggcctccaggcccagcctgttccagatgaaattgtgaaaaagatccttggaaacaaagcaacttttagcccaattgtcactgtggaaccaagaagacggaaattccataaaccaatcacaatgaccattccggtgcccccgccctcaggagaaggtgtatccaatggatacaaaggggacactacacccaatctgcgtcttctctgtagcattacagggggcacttcgcctgctcagtgggaagacatcacaggaacaactcctttgacgtttataaaagattgtgtctcctttacaaccaatgtttcagccagattttggcttgcagactgccatcaagttttagaaactgtggggttagccacgcaactgtacagagaattgatatgtgttccatatatggccaagtttgttgtttttgccaaaatgaatgatcccgtagaatcttccttgcgatgtttctgcatgacagatgacaaagtggacaaaactttagagcaacaagagaattttgaggaagtcgcaagaagcaaagatattgaggtaccttgttcacaaaaacaagttcatttcattacgtactccagatatgaggttttattttgtggtcttaatagcactcactataaaataccaagtgcattattgattttacttttactttaa

SEQ ID NO: 479 - DNA, 9237 bp, Homo sapiens
atggcggacagcgccagcgagagcgacacggacggggcggggggcaacagcagcagctcggccgccatgcagtcgtcctgctcgtcgacctcgggcggcggcggtggcggcgggggaggcggcggcggtgggaagtcggggggcattgtcatctcgccgttccgcctggaggagctcaccaaccgcctggcctcgctgcagcaagagaacaaggtgctgaagatagagctggagacctacaaactgaagtgcaaggcactgcaggaggagaaccgcgacctgcgcaaagccagcgtgaccatcattagagacaccagccaagagccctgtggtcgtctgtcttttctgaaagaaccaaagacaacaaaaggactgcctcaaacagcggtttgcaacttaaatatcactctgccagcacataaaaaggagacagagtcagatcaagatgatgagattgagaaaacagatagacgacagagcttcgcatccttagctttacgtaagcgctacagctacttgactgagcctggaatgattgaacggagtacaggagcaacaagatccctccccaccacttactcatacaagccattcttttctacaagaccataccagtcctggacaacagctccgattacagtgcctgggccagccaagtcaggcttcacttccttatcaagttcttcctctaatacgccatcagcttctccgttaaaatcaatatggtctgtttcgacaccttctccaatcaaatccacattaggcgcgtcaactacatcttcagttaaatccattagtgacgtggcatctccaattagatcctttcggacaatgtcttcgccgataaaaactgtggtgtcacaatctccatacaatatccaagtttcctctggtaccctggctagagctccagcagtcacggaagctacgcccttaaaagggctggcatccaattctacgttttcctctcgaacctctccagtgactacagcagggtctcttttggagaggtcatcaattactatgacaccccctgcctcccccaaatcaaacattaatatgtattcctcaagtttgccatttaagtcaattattacatcagcagcaccgctaatatcttcacctttaaagtcagtggtgtctccagttaaatcagcagttgatgtcatttcatcagccaaaattacaatggcatcttctctctcatcacctgtgaagcagatgcctggacatgcagaggtagcattagtcaatggatctatttcccctctaaaatatccatcatcctcaactttaattaatggatgcaaagccactgccacgttacaggaaaaaatttcttctgctacaaactctgtgagctctgtggtcagtgcagccactgacacagttgagaaagtgttttctaccacgactgcaatgccattttccccactcaggtcatatgtttctgcagcaccatcagcttttcagtctctaagaactccttccgcaagtgcactctatacatcccttgggtcgtcaatatctgcaactacctcatctgtaacttcatcaattataacagtgccagtatactctgtagtcaatgttttgccagaaccagcattaaagaaacttccagactctaattcatttacaaaatcagcagcagccttgctgtcacccattaaaacattgactacggagacacatcctcagcctcacttcagtcgaacttcatctccagttaagtcatctttgttccttgcaccctctgcccttaagttgtctacaccatcttctttatcttccagtcaggagatactaaaagatgtagctgaaatgaaagaggacctaatgcggatgaccgcaatactacagacagatgtgcctgaggagaagccattccaacctgaactcccaaaggaagggagaatagatgatgaagaacctttcaaaattgtagagaaagtaaaggaagacttagtgaaagttagtgaaatccttaaaaaggatgtatgtgtagataataaaggatcacccaaatcaccaaagagtgacaaaggacactctcctgaagatgactggatagaatttagttcggaagaaatccgggaagccagacaacaagctgctgcgagccagtctccatctctgccagagagagtgcaagtaaaagcaaaagccgcctccgaaaaggattataacttgaccaaagttattgattacctaacaaatgatattgggagtagttcactgacaaacttaaaatacaagtttgaggatgcaaagaaggatggtgaggagagacagaaaagagttttaaaaccagcaattgctttgcaggaacacaaactcaaaatgcctccagcctccatgaggacttccacctctgagaaagaattgtgtaaaatggctgattccttttttggaacagatactattttagagtctcctgatgacttttctcaacacgaccaagataaaagtcccttgtctgacagtggctttgaaacaagaagtgaaaagacaccttcagccccacaaagcgctgaaagcactggtcctaaaccactttttcatgaagttcccatccctcctgtcattacagaaacaagaactgaagtggttcatgttatcaggagctatgatccctcagctggggatgttccccagacccaaccagaggagcctgtgtcacctaaaccttcacctacttttatggaattggaaccaaagcccaccacctctagtattaaagaaaaggttaaagcatttcaaatgaaagccagtagtgaagaagatgaccacaatcgggttttaagcaaaggcatgcgtgttaaagaagagactcacataaccacaaccaccagaatggtttatcattctccaccaggcggtgaaggtgcatctgaaagaattgaagaaaccatgtcagtccatgacatcatgaaggcctttcagtccgggcgggatccttccaaagaactggcaggtctgtttgaacataagtcggcagtgtctccagatgttcacaagtctgctgctgaaacctcagcccagcatgcagagaaggacaaccaaatgaaacccaaactggagcgtataatagaagtccacatcgaaaaaggtaaccaagctgagcccactgaagtcattattagagaaaccaaaaagcatccagaaaaagaaatgtatgtatatcagaaagacttatcccggggagatattaacctaaaagattttctgccagaaaaacacgatgcttttccttgttcagaggaacagggtcagcaagaagaagaagaacttactgctgaagagtcattgccttcttatctggagtcttccagagtaaacactcctgtgtcccaagaagaagatagccgccctagttctgctcaactcatatctgatgactcttataaaacattgaagcttttgagtcaacactcaatagaataccatgacgatgagttgtcagaactaagaggggagtcttacaggtttgctgagaaaatgcttctgtcagaaaagctagatgtgtctcattctgatactgaggaatcggttacagaccatgcaggaccccctagctcagagttacaggggtctgataagcggtccagagaaaaaatagccactgcccccaaaaaagaaattctctccaaaatctataaagatgtttctgaaaatggtgtaggtaaagtgtctaaagatgagcattttgataaagtgacagtgttgcactattctggcaatgttagtagtccaaaacatgccatgtggatgcgctttactgaggacagattagacagaggtagagagaagttgatatatgaagatagggtggacaggactgtgaaggaggctgaagaaaaactgactgaagtgtcacagttttttcgtgacaaaactgaaaagctaaatgatgaactgcagtccccagagaaaaaggcacgccctaaaaatggcaaagaatattcttctcaaagccctaccagtagcagccctgagaaagtgctactgacagaactgctggcatccaatgatgagtgggttaaggcaagacagcatggccctgatggacaaggcttccccaaggccgaggagaaggcacccagtctgcccagcagcccagagaagatggttctctcccaacagactgaggacagcaagtccacagtggaagccaaaggaagtatttcacagagcaaagcaccagatgggccccagtctggattccagctcaaacaatctaaactcagttccattagattaaaatttgaacaaggcacacacgcaaaaagtaaggacatgtctcaagaagacagaaagtcagatggccagtccagaatcccagttaaaaaaatacaggagagcaagctacccgtctaccaagtttttgctagagaaaaacagcagaaggccatagacctcccagatgaaagtgtatctgtgcaaaaagattttatggtattaaaaaccaaagatgagcatgcccaaagcaacgaaattgttgtaaatgattctggctctgataatgtgaaaaaacagagaactgaaatgtcaagtaaagcaatgcctgactctttttctgagcagcaggctaaagacttggcatgtcatataacctcagatttagcaactaggggaccatgggacaaaaaggtctttagaacatgggagagttcgggagccactaacaataagtctcagaaagaaaaactttcgcatgtacttgttcatgatgtaagagagaatcacattggtcaccctgagagtaaaagtgttgatcaaaagaatgaatttatgtctgtgactgagagagaacgcaaattgttaacaaacggctctctctcagaaattaaagaaatgactgtaaaatctccctccaaaaaagtcttatatagggaatatgttgtgaaagaaggggaccatccaggcggattgcttgatcagccttccaggaggagcgagagctcagcagtgtcacacattcccgtcagagttgctgatgagaggagaatgctgtcttctaatattcccgatggtttttgtgaacagtcggcatttccaaaacatgaactatcacaaaaattgtcccagtcaagcatgagtaaagagacagttgagacacagcactttaattctatagaagatgaaaaagttacctattcagaaatcagcaaagtttccaaacaccagagttatgtaggtttatgcccacctctcgaggaaaccgaaacctcccccaccaaatctcctgattctttagagtttagcccaggaaaggaatctccctctagtgatgtattcgaccacagtcccattgatggattggaaaaactcgcaccactagcccagacagagggagggaaagagataaaaactttacccgtttatgtcagttttgtacaagtggggaagcaatatgaaaaggagatacaacaaggaggtgtaaaaaaaatcataagtcaggaatgtaagacagtacaagaaaccagggggaccttttatacaactagacagcaaaagcaacctccttctccccaaggtagtccagaagatgatactctagagcaagtatcctttctagacagctctgggaaaagccctttaaccccagaaacacccagttcagaggaagtgagttatgaatttacatctaagacacctgactcgctcatagcttatataccaggcaaacccagcccaattcccgaggtttctgaggagtcagaggaggaggaacaggccaagtcaacctcccttaagcagactacagtggaggaaacagcagttgagcgtgaaatgcctaatgacgtgagcaaagactctaaccaaagacccaaaaataacagagttgcctatattgaatttccccctcctccaccactggatgcggaccagattgagtcagataagaagcatcattatctcccagaaaaagaggttgacatgattgaagtcaatctgcaagatgagcatgacaagtaccagctggctgaacctgtcattagagtgcagccaccttcaccagttcctcccggggcagacgtcagtgattcaagcgatgacgaatctatttatcagccagtcccagttaaaaaatataccttcaaattaaaggaagtggacgatgaacaaaaagaaaaacccaaagcttctgctgaaaaggcttccaaccagaaagaactggaaagtaatggatctggaaaagataatgaatttggccttggccttgattcacctcagaatgaaattgcccagaatgggaacaacgaccagtccatcacagagtgttccattgccaccacagcagagttttctcatgacacggatgccacagagatcgactctctggatggctatgacctgcaagatgaagatgatggcttgacagagagtgattctaaactcccaattcaagccatggaaattaagaaagatatctggaacacagagggcattctgaagccagctgaccgctcttttagccaaagtaaacttgaagttatcgaggaggagggaaaggtgggaccagatgaggacaagccaccttctaaaagttcttcatctgaaaagactcctgataagactgatcagaagtcaggggcccagttcttcacactggaaggcagacatcctgacagatcagtgtttcctgatacttacttcagttacaaagtagatgaagaatttgccactccttttaaaacagtagctaccaaaggtctagattttgacccttggtctaataaccgaggggatgatgaagtttttgacagtaaatcacgggaagatgaaactaagccatttgggctggcggtagaagaccgctctccagcaacaacccctgatacaacgccagccagaacgccaactgatgaaagtaccccaactagtgagcctaaccccttcccatttcatgaaggaaaaatgtttgagatgactcgcagtggtgcaattgacatgagcaagagggattttgttgaagagaggctccaatttttccagattggtgagcatacttctgaagggaagtcaggggaccagggggaaggggataaaagtatggtcactgccacaccacagccacagtcaggggacaccactgtagaaaccaatctagagagaaatgtagagacacctacagtggaacctaaccccagcatcccgaccagcggagagtgtcaggaaggcacatccagtagtggctccctggagaaatcagcagcagccactaacacctctaaagttgaccccaagttgcgcacgcctataaaaatgggaatttctgcatccaccatgaccatgaagaaagaaggccctggagaaataacagataagatagaagcggtgatgaccagttgtcagggattagaaaatgaaactataacaatgatttcaaatacagccaatagccagatgggcgttaggccccatgaaaaacatgattttcaaaaagataactttaataacaacaacaatttggattcttccactatacagacagataacattatgagtaatatagttctgacagaacattctgcacccacttgtaccacagagaaagataacccagtgaaagtctcatcaggaaaaaagacaggggtactacaaggacactgtgtaagagataagcagaaagttcttggagaacagcaaaaaacaaaggaattgatagggattaggcaaaaatccaaacttcccataaaggccacttcaccaaaagataccttcccaccgaaccatatgtcaaacactaaagcaagtaaaatgaagcaggttagtcaatccgagaaaaccaaagcccttactacttcttcatgtgtagatgtaaagtccagaattccagtgaaaaacacacacagggataacataattgcagttagaaaagcatgtgccacacaaaagcaagggcagccagagaaaggcaaggccaaacagcttccatccaagttgccagtaaaggtaagatccacctgtgtcactaccaccaccaccactgccaccaccaccaccactaccaccactaccaccaccaccagctgcacagttaaagttaggaaaagtcagctcaaggaagtatgtaaacattccattgaatattttaagggaattagtggtgagaccttaaagcttgtggaccgcctctctgaagaagaaaaaaagatgcagtccgagttgtccgatgaggaagaaagtacctcaagaaacacgtcgttgtccgagacttcccggggtggccagccttcggttacaacgaagtctgctagagataagaaaacagaggcagcacctttaaaatcaaagagtgaaaaggccggcagtgagaaaaggagcagtagaaggactggtccacagagtccatgtgaacggacagatatcaggatggcaatagtagccgatcacctgggacttagttggacagaactggcaagggaactgaatttttcagtggatgaaatcaatcaaatacgtgtggaaaatccaaattctttaatttctcagagcttcatgttattaaaaaaatgggttaccagagacggaaaaaatgccacaactgatgccttaacttcggtcttgacaaaaattaatcgaatagatatagtgacactgctagaaggaccaatatttgattatggaaatatttcaggcaccagaagttttgcagatgagaacaatgttttccatgaccctgttgatggttggcagaatgagacatcaagtggaaacctagagtcctgcgctcaagctcgaagagtaactggtgggttactagatcgactggatgacagccctgaccagtgtagagattccattacctcatatctcaaaggagaagctggcaaatttgaagcaaatggaagccatacagaaatcactccagaagcaaagacaaaatcttactttccagaatcccaaaatgatgtaggaaaacagagtaccaaggaaactctgaaaccaaaaatacatggatctggtcatgttgaagaaccagcatcaccactagcagcatatcagaaatctctagaagaaaccagcaagcttataatagaagagactaaaccctgtgtgcctgtcagtatgaaaaagatgagtaggacttctccagcagatggcaagccaaggcttagcctccatgaagaagaggggtccagtgggtctgagcaaaagcagggagaaggttttaaggtgaaaacgaagaaagaaatccggcatgtggaaaagaagagccactcgtaa

SEQ ID NO: 480 - DNA, 5943 bp, Homo sapiens
atggcggacagcgccagcgagagcgacacggacggggcggggggcaacagcagcagctcggccgccatgcagtcgtcctgctcgtcgacctcgggcggcggcggtggcggcgggggaggcggcggcggtgggaagtcggggggcattgtcatctcgccgttccgcctggaggagctcaccaaccgcctggcctcgctgcagcaagagaacaaggtgctgaagatagagctggagacctacaaactgaagtgcaaggcactgcaggaggagaaccgcgacctgcgcaaagccagcgtgaccatccaagccagggctgagcaggaagaagaattcattagtaacactttattcaagaaaattcaggctttgcagaaggagaaagaaacccttgctgtaaattatgagaaagaagaagaattcctcactaatgagctctccagaaaattgatgcagtctgatgccaatgcaagttacttaagagcagctcgagctggacaccttgaaaaggccctcgactacataaaaaatggagttgacatcaacatttgcaatcagaatgggttgaacgctctccaccttgcttccaaagaaggccatgtagaggttgtttctgagctgctgcagagagaagccaatgtggatgcagctacaaagaaaggaaacacagcattgcacatcgcatctttggctgggcaagcagaggtggtaaaagtcttggttacaaatggagccaatgtcaatgcacaatctcagaatggtttcacgccattgtatatggcagcccaggaaaatcacctggaagttgtcaagtttcttcttgacaatggtgcaagccagagcctagccacagaggatggcttcacaccattggcagtggctttgcaacaaggtcacgaccaagtcgtttcgctcctgctagagaatgacaccaaaggaaaagtgcgtctcccagctcttcatatcgcggcccgaaaagacgacacgaaagccgccgccctgctgctgcagaatgacaacaatgcagatgtggaatcaaagagtggcttcactccgctccacatagctgctcactatggaaatatcaatgtagccacgttgctgttaaaccgagcggctgctgtggatttcaccgcaaggaatgacatcactcctttacatgttgcatcaaaaagaggaaatgcaaatatggtaaaactattgctcgatcgaggagctaaaatcgatgccaaaaccagggatggtctgacaccactgcactgtggagcaaggagtggccacgagcaggtggtagaaatgttgcttgatcgagctgcccccattctttcaaaaaccaagaatggattatctccattgcacatggccacacaaggggatcatttaaactgcgtccagcttctcctccagcataatgtacccgtggatgatgtcaccaatgactacctgactgccctacacgtggctgcccactgtggccattacaaagttgccaaggttctcttggataagaaagctaaccccaatgccaaagccctgaatggctttacccctcttcatattgcctgcaagaagaatcgaattaaagtaatggaactccttctgaaacacggtgcatccatccaagctgtaaccgagtcgggccttaccccaatccatgttgctgccttcatggggcatgtaaatattgtatcacaactaatgcatcatggagcctcaccaaacaccaccaatgtgagaggagaaacagcactgcacatggcagctcgctccggccaagctgaagttgtgcggtatctggtacaagacggagctcaggtagaagctaaagctaaggatgaccaaacaccactccacatttcagcccgactggggaaagcagacatagtacaacagctgttgcagcaaggggcatctccaaatgcagccacaacttctgggtacaccccacttcacctttccgcccgagaggggcatgaggatgtggccgcgttccttttggatcatggagcgtctttatctataacaacaaagaaaggatttactcctcttcatgtggcagcaaaatatggaaagcttgaagtcgccaatctcctgctacagaaaagtgcatctccagatgctgctgggaagagcgggctaacaccactgcatgtagctgcacattacgataatcagaaagtggcccttctgcttttggaccaaggagcctcacctcacgcagccgcaaagaatggttatacgccactgcacatcgctgccaaaaagaaccagatggacatagcgacaactctgctggaatatggtgctgatgccaacgcagttacccggcaaggaattgcttccgtccatctcgcagctcaggaagggcacgtggacatggtgtcgctgctcctcggtagaaatgcgaatgtgaacctgagcaataagagcggcctgaccccactccatttggctgctcaagaagatcgagtgaatgtggcagaagtcctcgtaaaccaaggggctcatgtggacgcccagacaaagatgggatacacaccactgcatgtgggctgccactatggaaatatcaagattgttaatttcctgctccagcattctgcaaaagttaatgccaaaacaaagaatgggtatacgccattacatcaagcagcacagcaggggcatacgcatataataaatgtcttacttcagaacaacgcctcccccaatgaactcactgtgaatgggaatactgcccttggcattgcccggcgcctcggctacatctcagtagtggacaccctgaagatagtgaccgaagagaccatgaccacaactactgtcacagagaagcacaaaatgaatgttccagaaacgatgaatgaagttcttgatatgtctgatgatgaagttcgtaaagccaatgcccctgaaatgctcagtgatggcgaatatatctcagatgttgaagaaggtgaagatgcaatgaccggggacacagacaaatatcttgggccacaggaccttaaggaattgggtgatgattccctgcctgcagagggttacatgggctttagtctcggagcgcgttctgccagcctccgctccttcagttcggataggtcttacaccttgaacagaagctcctatgcacgggacagcatgatgattgaagaactccttgtgccatccaaagagcagcatctaacattcacaagggaatttgattcagattctcttagacattacagctgggctgcagacaccttagacaatgtcaatcttgtttcaagccccattcattctgggtttctggttagctttatggtggacgcgagagggggctccatgagaggaagccgtcatcacgggatgagaatcatcattcctccacgcaagtgtacggcccccactcgaatcacctgccgtttggtaaagagacataaactggccaacccaccccccatggtggaaggagagggattagccagtaggctggtagaaatgggtcctgcaggggcacaatttttaggccctgtcatagtggaaatccctcactttgggtccatgagaggaaaagagagagaactcattgttcttcgaagtgaaaatggtgaaacttggaaggagcatcagtttgacagcaaaaatgaagatttaaccgagttacttaatggcatggatgaagaacttgatagcccagaagagttagggaaaaagcgtatctgcaggattatcacgaaagatttcccccagtattttgcagtggtttcccggattaagcaggaaagcaaccagattggtcctgaaggtggaattctgagcagcaccacagtgccccttgttcaagcatctttcccagagggtgccctaactaaaagaattcgagtgggcctccaggcccagcctgttccagatgaaattgtgaaaaagatccttggaaacaaagcaacttttagcccaattgtcactgtggaaccaagaagacggaaattccataaaccaatcacaatgaccattccggtgcccccgccctcaggagaaggtgtatccaatggatacaaaggggacactacacccaatctgcgtcttctctgtagcattacagggggcacttcgcctgctcagtgggaagacatcacaggaacaactcctttgacgtttataaaagattgtgtctcctttacaaccaatgtttcagccagattttggcttgcagactgccatcaagttttagaaactgtggggttagccacgcaactgtacagagaattgatatgtgttccatatatggccaagtttgttgtttttgccaaaatgaatgatcccgtagaatcttccttgcgatgtttctgcatgacagatgacaaagtggacaaaactttagagcaacaagagaattttgaggaagtcgcaagaagcaaagatattgaggttctggaaggaaaacctatttatgttgattgttatggaaatttggccccacttaccaaaggaggacagcaacttgtttttaacttttattctttcaaagaaaatagactgccattttccatcaagattagagacaccagccaagagccctgtggtcgtctgtcttttctgaaagaaccaaagacaacaaaaggactgcctcaaacagcggtttgcaacttaaatatcactctgccagcacataaaaagattgagaaaacagatagacgacagagcttcgcatccttagctttacgtaagcgctacagctacttgactgagcctggaatgagtccacagagtccatgtgaacggacagatatcaggatggcaatagtagccgatcacctgggacttagttggacagaactggcaagggaactgaatttttcagtggatgaaatcaatcaaatacgtgtggaaaatccaaattctttaatttctcagagcttcatgttattaaaaaaatgggttaccagagacggaaaaaatgccacaactgatgccttaacttcggtcttgacaaaaattaatcgaatagatatagtgacactgctagaaggaccaatatttgattatggaaatatttcaggcaccagaagttttgcagatgagaacaatgttttccatgaccctgttgatggttatccttcccttcaagtggaactggaaacccccacagggttgcactacacaccacctacccctttccagcaagatgattattttagtgatatctctagcatagaatctccccttagaacccctagtagactgagtgatgggctagtgccttcccaggggaacatagagcattccgcagatggacctccagtcgtaactgcagaagacgcttccttagaagacagcaaactggaagactcagtgcctttaacagaaatgcctgaagcagtggatgtagatgagagccagttggagaatgtatgtctgagttggcagaatgagacatcaagtggaaacctagagtcctgcgctcaagctcgaagagtaactggtgggttactagatcgactggatgacagccctgaccagtgtagagattccattacctcatatctcaaaggagaagctggcaaatttgaagcaaatggaagccatacagaaatcactccagaagcaaagacaaaatcttactttccagaatcccaaaatgatgtaggaaaacagagtaccaaggaaactctgaaaccaaaaatacatggatctggtcatgttgaagaaccagcatcaccactagcagcatatcagaaatctctagaagaaaccagcaagcttataatagaagagactaaaccctgtgtgcctgtcagtatgaaaaagatgagtaggacttctccagcagatggcaagccaaggcttagcctccatgaagaagaggggtccagtgggtctgagcaaaagcagggagaaggttttaaggtgaaaacgaagaaagaaatccggcatgtggaaaagaagagccactcgtaa

SEQ ID NO: 481 - DNA, 5997 bp, Homo sapiens
atggcggacagcgccagcgagagcgacacggacggggcggggggcaacagcagcagctcggccgccatgcagtcgtcctgctcgtcgacctcgggcggcggcggtggcggcgggggaggcggcggcggtgggaagtcggggggcattgtcatctcgccgttccgcctggaggagctcaccaaccgcctggcctcgctgcagcaagagaacaaggtgctgaagatagagctggagacctacaaactgaagtgcaaggcactgcaggaggagaaccgcgacctgcgcaaagccagcgtgaccatccaagccagggctgagcaggaagaagaattcattagtaacactttattcaagaaaattcaggctttgcagaaggagaaagaaacccttgctgtaaattatgagaaagaagaagaattcctcactaatgagctctccagaaaattgatgcagtctgatgccaatgcaagttacttaagagcagctcgagctggacaccttgaaaaggccctcgactacataaaaaatggagttgacatcaacatttgcaatcagaatgggttgaacgctctccaccttgcttccaaagaaggccatgtagaggttgtttctgagctgctgcagagagaagccaatgtggatgcagctacaaagaaaggaaacacagcattgcacatcgcatctttggctgggcaagcagaggtggtaaaagtcttggttacaaatggagccaatgtcaatgcacaatctcagaatggtttcacgccattgtatatggcagcccaggaaaatcacctggaagttgtcaagtttcttcttgacaatggtgcaagccagagcctagccacagaggatggcttcacaccattggcagtggctttgcaacaaggtcacgaccaagtcgtttcgctcctgctagagaatgacaccaaaggaaaagtgcgtctcccagctcttcatatcgcggcccgaaaagacgacacgaaagccgccgccctgctgctgcagaatgacaacaatgcagatgtggaatcaaagagtggcttcactccgctccacatagctgctcactatggaaatatcaatgtagccacgttgctgttaaaccgagcggctgctgtggatttcaccgcaaggaatgacatcactcctttacatgttgcatcaaaaagaggaaatgcaaatatggtaaaactattgctcgatcgaggagctaaaatcgatgccaaaaccagggatggtctgacaccactgcactgtggagcaaggagtggccacgagcaggtggtagaaatgttgcttgatcgagctgcccccattctttcaaaaaccaagaatggattatctccattgcacatggccacacaaggggatcatttaaactgcgtccagcttctcctccagcataatgtacccgtggatgatgtcaccaatgactacctgactgccctacacgtggctgcccactgtggccattacaaagttgccaaggttctcttggataagaaagctaaccccaatgccaaagccctgaatggctttacccctcttcatattgcctgcaagaagaatcgaattaaagtaatggaactccttctgaaacacggtgcatccatccaagctgtaaccgagtcgggccttaccccaatccatgttgctgccttcatggggcatgtaaatattgtatcacaactaatgcatcatggagcctcaccaaacaccaccaatgtgagaggagaaacagcactgcacatggcagctcgctccggccaagctgaagttgtgcggtatctggtacaagacggagctcaggtagaagctaaagctaaggatgaccaaacaccactccacatttcagcccgactggggaaagcagacatagtacaacagctgttgcagcaaggggcatctccaaatgcagccacaacttctgggtacaccccacttcacctttccgcccgagaggggcatgaggatgtggccgcgttccttttggatcatggagcgtctttatctataacaacaaagaaaggatttactcctcttcatgtggcagcaaaatatggaaagcttgaagtcgccaatctcctgctacagaaaagtgcatctccagatgctgctgggaagagcgggctaacaccactgcatgtagctgcacattacgataatcagaaagtggcccttctgcttttggaccaaggagcctcacctcacgcagccgcaaagaatggttatacgccactgcacatcgctgccaaaaagaaccagatggacatagcgacaactctgctggaatatggtgctgatgccaacgcagttacccggcaaggaattgcttccgtccatctcgcagctcaggaagggcacgtggacatggtgtcgctgctcctcggtagaaatgcgaatgtgaacctgagcaataagagcggcctgaccccactccatttggctgctcaagaagatcgagtgaatgtggcagaagtcctcgtaaaccaaggggctcatgtggacgcccagacaaagatgggatacacaccactgcatgtgggctgccactatggaaatatcaagattgttaatttcctgctccagcattctgcaaaagttaatgccaaaacaaagaatgggtatacgccattacatcaagcagcacagcaggggcatacgcatataataaatgtcttacttcagaacaacgcctcccccaatgaactcactgtgaatgggaatactgcccttggcattgcccggcgcctcggctacatctcagtagtggacaccctgaagatagtgaccgaagagaccatgaccacaactactgtcacagagaagcacaaaatgaatgttccagaaacgatgaatgaagttcttgatatgtctgatgatgaagttcgtaaagccaatgcccctgaaatgctcagtgatggcgaatatatctcagatgttgaagaaggtaatagatgcacatggtacaaaattcccaaggtacaagagtttacggtgaaaagtgaagatgcaatgaccggggacacagacaaatatcttgggccacaggaccttaaggaattgggtgatgattccctgcctgcagagggttacatgggctttagtctcggagcgcgttctgccagcctccgctccttcagttcggataggtcttacaccttgaacagaagctcctatgcacgggacagcatgatgattgaagaactccttgtgccatccaaagagcagcatctaacattcacaagggaatttgattcagattctcttagacattacagctgggctgcagacaccttagacaatgtcaatcttgtttcaagccccattcattctgggtttctggttagctttatggtggacgcgagagggggctccatgagaggaagccgtcatcacgggatgagaatcatcattcctccacgcaagtgtacggcccccactcgaatcacctgccgtttggtaaagagacataaactggccaacccaccccccatggtggaaggagagggattagccagtaggctggtagaaatgggtcctgcaggggcacaatttttaggccctgtcatagtggaaatccctcactttgggtccatgagaggaaaagagagagaactcattgttcttcgaagtgaaaatggtgaaacttggaaggagcatcagtttgacagcaaaaatgaagatttaaccgagttacttaatggcatggatgaagaacttgatagcccagaagagttagggaaaaagcgtatctgcaggattatcacgaaagatttcccccagtattttgcagtggtttcccggattaagcaggaaagcaaccagattggtcctgaaggtggaattctgagcagcaccacagtgccccttgttcaagcatctttcccagagggtgccctaactaaaagaattcgagtgggcctccaggcccagcctgttccagatgaaattgtgaaaaagatccttggaaacaaagcaacttttagcccaattgtcactgtggaaccaagaagacggaaattccataaaccaatcacaatgaccattccggtgcccccgccctcaggagaaggtgtatccaatggatacaaaggggacactacacccaatctgcgtcttctctgtagcattacagggggcacttcgcctgctcagtgggaagacatcacaggaacaactcctttgacgtttataaaagattgtgtctcctttacaaccaatgtttcagccagattttggcttgcagactgccatcaagttttagaaactgtggggttagccacgcaactgtacagagaattgatatgtgttccatatatggccaagtttgttgtttttgccaaaatgaatgatcccgtagaatcttccttgcgatgtttctgcatgacagatgacaaagtggacaaaactttagagcaacaagagaattttgaggaagtcgcaagaagcaaagatattgaggttctggaaggaaaacctatttatgttgattgttatggaaatttggccccacttaccaaaggaggacagcaacttgtttttaacttttattctttcaaagaaaatagactgccattttccatcaagattagagacaccagccaagagccctgtggtcgtctgtcttttctgaaagaaccaaagacaacaaaaggactgcctcaaacagcggtttgcaacttaaatatcactctgccagcacataaaaagattgagaaaacagatagacgacagagcttcgcatccttagctttacgtaagcgctacagctacttgactgagcctggaatgagtccacagagtccatgtgaacggacagatatcaggatggcaatagtagccgatcacctgggacttagttggacagaactggcaagggaactgaatttttcagtggatgaaatcaatcaaatacgtgtggaaaatccaaattctttaatttctcagagcttcatgttattaaaaaaatgggttaccagagacggaaaaaatgccacaactgatgccttaacttcggtcttgacaaaaattaatcgaatagatatagtgacactgctagaaggaccaatatttgattatggaaatatttcaggcaccagaagttttgcagatgagaacaatgttttccatgaccctgttgatggttatccttcccttcaagtggaactggaaacccccacagggttgcactacacaccacctacccctttccagcaagatgattattttagtgatatctctagcatagaatctccccttagaacccctagtagactgagtgatgggctagtgccttcccaggggaacatagagcattccgcagatggacctccagtcgtaactgcagaagacgcttccttagaagacagcaaactggaagactcagtgcctttaacagaaatgcctgaagcagtggatgtagatgagagccagttggagaatgtatgtctgagttggcagaatgagacatcaagtggaaacctagagtcctgcgctcaagctcgaagagtaactggtgggttactagatcgactggatgacagccctgaccagtgtagagattccattacctcatatctcaaaggagaagctggcaaatttgaagcaaatggaagccatacagaaatcactccagaagcaaagacaaaatcttactttccagaatcccaaaatgatgtaggaaaacagagtaccaaggaaactctgaaaccaaaaatacatggatctggtcatgttgaagaaccagcatcaccactagcagcatatcagaaatctctagaagaaaccagcaagcttataatagaagagactaaaccctgtgtgcctgtcagtatgaaaaagatgagtaggacttctccagcagatggcaagccaaggcttagcctccatgaagaagaggggtccagtgggtctgagcaaaagcagggagaaggttttaaggtgaaaacgaagaaagaaatccggcatgtggaaaagaagagccactcgtaa

SEQ ID NO: 482 - DNA, 522 bp, Homo sapiens
atggcggacagcgccagcgagagcgacacggacggggcggggggcaacagcagcagctcggccgccatgcagtcgtcctgctcgtcgacctcgggcggcggcggtggcggcgggggaggcggcggcggtgggaagtcggggggcattgtcatctcgccgttccgcctggaggagctcaccaaccgcctggcctcgctgcagcaagagaacaaggtgctgaagatagagctggagacctacaaactgaagtgcaaggcactgcaggaggagaaccgcgacctgcgcaaagccagcgtgaccatccaagccagggctgagcaggaagaagaattcattagtaacactttattcaagaaaattcaggctttgcagaaggagaaagaaacccttgctgtaaattatgagaaagaagaagaattcctcactaatgagctctccagaaaattgatgcagcagggagaaggttttaaggtgaaaacgaagaaagaaatccggcatgtggaaaagaagagccactcgtaa

SEQ ID NO: 483 - DNA, 5982 bp, Homo sapiens
atggcggacagcgccagcgagagcgacacggacggggcggggggcaacagcagcagctcggccgccatgcagtcgtcctgctcgtcgacctcgggcggcggcggtggcggcgggggaggcggcggcggtgggaagtcggggggcattgtcatctcgccgttccgcctggaggagctcaccaaccgcctggcctcgctgcagcaagagaacaaggtgctgaagatagagctggagacctacaaactgaagtgcaaggcactgcaggaggagaaccgcgacctgcgcaaagccagcgtgaccatccaagccagggctgagcaggaagaagaattcattagtaacactttattcaagaaaattcaggctttgcagaaggagaaagaaacccttgctgtaaattatgagaaagaagaagaattcctcactaatgagctctccagaaaattgatgcagggtggctttggatcagattattcacgaagctctagaaagtctgatgccaatgcaagttacttaagagcagctcgagctggacaccttgaaaaggccctcgactacataaaaaatggagttgacatcaacatttgcaatcagaatgggttgaacgctctccaccttgcttccaaagaaggccatgtagaggttgtttctgagctgctgcagagagaagccaatgtggatgcagctacaaagaaaggaaacacagcattgcacatcgcatctttggctgggcaagcagaggtggtaaaagtcttggttacaaatggagccaatgtcaatgcacaatctcagaatggtttcacgccattgtatatggcagcccaggaaaatcacctggaagttgtcaagtttcttcttgacaatggtgcaagccagagcctagccacagaggatggcttcacaccattggcagtggctttgcaacaaggtcacgaccaagtcgtttcgctcctgctagagaatgacaccaaaggaaaagtgcgtctcccagctcttcatatcgcggcccgaaaagacgacacgaaagccgccgccctgctgctgcagaatgacaacaatgcagatgtggaatcaaagagtggcttcactccgctccacatagctgctcactatggaaatatcaatgtagccacgttgctgttaaaccgagcggctgctgtggatttcaccgcaaggaatgacatcactcctttacatgttgcatcaaaaagaggaaatgcaaatatggtaaaactattgctcgatcgaggagctaaaatcgatgccaaaaccagggatggtctgacaccactgcactgtggagcaaggagtggccacgagcaggtggtagaaatgttgcttgatcgagctgcccccattctttcaaaaaccaagaatggattatctccattgcacatggccacacaaggggatcatttaaactgcgtccagcttctcctccagcataatgtacccgtggatgatgtcaccaatgactacctgactgccctacacgtggctgcccactgtggccattacaaagttgccaaggttctcttggataagaaagctaaccccaatgccaaagccctgaatggctttacccctcttcatattgcctgcaagaagaatcgaattaaagtaatggaactccttctgaaacacggtgcatccatccaagctgtaaccgagtcgggccttaccccaatccatgttgctgccttcatggggcatgtaaatattgtatcacaactaatgcatcatggagcctcaccaaacaccaccaatgtgagaggagaaacagcactgcacatggcagctcgctccggccaagctgaagttgtgcggtatctggtacaagacggagctcaggtagaagctaaagctaaggatgaccaaacaccactccacatttcagcccgactggggaaagcagacatagtacaacagctgttgcagcaaggggcatctccaaatgcagccacaacttctgggtacaccccacttcacctttccgcccgagaggggcatgaggatgtggccgcgttccttttggatcatggagcgtctttatctataacaacaaagaaaggatttactcctcttcatgtggcagcaaaatatggaaagcttgaagtcgccaatctcctgctacagaaaagtgcatctccagatgctgctgggaagagcgggctaacaccactgcatgtagctgcacattacgataatcagaaagtggcccttctgcttttggaccaaggagcctcacctcacgcagccgcaaagaatggttatacgccactgcacatcgctgccaaaaagaaccagatggacatagcgacaactctgctggaatatggtgctgatgccaacgcagttacccggcaaggaattgcttccgtccatctcgcagctcaggaagggcacgtggacatggtgtcgctgctcctcggtagaaatgcgaatgtgaacctgagcaataagagcggcctgaccccactccatttggctgctcaagaagatcgagtgaatgtggcagaagtcctcgtaaaccaaggggctcatgtggacgcccagacaaagatgggatacacaccactgcatgtgggctgccactatggaaatatcaagattgttaatttcctgctccagcattctgcaaaagttaatgccaaaacaaagaatgggtatacgccattacatcaagcagcacagcaggggcatacgcatataataaatgtcttacttcagaacaacgcctcccccaatgaactcactgtgaatgggaatactgcccttggcattgcccggcgcctcggctacatctcagtagtggacaccctgaagatagtgaccgaagagaccatgaccacaactactgtcacagagaagcacaaaatgaatgttccagaaacgatgaatgaagttcttgatatgtctgatgatgaagttcgtaaagccaatgcccctgaaatgctcagtgatggcgaatatatctcagatgttgaagaaggtgaagatgcaatgaccggggacacagacaaatatcttgggccacaggaccttaaggaattgggtgatgattccctgcctgcagagggttacatgggctttagtctcggagcgcgttctgccagcctccgctccttcagttcggataggtcttacaccttgaacagaagctcctatgcacgggacagcatgatgattgaagaactccttgtgccatccaaagagcagcatctaacattcacaagggaatttgattcagattctcttagacattacagctgggctgcagacaccttagacaatgtcaatcttgtttcaagccccattcattctgggtttctggttagctttatggtggacgcgagagggggctccatgagaggaagccgtcatcacgggatgagaatcatcattcctccacgcaagtgtacggcccccactcgaatcacctgccgtttggtaaagagacataaactggccaacccaccccccatggtggaaggagagggattagccagtaggctggtagaaatgggtcctgcaggggcacaatttttaggccctgtcatagtggaaatccctcactttgggtccatgagaggaaaagagagagaactcattgttcttcgaagtgaaaatggtgaaacttggaaggagcatcagtttgacagcaaaaatgaagatttaaccgagttacttaatggcatggatgaagaacttgatagcccagaagagttagggaaaaagcgtatctgcaggattatcacgaaagatttcccccagtattttgcagtggtttcccggattaagcaggaaagcaaccagattggtcctgaaggtggaattctgagcagcaccacagtgccccttgttcaagcatctttcccagagggtgccctaactaaaagaattcgagtgggcctccaggcccagcctgttccagatgaaattgtgaaaaagatccttggaaacaaagcaacttttagcccaattgtcactgtggaaccaagaagacggaaattccataaaccaatcacaatgaccattccggtgcccccgccctcaggagaaggtgtatccaatggatacaaaggggacactacacccaatctgcgtcttctctgtagcattacagggggcacttcgcctgctcagtgggaagacatcacaggaacaactcctttgacgtttataaaagattgtgtctcctttacaaccaatgtttcagccagattttggcttgcagactgccatcaagttttagaaactgtggggttagccacgcaactgtacagagaattgatatgtgttccatatatggccaagtttgttgtttttgccaaaatgaatgatcccgtagaatcttccttgcgatgtttctgcatgacagatgacaaagtggacaaaactttagagcaacaagagaattttgaggaagtcgcaagaagcaaagatattgaggttctggaaggaaaacctatttatgttgattgttatggaaatttggccccacttaccaaaggaggacagcaacttgtttttaacttttattctttcaaagaaaatagactgccattttccatcaagattagagacaccagccaagagccctgtggtcgtctgtcttttctgaaagaaccaaagacaacaaaaggactgcctcaaacagcggtttgcaacttaaatatcactctgccagcacataaaaagattgagaaaacagatagacgacagagcttcgcatccttagctttacgtaagcgctacagctacttgactgagcctggaatgagtccacagagtccatgtgaacggacagatatcaggatggcaatagtagccgatcacctgggacttagttggacagaactggcaagggaactgaatttttcagtggatgaaatcaatcaaatacgtgtggaaaatccaaattctttaatttctcagagcttcatgttattaaaaaaatgggttaccagagacggaaaaaatgccacaactgatgccttaacttcggtcttgacaaaaattaatcgaatagatatagtgacactgctagaaggaccaatatttgattatggaaatatttcaggcaccagaagttttgcagatgagaacaatgttttccatgaccctgttgatggttatccttcccttcaagtggaactggaaacccccacagggttgcactacacaccacctacccctttccagcaagatgattattttagtgatatctctagcatagaatctccccttagaacccctagtagactgagtgatgggctagtgccttcccaggggaacatagagcattccgcagatggacctccagtcgtaactgcagaagacgcttccttagaagacagcaaactggaagactcagtgcctttaacagaaatgcctgaagcagtggatgtagatgagagccagttggagaatgtatgtctgagttggcagaatgagacatcaagtggaaacctagagtcctgcgctcaagctcgaagagtaactggtgggttactagatcgactggatgacagccctgaccagtgtagagattccattacctcatatctcaaaggagaagctggcaaatttgaagcaaatggaagccatacagaaatcactccagaagcaaagacaaaatcttactttccagaatcccaaaatgatgtaggaaaacagagtaccaaggaaactctgaaaccaaaaatacatggatctggtcatgttgaagaaccagcatcaccactagcagcatatcagaaatctctagaagaaaccagcaagcttataatagaagagactaaaccctgtgtgcctgtcagtatgaaaaagatgagtaggacttctccagcagatggcaagccaaggcttagcctccatgaagaagaggggtccagtgggtctgagcaaaagcagggagaaggttttaaggtgaaaacgaagaaagaaatccggcatgtggaaaagaagagccactcgtaa

SEQ ID NO: 484 - DNA, 1995 bp, Homo sapiens
atggcggacagcgccagcgagagcgacacggacggggcggggggcaacagcagcagctcggccgccatgcagtcgtcctgctcgtcgacctcgggcggcggcggtggcggcgggggaggcggcggcggtgggaagtcggggggcattgtcatctcgccgttccgcctggaggagctcaccaaccgcctggcctcgctgcagcaagagaacaaggtgctgaagatagagctggagacctacaaactgaagtgcaaggcactgcaggaggagaaccgcgacctgcgcaaagccagcgtgaccatccaagccagggctgagcaggaagaagaattcattagtaacactttattcaagaaaattcaggctttgcagaaggagaaagaaacccttgctgtaaattatgagaaagaagaagaattcctcactaatgagctctccagaaaattgatgcagttgcagcatgagaaagccgaactagaacagcatcttgaacaagagcaggaatttcaggtcaacaaactgatgaagaaaattaaaaaactggagaatgacaccatttctaagcaacttacattagaacagttgagacgggagaagattgaccttgaaaatacattggaacaagaacaagaagcactagttaatcgcctctggaaaaggatggataagcttgaagctgaaaagcgaatcctgcaggaaaaattagaccagcccgtctctgctccaccatcgcctagagatatctccatggagattgattctccagaaaatatgatgcgtcacatcaggtttttaaagaatgaagtggaacggctgaagaagcaactgagagctgctcagttacagcattcagagaaaatggcacagtatctggaggaggaacgtcacatgagagaagagaacttgaggctccagaggaagctgcagagggagatggagagaagagaagccctctgtcgacagctctccgagagtgagtccagcttagaaatggacgacgaaaggtattttaatgagatgtctgcacaaggattaagacctcgcactgtgtccagcccgatcccttacacaccttctccgagttcaagcaggcctatatcacctggtccacagagtccatgtgaacggacagatatcaggatggcaatagtagccgatcacctgggacttagttggacagaactggcaagggaactgaatttttcagtggatgaaatcaatcaaatacgtgtggaaaatccaaattctttaatttctcagagcttcatgttattaaaaaaatgggttaccagagacggaaaaaatgccacaactgatgccttaacttcggtcttgacaaaaattaatcgaatagatatagtgacactgctagaaggaccaatatttgattatggaaatatttcaggcaccagaagttttgcagatgagaacaatgttttccatgaccctgttgatggttggcagaatgagacatcaagtggaaacctagagtcctgcgctcaagctcgaagagtaactggtgggttactagatcgactggatgacagccctgaccagtgtagagattccattacctcatatctcaaaggagaagctggcaaatttgaagcaaatggaagccatacagaaatcactccagaagcaaagacaaaatcttactttccagaatcccaaaatgatgtaggaaaacagagtaccaaggaaactctgaaaccaaaaatacatggatctggtcatgttgaagaaccagcatcaccactagcagcatatcagaaatctctagaagaaaccagcaagcttataatagaagagactaaaccctgtgtgcctgtcagtatgaaaaagatgagtaggacttctccagcagatggcaagccaaggcttagcctccatgaagaagaggggtccagtgggtctgagcaaaagcagggagaaggttttaaggtgaaaacgaagaaagaaatccggcatgtggaaaagaagagccactcgtaa

SEQ ID NO: 485 - DNA, 1692 bp, Homo sapiens
atggcggacagcgccagcgagagcgacacggacggggcggggggcaacagcagcagctcggccgccatgcagtcgtcctgctcgtcgacctcgggcggcggcggtggcggcgggggaggcggcggcggtgggaagtcggggggcattgtcatctcgccgttccgcctggaggagctcaccaaccgcctggcctcgctgcagcaagagaacaaggtgctgaagatagagctggagacctacaaactgaagtgcaaggcactgcaggaggagaaccgcgacctgcgcaaagccagcgtgaccatccatctaacattcacaagggaatttgattcagattctcttagacattacagctgggctgcagacaccttagacaatgtcaatcttgtttcaagccccattcattctggctattcttctccacttcctcagtatgattcaaggtttctggttagctttatggtggacgcgagagggggctccatgagaggaagccgtcatcacgggatgagaatcatcattcctccacgcaagtgtacggcccccactcgaatcacctgccgtttggtaaagagacataaactggccaacccaccccccatggtggaaggagagggattagccagtaggctggtagaaatgggtcctgcaggggcacaatttttaggccctgtcatagtggaaatccctcactttgggtccatgagaggaaaagagagagaactcattgttcttcgaagtgaaaatggtgaaacttggaaggagcatcagtttgacagcaaaaatgaagatttaaccgagttacttaatggcatggatgaagaacttgatagcccagaagagttagggaaaaagcgtatctgcaggattatcacgaaagatttcccccagtattttgcagtggtttcccggattaagcaggaaagcaaccagattggtcctgaaggtggaattctgagcagcaccacagtgccccttgttcaagcatctttcccagagggtgccctaactaaaagaattcgagtgggcctccaggcccagcctgttccagatgaaattgtgaaaaagatccttggaaacaaagcaacttttagcccaattgtcactgtggaaccaagaagacggaaattccataaaccaatcacaatgaccattccggtgcccccgccctcaggagaaggtgtatccaatggatacaaaggggacactacacccaatctgcgtcttctctgtagcattacagggggcacttcgcctgctcagtgggaagacatcacaggaacaactcctttgacgtttataaaagattgtgtctcctttacaaccaatgtttcagccagattttggcttgcagactgccatcaagttttagaaactgtggggttagccacgcaactgtacagagaattgatatgtgttccatatatggccaagtttgttgtttttgccaaaatgaatgatcccgtagaatcttccttgcgatgtttctgcatgacagatgacaaagtggacaaaactttagagcaacaagagaattttgaggaagtcgcaagaagcaaagatattgaggtaccttgttcacaaaaacaagttcatttcattacgtactccagatatgaggttttattttgtggtcttaatagcactcactataaaataccaagtgcattattgattttacttttactttaa

SEQ ID NO: 486 - DNA, 2208 bp, Homo sapiens
atggcggacagcgccagcgagagcgacacggacggggcggggggcaacagcagcagctcggccgccatgcagtcgtcctgctcgtcgacctcgggcggcggcggtggcggcgggggaggcggcggcggtgggaagtcggggggcattgtcatctcgccgttccgcctggaggagctcaccaaccgcctggcctcgctgcagcaagagaacaaggtgctgaagatagagctggagacctacaaactgaagtgcaaggcactgcaggaggagaaccgcgacctgcgcaaagccagcgtgaccatccaagccagggctgagcaggaagaagaattcattagtaacactttattcaagaaaattcaggctttgcagaaggagaaagaaacccttgctgtaaattatgagaaagaagaagaattcctcactaatgagctctccagaaaattgatgcagttgcagcatgagaaagccgaactagaacagcatcttgaacaagagcaggaatttcaggtcaacaaactgatgaagaaaattaaaaaactggagaatgacaccatttctaagcaacttacattagaacagttgagacgggagaagattgaccttgaaaatacattggaacaagaacaagaagcactagttaatcgcctctggaaaaggatggataagcttgaagctgaaaagcgaatcctgcaggaaaaattagaccagcccgtctctgctccaccatcgcctagagatatctccatggagattgattctccagaaaatatgatgcgtcacatcaggtttttaaagaatgaagtggaacggctgaagaagcaactgagagctgctcagttacagcattcagagaaaatggcacagtatctggaggaggaacgtcacatgagagaagagaacttgaggctccagaggaagctgcagagggagatggagagaagagaagccctctgtcgacagctctccgagagtgagtccagcttagaaatggacgacgaaaggtattttaatgagatgtctgcacaaggattaagacctcgcactgtgtccagcccgatcccttacacaccttctccgagttcaagcaggcctatatcacctgaacttgatagcccagaagagttagggaaaaagcgtatctgcaggattatcacgaaagatttcccccagtattttgcagtggtttcccggattaagcaggaaagcaaccagattggtcctgaaggtggaattctgagcagcaccacagtgccccttgttcaagcatctttcccagagggtgccctaactaaaagaattcgagtgggcctccaggcccagcctgttccagatgaaattgtgaaaaagatccttggaaacaaagcaacttttagcccaattgtcactgtggaaccaagaagacggaaattccataaaccaatcacaatgaccattccggtgcccccgccctcaggagaaggtgtatccaatggatacaaaggggacactacacccaatctgcgtcttctctgtagcattacagggggcacttcgcctgctcagtgggaagacatcacaggaacaactcctttgacgtttataaaagattgtgtctcctttacaaccaatgtttcagccagattttggcttgcagactgccatcaagttttagaaactgtggggttagccacgcaactgtacagagaattgatatgtgttccatatatggccaagtttgttgtttttgccaaaatgaatgatcccgtagaatcttccttgcgatgtttctgcatgacagatgacaaagtggacaaaactttagagcaacaagagaattttgaggaagtcgcaagaagcaaagatattgaggttctggaaggaaaacctatttatgttgattgttatggaaatttggccccacttaccaaaggaggacagcaacttgtttttaacttttattctttcaaagaaaatagactgccattttccatcaagattagagacaccagccaagagccctgtggtcgtctgtcttttctgaaagaaccaaagacaacaaaaggactgcctcaaacagcggtttgcaacttaaatatcactctgccagcacataaaaagattgagaaaacagatagacgacagagcttcgcatccttagctttacgtaagcgctacagctacttgactgagcctggaatgagtgagtttcctaacacatttactaat

SEQ ID NO: 487 - DNA, 2301 bp, Homo sapiens
atggcggacagcgccagcgagagcgacacggacggggcggggggcaacagcagcagctcggccgccatgcagtcgtcctgctcgtcgacctcgggcggcggcggtggcggcgggggaggcggcggcggtgggaagtcggggggcattgtcatctcgccgttccgcctggaggagctcaccaaccgcctggcctcgctgcagcaagagaacaaggtgctgaagatagagctggagacctacaaactgaagtgcaaggcactgcaggaggagaaccgcgacctgcgcaaagccagcgtgaccatccaagccagggctgagcaggaagaagaattcattagtaacactttattcaagaaaattcaggctttgcagaaggagaaagaaacccttgctgtaaattatgagaaagaagaagaattcctcactaatgagctctccagaaaattgatgcagttgcagcatgagaaagccgaactagaacagcatcttgaacaagagcaggaatttcaggtcaacaaactgatgaagaaaattaaaaaactggagaatgacaccatttctaagcaacttacattagaacagttgagacgggagaagattgaccttgaaaatacattggaacaagaacaagaagcactagttaatcgcctctggaaaaggatggataagcttgaagctgaaaagcgaatcctgcaggaaaaattagaccagcccgtctctgctccaccatcgcctagagatatctccatggagattgattctccagaaaatatgatgcgtcacatcaggtttttaaagaatgaagtggaacggctgaagaagcaactgagagctgctcagttacagcattcagagaaaatggcacagtatctggaggaggaacgtcacatgagagaagagaacttgaggctccagaggaagctgcagagggagatggagagaagagaagccctctgtcgacagctctccgagagtgagtccagcttagaaatggacgacgaaaggtattttaatgagatgtctgcacaaggattaagacctcgcactgtgtccagcccgatcccttacacaccttctccgagttcaagcaggcctatatcacctggtccacagagtccatgtgaacggacagatatcaggatggcaatagtagccgatcacctgggacttagttggacagaactggcaagggaactgaatttttcagtggatgaaatcaatcaaatacgtgtggaaaatccaaattctttaatttctcagagcttcatgttattaaaaaaatgggttaccagagacggaaaaaatgccacaactgatgccttaacttcggtcttgacaaaaattaatcgaatagatatagtgacactgctagaaggaccaatatttgattatggaaatatttcaggcaccagaagttttgcagatgagaacaatgttttccatgaccctgttgatggttatccttcccttcaagtggaactggaaacccccacagggttgcactacacaccacctacccctttccagcaagatgattattttagtgatatctctagcatagaatctccccttagaacccctagtagactgagtgatgggctagtgccttcccaggggaacatagagcattccgcagatggacctccagtcgtaactgcagaagacgcttccttagaagacagcaaactggaagactcagtgcctttaacagaaatgcctgaagcagtggatgtagatgagagccagttggagaatgtatgtctgagttggcagaatgagacatcaagtggaaacctagagtcctgcgctcaagctcgaagagtaactggtgggttactagatcgactggatgacagccctgaccagtgtagagattccattacctcatatctcaaaggagaagctggcaaatttgaagcaaatggaagccatacagaaatcactccagaagcaaagacaaaatcttactttccagaatcccaaaatgatgtaggaaaacagagtaccaaggaaactctgaaaccaaaaatacatggatctggtcatgttgaagaaccagcatcaccactagcagcatatcagaaatctctagaagaaaccagcaagcttataatagaagagactaaaccctgtgtgcctgtcagtatgaaaaagatgagtaggacttctccagcagatggcaagccaaggcttagcctccatgaagaagaggggtccagtgggtctgagcaaaagggagaaggttttaaggtgaaaacgaagaaagaaatccggcatgtggaaaagaagagccactcgtaa

SEQ ID NO: 488 - DNA, 1893 bp, Homo sapiens
atggcggacagcgccagcgagagcgacacggacggggcggggggcaacagcagcagctcggccgccatgcagtcgtcctgctcgtcgacctcgggcggcggcggtggcggcgggggaggcggcggcggtgggaagtcggggggcattgtcatctcgccgttccgcctggaggagctcaccaaccgcctggcctcgctgcagcaagagaacaaggtgctgaagatagagctggagacctacaaactgaagtgcaaggcactgcaggaggagaaccgcgacctgcgcaaagccagcgtgaccatccatctaacattcacaagggaatttgattcagattctcttagacattacagctgggctgcagacaccttagacaatgtcaatcttgtttcaagccccattcattctgggtttctggttagctttatggtggacgcgagagggggctccatgagaggaagccgtcatcacgggatgagaatcatcattcctccacgcaagtgtacggcccccactcgaatcacctgccgtttggtaaagagacataaactggccaacccaccccccatggtggaaggagagggattagccagtaggctggtagaaatgggtcctgcaggggcacaatttttaggccctgtcatagtggaaatccctcactttgggtccatgagaggaaaagagagagaactcattgttcttcgaagtgaaaatggtgaaacttggaaggagcatcagtttgacagcaaaaatgaagatttaaccgagttacttaatggcatggatgaagaacttgatagcccagaagagttagggaaaaagcgtatctgcaggattatcacgaaagatttcccccagtattttgcagtggtttcccggattaagcaggaaagcaaccagattggtcctgaaggtggaattctgagcagcaccacagtgccccttgttcaagcatctttcccagagggtgccctaactaaaagaattcgagtgggcctccaggcccagcctgttccagatgaaattgtgaaaaagatccttggaaacaaagcaacttttagcccaattgtcactgtggaaccaagaagacggaaattccataaaccaatcacaatgaccattccggtgcccccgccctcaggagaaggtgtatccaatggatacaaaggggacactacacccaatctgcgtcttctctgtagcattacagggggcacttcgcctgctcagtgggaagacatcacaggaacaactcctttgacgtttataaaagattgtgtctcctttacaaccaatgtttcagccagattttggcttgcagactgccatcaagttttagaaactgtggggttagccacgcaactgtacagagaattgatatgtgttccatatatggccaagtttgttgtttttgccaaaatgaatgatcccgtagaatcttccttgcgatgtttctgcatgacagatgacaaagtggacaaaactttagagcaacaagagaattttgaggaagtcgcaagaagcaaagatattgaggttctggaaggaaaacctatttatgttgattgttatggaaatttggccccacttaccaaaggaggacagcaacttgtttttaacttttattctttcaaagaaaatagactgccattttccatcaagattagagacaccagccaagagccctgtggtcgtctgtcttttctgaaagaaccaaagacaacaaaaggactgcctcaaacagcggtttgcaacttaaatatcactctgccagcacataaaaagattgagaaaacagatagacgacagagcttcgcatccttagctttacgtaagcgctacagctacttgactgagcctggaatgagtgagtttcctaacacatttactaat

SEQ ID NO: 489 - DNA, 369 bp, Homo sapiens
atggcggacagcgccagcgagagcgacacggacggggcggggggcaacagcagcagctcggccgccatgcagtcgtcctgctcgtcgacctcgggcggcggcggtggcggcgggggaggcggcggcggtgggaagtcggggggcattgtcatctcgccgttccgcctggaggagctcaccaaccgcctggcctcgctgcagcaagagaacaaggtgctgaagatagagctggagacctacaaactgaagtgcaaggcactgcaggaggagaaccgcgacctgcgcaaagccagcgtgaccatcggagaaggttttaaggtgaaaacgaagaaagaaatccggcatgtggaaaagaagagccactcgtaa

SEQ ID NO: 490 - DNA, 534 bp, Homo sapiens
atggcggacagcgccagcgagagcgacacggacggggcggggggcaacagcagcagctcggccgccatgcagtcgtcctgctcgtcgacctcgggcggcggcggtggcggcgggggaggcggcggcggtgggaagtcggggggcattgtcatctcgccgttccgcctggaggagctcaccaaccgcctggcctcgctgcagcaagagaacaaggtgctgaagatagagctggagacctacaaactgaagtgcaaggcactgcaggaggagaaccgcgacctgcgcaaagccagcgtgaccatcattagagacaccagccaagagccctgtggtcgtctgtcttttctgaaagaaccaaagacaacaaaaggactgcctcaaacagcggtttgcaacttaaatatcactctgccagcacataaaaagattgagaaaacagatagacgacagagcttcgcatccttagctttacgtaagcgctacagctacttgactgagcctggaatgagtgagtttcctaacacatttactaat

SEQ ID NO: 491 - DNA, 651 bp, Homo sapiens
atggcggacagcgccagcgagagcgacacggacggggcggggggcaacagcagcagctcggccgccatgcagtcgtcctgctcgtcgacctcgggcggcggcggtggcggcgggggaggcggcggcggtgggaagtcggggggcattgtcatctcgccgttccgcctggaggagctcaccaaccgcctggcctcgctgcagcaagagaacaaggtgctgaagatagagctggagacctacaaactgaagtgcaaggcactgcaggaggagaaccgcgacctgcgcaaagccagcgtgaccatccaagccagggctgagcaggaagaagaattcattagtaacactttattcaagaaaattcaggctttgcagaaggagaaagaaacccttgctgtaaattatgagaaagaagaagaattcctcactaatgagctctccagaaaattgatgcagttgcagcatgagaaagccgaactagaacagcatcttgaacaagagcaggaatttcaggtcaacaaactgatgaagaaaattaaaaaactggagaatgacaccatttctaagcaacttacattagaacagcagggagaaggttttaaggtgaaaacgaagaaagaaatccggcatgtggaaaagaagagccactcgtaa

SEQ ID NO: 492 - DNA, 1704 bp, Homo sapiens
atggcggacagcgccagcgagagcgacacggacggggcggggggcaacagcagcagctcggccgccatgcagtcgtcctgctcgtcgacctcgggcggcggcggtggcggcgggggaggcggcggcggtgggaagtcggggggcattgtcatctcgccgttccgcctggaggagctcaccaaccgcctggcctcgctgcagcaagagaacaaggtgctgaagatagagctggagacctacaaactgaagtgcaaggcactgcaggaggagaaccgcgacctgcgcaaagccagcgtgaccatcattagagacaccagccaagagccctgtggtcgtctgtcttttctgaaagaaccaaagacaacaaaaggactgcctcaaacagcggtttgcaacttaaatatcactctgccagcacataaaaagattgagaaaacagatagacgacagagcttcgcatccttagctttacgtaagcgctacagctacttgactgagcctggaatgagtccacagagtccatgtgaacggacagatatcaggatggcaatagtagccgatcacctgggacttagttggacagaactggcaagggaactgaatttttcagtggatgaaatcaatcaaatacgtgtggaaaatccaaattctttaatttctcagagcttcatgttattaaaaaaatgggttaccagagacggaaaaaatgccacaactgatgccttaacttcggtcttgacaaaaattaatcgaatagatatagtgacactgctagaaggaccaatatttgattatggaaatatttcaggcaccagaagttttgcagatgagaacaatgttttccatgaccctgttgatggttatccttcccttcaagtggaactggaaacccccacagggttgcactacacaccacctacccctttccagcaagatgattattttagtgatatctctagcatagaatctccccttagaacccctagtagactgagtgatgggctagtgccttcccaggggaacatagagcattccgcagatggacctccagtcgtaactgcagaagacgcttccttagaagacagcaaactggaagactcagtgcctttaacagaaatgcctgaagcagtggatgtagatgagagccagttggagaatgtatgtctgagttggcagaatgagacatcaagtggaaacctagagtcctgcgctcaagctcgaagagtaactggtgggttactagatcgactggatgacagccctgaccagtgtagagattccattacctcatatctcaaaggagaagctggcaaatttgaagcaaatggaagccatacagaaatcactccagaagcaaagacaaaatcttactttccagaatcccaaaatgatgtaggaaaacagagtaccaaggaaactctgaaaccaaaaatacatggatctggtcatgttgaagaaccagcatcaccactagcagcatatcagaaatctctagaagaaaccagcaagcttataatagaagagactaaaccctgtgtgcctgtcagtatgaaaaagatgagtaggacttctccagcagatggcaagccaaggcttagcctccatgaagaagaggggtccagtgggtctgagcaaaagggagaaggttttaaggtgaaaacgaagaaagaaatccggcatgtggaaaagaagagccactcgtaa

SEQ ID NO: 493 - DNA, 3378 bp, Homo sapiens
atggcggacagcgccagcgagagcgacacggacggggcggggggcaacagcagcagctcggccgccatgcagtcgtcctgctcgtcgacctcgggcggcggcggtggcggcgggggaggcggcggcggtgggaagtcggggggcattgtcatctcgccgttccgcctggaggagctcaccaaccgcctggcctcgctgcagcaagagaacaaggtgctgaagatagagctggagacctacaaactgaagtgcaaggcactgcaggaggagaaccgcgacctgcgcaaagccagcgtgaccatccaagccagggctgagcaggaagaagaattcattagtaacactttattcaagaaaattcaggctttgcagaaggagaaagaaacccttgctgtaaattatgagaaagaagaagaattcctcactaatgagctctccagaaaattgatgcagttgcagcatgagaaagccgaactagaacagcatcttgaacaagagcaggaatttcaggtcaacaaactgatgaagaaaattaaaaaactggagaatgacaccatttctaagcaacttacattagaacagttgagacgggagaagattgaccttgaaaatacattggaacaagaacaagaagcactagttaatcgcctctggaaaaggatggataagcttgaagctgaaaagcgaatcctgcaggaaaaattagaccagcccgtctctgctccaccatcgcctagagatatctccatggagattgattctccagaaaatatgatgcgtcacatcaggtttttaaagaatgaagtggaacggctgaagaagcaactgagagctgctcagttacagcattcagagaaaatggcacagtatctggaggaggaacgtcacatgagagaagagaacttgaggctccagaggaagctgcagagggagatggagagaagagaagccctctgtcgacagctctccgagagtgagtccagcttagaaatggacgacgaaaggtattttaatgagatgtctgcacaaggattaagacctcgcactgtgtccagcccgatcccttacacaccttctccgagttcaagcaggcctatatcacctgaacttgatagcccagaagagttagggaaaaagcgtatctgcaggattatcacgaaagatttcccccagtattttgcagtggtttcccggattaagcaggaaagcaaccagattggtcctgaaggtggaattctgagcagcaccacagtgccccttgttcaagcatctttcccagagggtgccctaactaaaagaattcgagtgggcctccaggcccagcctgttccagatgaaattgtgaaaaagatccttggaaacaaagcaacttttagcccaattgtcactgtggaaccaagaagacggaaattccataaaccaatcacaatgaccattccggtgcccccgccctcaggagaaggtgtatccaatggatacaaaggggacactacacccaatctgcgtcttctctgtagcattacagggggcacttcgcctgctcagtgggaagacatcacaggaacaactcctttgacgtttataaaagattgtgtctcctttacaaccaatgtttcagccagattttggcttgcagactgccatcaagttttagaaactgtggggttagccacgcaactgtacagagaattgatatgtgttccatatatggccaagtttgttgtttttgccaaaatgaatgatcccgtagaatcttccttgcgatgtttctgcatgacagatgacaaagtggacaaaactttagagcaacaagagaattttgaggaagtcgcaagaagcaaagatattgaggttctggaaggaaaacctatttatgttgattgttatggaaatttggccccacttaccaaaggaggacagcaacttgtttttaacttttattctttcaaagaaaatagactgccattttccatcaagattagagacaccagccaagagccctgtggtcgtctgtcttttctgaaagaaccaaagacaacaaaaggactgcctcaaacagcggtttgcaacttaaatatcactctgccagcacataaaaagattgagaaaacagatagacgacagagcttcgcatccttagctttacgtaagcgctacagctacttgactgagcctggaatgagtccacagagtccatgtgaacggacagatatcaggatggcaatagtagccgatcacctgggacttagttggacagaactggcaagggaactgaatttttcagtggatgaaatcaatcaaatacgtgtggaaaatccaaattctttaatttctcagagcttcatgttattaaaaaaatgggttaccagagacggaaaaaatgccacaactgatgccttaacttcggtcttgacaaaaattaatcgaatagatatagtgacactgctagaaggaccaatatttgattatggaaatatttcaggcaccagaagttttgcagatgagaacaatgttttccatgaccctgttgatggttatccttcccttcaagtggaactggaaacccccacagggttgcactacacaccacctacccctttccagcaagatgattattttagtgatatctctagcatagaatctccccttagaacccctagtagactgagtgatgggctagtgccttcccaggggaacatagagcattccgcagatggacctccagtcgtaactgcagaagacgcttccttagaagacagcaaactggaagactcagtgcctttaacagaaatgcctgaagcagtggatgtagatgagagccagttggagaatgtatgtctgagttggcagaatgagacatcaagtggaaacctagagtcctgcgctcaagctcgaagagtaactggtgggttactagatcgactggatgacagccctgaccagtgtagagattccattacctcatatctcaaaggagaagctggcaaatttgaagcaaatggaagccatacagaaatcactccagaagcaaagacaaaatcttactttccagaatcccaaaatgatgtaggaaaacagagtaccaaggaaactctgaaaccaaaaatacatggatctggtcatgttgaagaaccagcatcaccactagcagcatatcagaaatctctagaagaaaccagcaagcttataatagaagagactaaaccctgtgtgcctgtcagtatgaaaaagatgagtaggacttctccagcagatggcaagccaaggcttagcctccatgaagaagaggggtccagtgggtctgagcaaaagggagaaggttttaaggtgaaaacgaagaaagaaatccggcatgtggaaaagaagagccactcgtaa

SEQ ID NO: 494 - DNA, 3063 bp, Homo sapiens
atggcggacagcgccagcgagagcgacacggacggggcggggggcaacagcagcagctcggccgccatgcagtcgtcctgctcgtcgacctcgggcggcggcggtggcggcgggggaggcggcggcggtgggaagtcggggggcattgtcatctcgccgttccgcctggaggagctcaccaaccgcctggcctcgctgcagcaagagaacaaggtgctgaagatagagctggagacctacaaactgaagtgcaaggcactgcaggaggagaaccgcgacctgcgcaaagccagcgtgaccatccatctaacattcacaagggaatttgattcagattctcttagacattacagctgggctgcagacaccttagacaatgtcaatcttgtttcaagccccattcattctgggtttctggttagctttatggtggacgcgagagggggctccatgagaggaagccgtcatcacgggatgagaatcatcattcctccacgcaagtgtacggcccccactcgaatcacctgccgtttggtaaagagacataaactggccaacccaccccccatggtggaaggagagggattagccagtaggctggtagaaatgggtcctgcaggggcacaatttttaggccctgtcatagtggaaatccctcactttgggtccatgagaggaaaagagagagaactcattgttcttcgaagtgaaaatggtgaaacttggaaggagcatcagtttgacagcaaaaatgaagatttaaccgagttacttaatggcatggatgaagaacttgatagcccagaagagttagggaaaaagcgtatctgcaggattatcacgaaagatttcccccagtattttgcagtggtttcccggattaagcaggaaagcaaccagattggtcctgaaggtggaattctgagcagcaccacagtgccccttgttcaagcatctttcccagagggtgccctaactaaaagaattcgagtgggcctccaggcccagcctgttccagatgaaattgtgaaaaagatccttggaaacaaagcaacttttagcccaattgtcactgtggaaccaagaagacggaaattccataaaccaatcacaatgaccattccggtgcccccgccctcaggagaaggtgtatccaatggatacaaaggggacactacacccaatctgcgtcttctctgtagcattacagggggcacttcgcctgctcagtgggaagacatcacaggaacaactcctttgacgtttataaaagattgtgtctcctttacaaccaatgtttcagccagattttggcttgcagactgccatcaagttttagaaactgtggggttagccacgcaactgtacagagaattgatatgtgttccatatatggccaagtttgttgtttttgccaaaatgaatgatcccgtagaatcttccttgcgatgtttctgcatgacagatgacaaagtggacaaaactttagagcaacaagagaattttgaggaagtcgcaagaagcaaagatattgaggttctggaaggaaaacctatttatgttgattgttatggaaatttggccccacttaccaaaggaggacagcaacttgtttttaacttttattctttcaaagaaaatagactgccattttccatcaagattagagacaccagccaagagccctgtggtcgtctgtcttttctgaaagaaccaaagacaacaaaaggactgcctcaaacagcggtttgcaacttaaatatcactctgccagcacataaaaagattgagaaaacagatagacgacagagcttcgcatccttagctttacgtaagcgctacagctacttgactgagcctggaatgagtccacagagtccatgtgaacggacagatatcaggatggcaatagtagccgatcacctgggacttagttggacagaactggcaagggaactgaatttttcagtggatgaaatcaatcaaatacgtgtggaaaatccaaattctttaatttctcagagcttcatgttattaaaaaaatgggttaccagagacggaaaaaatgccacaactgatgccttaacttcggtcttgacaaaaattaatcgaatagatatagtgacactgctagaaggaccaatatttgattatggaaatatttcaggcaccagaagttttgcagatgagaacaatgttttccatgaccctgttgatggttatccttcccttcaagtggaactggaaacccccacagggttgcactacacaccacctacccctttccagcaagatgattattttagtgatatctctagcatagaatctccccttagaacccctagtagactgagtgatgggctagtgccttcccaggggaacatagagcattccgcagatggacctccagtcgtaactgcagaagacgcttccttagaagacagcaaactggaagactcagtgcctttaacagaaatgcctgaagcagtggatgtagatgagagccagttggagaatgtatgtctgagttggcagaatgagacatcaagtggaaacctagagtcctgcgctcaagctcgaagagtaactggtgggttactagatcgactggatgacagccctgaccagtgtagagattccattacctcatatctcaaaggagaagctggcaaatttgaagcaaatggaagccatacagaaatcactccagaagcaaagacaaaatcttactttccagaatcccaaaatgatgtaggaaaacagagtaccaaggaaactctgaaaccaaaaatacatggatctggtcatgttgaagaaccagcatcaccactagcagcatatcagaaatctctagaagaaaccagcaagcttataatagaagagactaaaccctgtgtgcctgtcagtatgaaaaagatgagtaggacttctccagcagatggcaagccaaggcttagcctccatgaagaagaggggtccagtgggtctgagcaaaagggagaaggttttaaggtgaaaacgaagaaagaaatccggcatgtggaaaagaagagccactcgtaa

SEQ ID NO: 495 - DNA, 2304 bp, Homo sapiens
atggcggacagcgccagcgagagcgacacggacggggcggggggcaacagcagcagctcggccgccatgcagtcgtcctgctcgtcgacctcgggcggcggcggtggcggcgggggaggcggcggcggtgggaagtcggggggcattgtcatctcgccgttccgcctggaggagctcaccaaccgcctggcctcgctgcagcaagagaacaaggtgctgaagatagagctggagacctacaaactgaagtgcaaggcactgcaggaggagaaccgcgacctgcgcaaagccagcgtgaccatccaagccagggctgagcaggaagaagaattcattagtaacactttattcaagaaaattcaggctttgcagaaggagaaagaaacccttgctgtaaattatgagaaagaagaagaattcctcactaatgagctctccagaaaattgatgcagttgcagcatgagaaagccgaactagaacagcatcttgaacaagagcaggaatttcaggtcaacaaactgatgaagaaaattaaaaaactggagaatgacaccatttctaagcaacttacattagaacagttgagacgggagaagattgaccttgaaaatacattggaacaagaacaagaagcactagttaatcgcctctggaaaaggatggataagcttgaagctgaaaagcgaatcctgcaggaaaaattagaccagcccgtctctgctccaccatcgcctagagatatctccatggagattgattctccagaaaatatgatgcgtcacatcaggtttttaaagaatgaagtggaacggctgaagaagcaactgagagctgctcagttacagcattcagagaaaatggcacagtatctggaggaggaacgtcacatgagagaagagaacttgaggctccagaggaagctgcagagggagatggagagaagagaagccctctgtcgacagctctccgagagtgagtccagcttagaaatggacgacgaaaggtattttaatgagatgtctgcacaaggattaagacctcgcactgtgtccagcccgatcccttacacaccttctccgagttcaagcaggcctatatcacctggtccacagagtccatgtgaacggacagatatcaggatggcaatagtagccgatcacctgggacttagttggacagaactggcaagggaactgaatttttcagtggatgaaatcaatcaaatacgtgtggaaaatccaaattctttaatttctcagagcttcatgttattaaaaaaatgggttaccagagacggaaaaaatgccacaactgatgccttaacttcggtcttgacaaaaattaatcgaatagatatagtgacactgctagaaggaccaatatttgattatggaaatatttcaggcaccagaagttttgcagatgagaacaatgttttccatgaccctgttgatggttatccttcccttcaagtggaactggaaacccccacagggttgcactacacaccacctacccctttccagcaagatgattattttagtgatatctctagcatagaatctccccttagaacccctagtagactgagtgatgggctagtgccttcccaggggaacatagagcattccgcagatggacctccagtcgtaactgcagaagacgcttccttagaagacagcaaactggaagactcagtgcctttaacagaaatgcctgaagcagtggatgtagatgagagccagttggagaatgtatgtctgagttggcagaatgagacatcaagtggaaacctagagtcctgcgctcaagctcgaagagtaactggtgggttactagatcgactggatgacagccctgaccagtgtagagattccattacctcatatctcaaaggagaagctggcaaatttgaagcaaatggaagccatacagaaatcactccagaagcaaagacaaaatcttactttccagaatcccaaaatgatgtaggaaaacagagtaccaaggaaactctgaaaccaaaaatacatggatctggtcatgttgaagaaccagcatcaccactagcagcatatcagaaatctctagaagaaaccagcaagcttataatagaagagactaaaccctgtgtgcctgtcagtatgaaaaagatgagtaggacttctccagcagatggcaagccaaggcttagcctccatgaagaagaggggtccagtgggtctgagcaaaagcagggagaaggttttaaggtgaaaacgaagaaagaaatccggcatgtggaaaagaagagccactcgtaa

SEQ ID NO: 496 - DNA, 10911 bp, Homo sapiens
atggcggacagcgccagcgagagcgacacggacggggcggggggcaacagcagcagctcggccgccatgcagtcgtcctgctcgtcgacctcgggcggcggcggtggcggcgggggaggcggcggcggtgggaagtcggggggcattgtcatctcgccgttccgcctggaggagctcaccaaccgcctggcctcgctgcagcaagagaacaaggtgctgaagatagagctggagacctacaaactgaagtgcaaggcactgcaggaggagaaccgcgacctgcgcaaagccagcgtgaccatccaagccagggctgagcaggaagaagaattcattagtaacactttattcaagaaaattcaggctttgcagaaggagaaagaaacccttgctgtaaattatgagaaagaagaagaattcctcactaatgagctctccagaaaattgatgcagttgcagcatgagaaagccgaactagaacagcatcttgaacaagagcaggaatttcaggtcaacaaactgatgaagaaaattaaaaaactggagaatgacaccatttctaagcaacttacattagaacagttgagacgggagaagattgaccttgaaaatacattggaacaagaacaagaagcactagttaatcgcctctggaaaaggatggataagcttgaagctgaaaagcgaatcctgcaggaaaaattagaccagcccgtctctgctccaccatcgcctagagatatctccatggagattgattctccagaaaatatgatgcgtcacatcaggtttttaaagaatgaagtggaacggctgaagaagcaactgagagctgctcagttacagcattcagagaaaatggcacagtatctggaggaggaacgtcacatgagagaagagaacttgaggctccagaggaagctgcagagggagatggagagaagagaagccctctgtcgacagctctccgagagtgagtccagcttagaaatggacgacgaaaggtattttaatgagatgtctgcacaaggattaagacctcgcactgtgtccagcccgatcccttacacaccttctccgagttcaagcaggcctatatcacctgaacttgatagcccagaagagttagggaaaaagcgtatctgcaggattatcacgaaagatttcccccagtattttgcagtggtttcccggattaagcaggaaagcaaccagattggtcctgaaggtggaattctgagcagcaccacagtgccccttgttcaagcatctttcccagagggtgccctaactaaaagaattcgagtgggcctccaggcccagcctgttccagatgaaattgtgaaaaagatccttggaaacaaagcaacttttagcccaattgtcactgtggaaccaagaagacggaaattccataaaccaatcacaatgaccattccggtgcccccgccctcaggagaaggtgtatccaatggatacaaaggggacactacacccaatctgcgtcttctctgtagcattacagggggcacttcgcctgctcagtgggaagacatcacaggaacaactcctttgacgtttataaaagattgtgtctcctttacaaccaatgtttcagccagattttggcttgcagactgccatcaagttttagaaactgtggggttagccacgcaactgtacagagaattgatatgtgttccatatatggccaagtttgttgtttttgccaaaatgaatgatcccgtagaatcttccttgcgatgtttctgcatgacagatgacaaagtggacaaaactttagagcaacaagagaattttgaggaagtcgcaagaagcaaagatattgaggttctggaaggaaaacctatttatgttgattgttatggaaatttggccccacttaccaaaggaggacagcaacttgtttttaacttttattctttcaaagaaaatagactgccattttccatcaagattagagacaccagccaagagccctgtggtcgtctgtcttttctgaaagaaccaaagacaacaaaaggactgcctcaaacagcggtttgcaacttaaatatcactctgccagcacataaaaaggagacagagtcagatcaagatgatgagattgagaaaacagatagacgacagagcttcgcatccttagctttacgtaagcgctacagctacttgactgagcctggaatgattgaacggagtacaggagcaacaagatccctccccaccacttactcatacaagccattcttttctacaagaccataccagtcctggacaacagctccgattacagtgcctgggccagccaagtcaggcttcacttccttatcaagttcttcctctaatacgccatcagcttctccgttaaaatcaatatggtctgtttcgacaccttctccaatcaaatccacattaggcgcgtcaactacatcttcagttaaatccattagtgacgtggcatctccaattagatcctttcggacaatgtcttcgccgataaaaactgtggtgtcacaatctccatacaatatccaagtttcctctggtaccctggctagagctccagcagtcacggaagctacgcccttaaaagggctggcatccaattctacgttttcctctcgaacctctccagtgactacagcagggtctcttttggagaggtcatcaattactatgacaccccctgcctcccccaaatcaaacattaatatgtattcctcaagtttgccatttaagtcaattattacatcagcagcaccgctaatatcttcacctttaaagtcagtggtgtctccagttaaatcagcagttgatgtcatttcatcagccaaaattacaatggcatcttctctctcatcacctgtgaagcagatgcctggacatgcagaggtagcattagtcaatggatctatttcccctctaaaatatccatcatcctcaactttaattaatggatgcaaagccactgccacgttacaggaaaaaatttcttctgctacaaactctgtgagctctgtggtcagtgcagccactgacacagttgagaaagtgttttctaccacgactgcaatgccattttccccactcaggtcatatgtttctgcagcaccatcagcttttcagtctctaagaactccttccgcaagtgcactctatacatcccttgggtcgtcaatatctgcaactacctcatctgtaacttcatcaattataacagtgccagtatactctgtagtcaatgttttgccagaaccagcattaaagaaacttccagactctaattcatttacaaaatcagcagcagccttgctgtcacccattaaaacattgactacggagacacatcctcagcctcacttcagtcgaacttcatctccagttaagtcatctttgttccttgcaccctctgcccttaagttgtctacaccatcttctttatcttccagtcaggagatactaaaagatgtagctgaaatgaaagaggacctaatgcggatgaccgcaatactacagacagatgtgcctgaggagaagccattccaacctgaactcccaaaggaagggagaatagatgatgaagaacctttcaaaattgtagagaaagtaaaggaagacttagtgaaagttagtgaaatccttaaaaaggatgtatgtgtagataataaaggatcacccaaatcaccaaagagtgacaaaggacactctcctgaagatgactggatagaatttagttcggaagaaatccgggaagccagacaacaagctgctgcgagccagtctccatctctgccagagagagtgcaagtaaaagcaaaagccgcctccgaaaaggattataacttgaccaaagttattgattacctaacaaatgatattgggagtagttcactgacaaacttaaaatacaagtttgaggatgcaaagaaggatggtgaggagagacagaaaagagttttaaaaccagcaattgctttgcaggaacacaaactcaaaatgcctccagcctccatgaggacttccacctctgagaaagaattgtgtaaaatggctgattccttttttggaacagatactattttagagtctcctgatgacttttctcaacacgaccaagataaaagtcccttgtctgacagtggctttgaaacaagaagtgaaaagacaccttcagccccacaaagcgctgaaagcactggtcctaaaccactttttcatgaagttcccatccctcctgtcattacagaaacaagaactgaagtggttcatgttatcaggagctatgatccctcagctggggatgttccccagacccaaccagaggagcctgtgtcacctaaaccttcacctacttttatggaattggaaccaaagcccaccacctctagtattaaagaaaaggttaaagcatttcaaatgaaagccagtagtgaagaagatgaccacaatcgggttttaagcaaaggcatgcgtgttaaagaagagactcacataaccacaaccaccagaatggtttatcattctccaccaggcggtgaaggtgcatctgaaagaattgaagaaaccatgtcagtccatgacatcatgaaggcctttcagtccgggcgggatccttccaaagaactggcaggtctgtttgaacataagtcggcagtgtctccagatgttcacaagtctgctgctgaaacctcagcccagcatgcagagaaggacaaccaaatgaaacccaaactggagcgtataatagaagtccacatcgaaaaaggtaaccaagctgagcccactgaagtcattattagagaaaccaaaaagcatccagaaaaagaaatgtatgtatatcagaaagacttatcccggggagatattaacctaaaagattttctgccagaaaaacacgatgcttttccttgttcagaggaacagggtcagcaagaagaagaagaacttactgctgaagagtcattgccttcttatctggagtcttccagagtaaacactcctgtgtcccaagaagaagatagccgccctagttctgctcaactcatatctgatgactcttataaaacattgaagcttttgagtcaacactcaatagaataccatgacgatgagttgtcagaactaagaggggagtcttacaggtttgctgagaaaatgcttctgtcagaaaagctagatgtgtctcattctgatactgaggaatcggttacagaccatgcaggaccccctagctcagagttacaggggtctgataagcggtccagagaaaaaatagccactgcccccaaaaaagaaattctctccaaaatctataaagatgtttctgaaaatggtgtaggtaaagtgtctaaagatgagcattttgataaagtgacagtgttgcactattctggcaatgttagtagtccaaaacatgccatgtggatgcgctttactgaggacagattagacagaggtagagagaagttgatatatgaagatagggtggacaggactgtgaaggaggctgaagaaaaactgactgaagtgtcacagttttttcgtgacaaaactgaaaagctaaatgatgaactgcagtccccagagaaaaaggcacgccctaaaaatggcaaagaatattcttctcaaagccctaccagtagcagccctgagaaagtgctactgacagaactgctggcatccaatgatgagtgggttaaggcaagacagcatggccctgatggacaaggcttccccaaggccgaggagaaggcacccagtctgcccagcagcccagagaagatggttctctcccaacagactgaggacagcaagtccacagtggaagccaaaggaagtatttcacagagcaaagcaccagatgggccccagtctggattccagctcaaacaatctaaactcagttccattagattaaaatttgaacaaggcacacacgcaaaaagtaaggacatgtctcaagaagacagaaagtcagatggccagtccagaatcccagttaaaaaaatacaggagagcaagctacccgtctaccaagtttttgctagagaaaaacagcagaaggccatagacctcccagatgaaagtgtatctgtgcaaaaagattttatggtattaaaaaccaaagatgagcatgcccaaagcaacgaaattgttgtaaatgattctggctctgataatgtgaaaaaacagagaactgaaatgtcaagtaaagcaatgcctgactctttttctgagcagcaggctaaagacttggcatgtcatataacctcagatttagcaactaggggaccatgggacaaaaaggtctttagaacatgggagagttcgggagccactaacaataagtctcagaaagaaaaactttcgcatgtacttgttcatgatgtaagagagaatcacattggtcaccctgagagtaaaagtgttgatcaaaagaatgaatttatgtctgtgactgagagagaacgcaaattgttaacaaacggctctctctcagaaattaaagaaatgactgtaaaatctccctccaaaaaagtcttatatagggaatatgttgtgaaagaaggggaccatccaggcggattgcttgatcagccttccaggaggagcgagagctcagcagtgtcacacattcccgtcagagttgctgatgagaggagaatgctgtcttctaatattcccgatggtttttgtgaacagtcggcatttccaaaacatgaactatcacaaaaattgtcccagtcaagcatgagtaaagagacagttgagacacagcactttaattctatagaagatgaaaaagttacctattcagaaatcagcaaagtttccaaacaccagagttatgtaggtttatgcccacctctcgaggaaaccgaaacctcccccaccaaatctcctgattctttagagtttagcccaggaaaggaatctccctctagtgatgtattcgaccacagtcccattgatggattggaaaaactcgcaccactagcccagacagagggagggaaagagataaaaactttacccgtttatgtcagttttgtacaagtggggaagcaatatgaaaaggagatacaacaaggaggtgtaaaaaaaatcataagtcaggaatgtaagacagtacaagaaaccagggggaccttttatacaactagacagcaaaagcaacctccttctccccaaggtagtccagaagatgatactctagagcaagtatcctttctagacagctctgggaaaagccctttaaccccagaaacacccagttcagaggaagtgagttatgaatttacatctaagacacctgactcgctcatagcttatataccaggcaaacccagcccaattcccgaggtttctgaggagtcagaggaggaggaacaggccaagtcaacctcccttaagcagactacagtggaggaaacagcagttgagcgtgaaatgcctaatgacgtgagcaaagactctaaccaaagacccaaaaataacagagttgcctatattgaatttccccctcctccaccactggatgcggaccagattgagtcagataagaagcatcattatctcccagaaaaagaggttgacatgattgaagtcaatctgcaagatgagcatgacaagtaccagctggctgaacctgtcattagagtgcagccaccttcaccagttcctcccggggcagacgtcagtgattcaagcgatgacgaatctatttatcagccagtcccagttaaaaaatataccttcaaattaaaggaagtggacgatgaacaaaaagaaaaacccaaagcttctgctgaaaaggcttccaaccagaaagaactggaaagtaatggatctggaaaagataatgaatttggccttggccttgattcacctcagaatgaaattgcccagaatgggaacaacgaccagtccatcacagagtgttccattgccaccacagcagagttttctcatgacacggatgccacagagatcgactctctggatggctatgacctgcaagatgaagatgatggcttgacagagagtgattctaaactcccaattcaagccatggaaattaagaaagatatctggaacacagagggcattctgaagccagctgaccgctcttttagccaaagtaaacttgaagttatcgaggaggagggaaaggtgggaccagatgaggacaagccaccttctaaaagttcttcatctgaaaagactcctgataagactgatcagaagtcaggggcccagttcttcacactggaaggcagacatcctgacagatcagtgtttcctgatacttacttcagttacaaagtagatgaagaatttgccactccttttaaaacagtagctaccaaaggtctagattttgacccttggtctaataaccgaggggatgatgaagtttttgacagtaaatcacgggaagatgaaactaagccatttgggctggcggtagaagaccgctctccagcaacaacccctgatacaacgccagccagaacgccaactgatgaaagtaccccaactagtgagcctaaccccttcccatttcatgaaggaaaaatgtttgagatgactcgcagtggtgcaattgacatgagcaagagggattttgttgaagagaggctccaatttttccagattggtgagcatacttctgaagggaagtcaggggaccagggggaaggggataaaagtatggtcactgccacaccacagccacagtcaggggacaccactgtagaaaccaatctagagagaaatgtagagacacctacagtggaacctaaccccagcatcccgaccagcggagagtgtcaggaaggcacatccagtagtggctccctggagaaatcagcagcagccactaacacctctaaagttgaccccaagttgcgcacgcctataaaaatgggaatttctgcatccaccatgaccatgaagaaagaaggccctggagaaataacagataagatagaagcggtgatgaccagttgtcagggattagaaaatgaaactataacaatgatttcaaatacagccaatagccagatgggcgttaggccccatgaaaaacatgattttcaaaaagataactttaataacaacaacaatttggattcttccactatacagacagataacattatgagtaatatagttctgacagaacattctgcacccacttgtaccacagagaaagataacccagtgaaagtctcatcaggaaaaaagacaggggtactacaaggacactgtgtaagagataagcagaaagttcttggagaacagcaaaaaacaaaggaattgatagggattaggcaaaaatccaaacttcccataaaggccacttcaccaaaagataccttcccaccgaaccatatgtcaaacactaaagcaagtaaaatgaagcaggttagtcaatccgagaaaaccaaagcccttactacttcttcatgtgtagatgtaaagtccagaattccagtgaaaaacacacacagggataacataattgcagttagaaaagcatgtgccacacaaaagcaagggcagccagagaaaggcaaggccaaacagcttccatccaagttgccagtaaaggtaagatccacctgtgtcactaccaccaccaccactgccaccaccaccaccactaccaccactaccaccaccaccagctgcacagttaaagttaggaaaagtcagctcaaggaagtatgtaaacattccattgaatattttaagggaattagtggtgagaccttaaagcttgtggaccgcctctctgaagaagaaaaaaagatgcagtccgagttgtccgatgaggaagaaagtacctcaagaaacacgtcgttgtccgagacttcccggggtggccagccttcggttacaacgaagtctgctagagataagaaaacagaggcagcacctttaaaatcaaagagtgaaaaggccggcagtgagaaaaggagcagtagaaggactggtccacagagtccatgtgaacggacagatatcaggatggcaatagtagccgatcacctgggacttagttggacagaactggcaagggaactgaatttttcagtggatgaaatcaatcaaatacgtgtggaaaatccaaattctttaatttctcagagcttcatgttattaaaaaaatgggttaccagagacggaaaaaatgccacaactgatgccttaacttcggtcttgacaaaaattaatcgaatagatatagtgacactgctagaaggaccaatatttgattatggaaatatttcaggcaccagaagttttgcagatgagaacaatgttttccatgaccctgttgatggttggcagaatgagacatcaagtggaaacctagagtcctgcgctcaagctcgaagagtaactggtgggttactagatcgactggatgacagccctgaccagtgtagagattccattacctcatatctcaaaggagaagctggcaaatttgaagcaaatggaagccatacagaaatcactccagaagcaaagacaaaatcttactttccagaatcccaaaatgatgtaggaaaacagagtaccaaggaaactctgaaaccaaaaatacatggatctggtcatgttgaagaaccagcatcaccactagcagcatatcagaaatctctagaagaaaccagcaagcttataatagaagagactaaaccctgtgtgcctgtcagtatgaaaaagatgagtaggacttctccagcagatggcaagccaaggcttagcctccatgaagaagaggggtccagtgggtctgagcaaaagcagggagaaggttttaaggtgaaaacgaagaaagaaatccggcatgtggaaaagaagagccactcgtaa

SEQ ID NO: 497 - DNA, 13473 bp, Homo sapiens
atggcggacagcgccagcgagagcgacacggacggggcggggggcaacagcagcagctcggccgccatgcagtcgtcctgctcgtcgacctcgggcggcggcggtggcggcgggggaggcggcggcggtgggaagtcggggggcattgtcatctcgccgttccgcctggaggagctcaccaaccgcctggcctcgctgcagcaagagaacaaggtgctgaagatagagctggagacctacaaactgaagtgcaaggcactgcaggaggagaaccgcgacctgcgcaaagccagcgtgaccatccaagccagggctgagcaggaagaagaattcattagtaacactttattcaagaaaattcaggctttgcagaaggagaaagaaacccttgctgtaaattatgagaaagaagaagaattcctcactaatgagctctccagaaaattgatgcagtctgatgccaatgcaagttacttaagagcagctcgagctggacaccttgaaaaggccctcgactacataaaaaatggagttgacatcaacatttgcaatcagaatgggttgaacgctctccaccttgcttccaaagaaggccatgtagaggttgtttctgagctgctgcagagagaagccaatgtggatgcagctacaaagaaaggaaacacagcattgcacatcgcatctttggctgggcaagcagaggtggtaaaagtcttggttacaaatggagccaatgtcaatgcacaatctcagaatggtttcacgccattgtatatggcagcccaggaaaatcacctggaagttgtcaagtttcttcttgacaatggtgcaagccagagcctagccacagaggatggcttcacaccattggcagtggctttgcaacaaggtcacgaccaagtcgtttcgctcctgctagagaatgacaccaaaggaaaagtgcgtctcccagctcttcatatcgcggcccgaaaagacgacacgaaagccgccgccctgctgctgcagaatgacaacaatgcagatgtggaatcaaagagtggcttcactccgctccacatagctgctcactatggaaatatcaatgtagccacgttgctgttaaaccgagcggctgctgtggatttcaccgcaaggaatgacatcactcctttacatgttgcatcaaaaagaggaaatgcaaatatggtaaaactattgctcgatcgaggagctaaaatcgatgccaaaaccagggatggtctgacaccactgcactgtggagcaaggagtggccacgagcaggtggtagaaatgttgcttgatcgagctgcccccattctttcaaaaaccaagaatggattatctccattgcacatggccacacaaggggatcatttaaactgcgtccagcttctcctccagcataatgtacccgtggatgatgtcaccaatgactacctgactgccctacacgtggctgcccactgtggccattacaaagttgccaaggttctcttggataagaaagctaaccccaatgccaaagccctgaatggctttacccctcttcatattgcctgcaagaagaatcgaattaaagtaatggaactccttctgaaacacggtgcatccatccaagctgtaaccgagtcgggccttaccccaatccatgttgctgccttcatggggcatgtaaatattgtatcacaactaatgcatcatggagcctcaccaaacaccaccaatgtgagaggagaaacagcactgcacatggcagctcgctccggccaagctgaagttgtgcggtatctggtacaagacggagctcaggtagaagctaaagctaaggatgaccaaacaccactccacatttcagcccgactggggaaagcagacatagtacaacagctgttgcagcaaggggcatctccaaatgcagccacaacttctgggtacaccccacttcacctttccgcccgagaggggcatgaggatgtggccgcgttccttttggatcatggagcgtctttatctataacaacaaagaaaggatttactcctcttcatgtggcagcaaaatatggaaagcttgaagtcgccaatctcctgctacagaaaagtgcatctccagatgctgctgggaagagcgggctaacaccactgcatgtagctgcacattacgataatcagaaagtggcccttctgcttttggaccaaggagcctcacctcacgcagccgcaaagaatggttatacgccactgcacatcgctgccaaaaagaaccagatggacatagcgacaactctgctggaatatggtgctgatgccaacgcagttacccggcaaggaattgcttccgtccatctcgcagctcaggaagggcacgtggacatggtgtcgctgctcctcggtagaaatgcgaatgtgaacctgagcaataagagcggcctgaccccactccatttggctgctcaagaagatcgagtgaatgtggcagaagtcctcgtaaaccaaggggctcatgtggacgcccagacaaagatgggatacacaccactgcatgtgggctgccactatggaaatatcaagattgttaatttcctgctccagcattctgcaaaagttaatgccaaaacaaagaatgggtatacgccattacatcaagcagcacagcaggggcatacgcatataataaatgtcttacttcagaacaacgcctcccccaatgaactcactgtgaatgggaatactgcccttggcattgcccggcgcctcggctacatctcagtagtggacaccctgaagatagtgaccgaagagaccatgaccacaactactgtcacagagaagcacaaaatgaatgttccagaaacgatgaatgaagttcttgatatgtctgatgatgaagttcgtaaagccaatgcccctgaaatgctcagtgatggcgaatatatctcagatgttgaagaaggtgaagatgcaatgaccggggacacagacaaatatcttgggccacaggaccttaaggaattgggtgatgattccctgcctgcagagggttacatgggctttagtctcggagcgcgttctgccagcctccgctccttcagttcggataggtcttacaccttgaacagaagctcctatgcacgggacagcatgatgattgaagaactccttgtgccatccaaagagcagcatctaacattcacaagggaatttgattcagattctcttagacattacagctgggctgcagacaccttagacaatgtcaatcttgtttcaagccccattcattctgggtttctggttagctttatggtggacgcgagagggggctccatgagaggaagccgtcatcacgggatgagaatcatcattcctccacgcaagtgtacggcccccactcgaatcacctgccgtttggtaaagagacataaactggccaacccaccccccatggtggaaggagagggattagccagtaggctggtagaaatgggtcctgcaggggcacaatttttaggccctgtcatagtggaaatccctcactttgggtccatgagaggaaaagagagagaactcattgttcttcgaagtgaaaatggtgaaacttggaaggagcatcagtttgacagcaaaaatgaagatttaaccgagttacttaatggcatggatgaagaacttgatagcccagaagagttagggaaaaagcgtatctgcaggattatcacgaaagatttcccccagtattttgcagtggtttcccggattaagcaggaaagcaaccagattggtcctgaaggtggaattctgagcagcaccacagtgccccttgttcaagcatctttcccagagggtgccctaactaaaagaattcgagtgggcctccaggcccagcctgttccagatgaaattgtgaaaaagatccttggaaacaaagcaacttttagcccaattgtcactgtggaaccaagaagacggaaattccataaaccaatcacaatgaccattccggtgcccccgccctcaggagaaggtgtatccaatggatacaaaggggacactacacccaatctgcgtcttctctgtagcattacagggggcacttcgcctgctcagtgggaagacatcacaggaacaactcctttgacgtttataaaagattgtgtctcctttacaaccaatgtttcagccagattttggcttgcagactgccatcaagttttagaaactgtggggttagccacgcaactgtacagagaattgatatgtgttccatatatggccaagtttgttgtttttgccaaaatgaatgatcccgtagaatcttccttgcgatgtttctgcatgacagatgacaaagtggacaaaactttagagcaacaagagaattttgaggaagtcgcaagaagcaaagatattgaggttctggaaggaaaacctatttatgttgattgttatggaaatttggccccacttaccaaaggaggacagcaacttgtttttaacttttattctttcaaagaaaatagactgccattttccatcaagattagagacaccagccaagagccctgtggtcgtctgtcttttctgaaagaaccaaagacaacaaaaggactgcctcaaacagcggtttgcaacttaaatatcactctgccagcacataaaaaggagacagagtcagatcaagatgatgagattgagaaaacagatagacgacagagcttcgcatccttagctttacgtaagcgctacagctacttgactgagcctggaatgattgaacggagtacaggagcaacaagatccctccccaccacttactcatacaagccattcttttctacaagaccataccagtcctggacaacagctccgattacagtgcctgggccagccaagtcaggcttcacttccttatcaagttcttcctctaatacgccatcagcttctccgttaaaatcaatatggtctgtttcgacaccttctccaatcaaatccacattaggcgcgtcaactacatcttcagttaaatccattagtgacgtggcatctccaattagatcctttcggacaatgtcttcgccgataaaaactgtggtgtcacaatctccatacaatatccaagtttcctctggtaccctggctagagctccagcagtcacggaagctacgcccttaaaagggctggcatccaattctacgttttcctctcgaacctctccagtgactacagcagggtctcttttggagaggtcatcaattactatgacaccccctgcctcccccaaatcaaacattaatatgtattcctcaagtttgccatttaagtcaattattacatcagcagcaccgctaatatcttcacctttaaagtcagtggtgtctccagttaaatcagcagttgatgtcatttcatcagccaaaattacaatggcatcttctctctcatcacctgtgaagcagatgcctggacatgcagaggtagcattagtcaatggatctatttcccctctaaaatatccatcatcctcaactttaattaatggatgcaaagccactgccacgttacaggaaaaaatttcttctgctacaaactctgtgagctctgtggtcagtgcagccactgacacagttgagaaagtgttttctaccacgactgcaatgccattttccccactcaggtcatatgtttctgcagcaccatcagcttttcagtctctaagaactccttccgcaagtgcactctatacatcccttgggtcgtcaatatctgcaactacctcatctgtaacttcatcaattataacagtgccagtatactctgtagtcaatgttttgccagaaccagcattaaagaaacttccagactctaattcatttacaaaatcagcagcagccttgctgtcacccattaaaacattgactacggagacacatcctcagcctcacttcagtcgaacttcatctccagttaagtcatctttgttccttgcaccctctgcccttaagttgtctacaccatcttctttatcttccagtcaggagatactaaaagatgtagctgaaatgaaagaggacctaatgcggatgaccgcaatactacagacagatgtgcctgaggagaagccattccaacctgaactcccaaaggaagggagaatagatgatgaagaacctttcaaaattgtagagaaagtaaaggaagacttagtgaaagttagtgaaatccttaaaaaggatgtatgtgtagataataaaggatcacccaaatcaccaaagagtgacaaaggacactctcctgaagatgactggatagaatttagttcggaagaaatccgggaagccagacaacaagctgctgcgagccagtctccatctctgccagagagagtgcaagtaaaagcaaaagccgcctccgaaaaggattataacttgaccaaagttattgattacctaacaaatgatattgggagtagttcactgacaaacttaaaatacaagtttgaggatgcaaagaaggatggtgaggagagacagaaaagagttttaaaaccagcaattgctttgcaggaacacaaactcaaaatgcctccagcctccatgaggacttccacctctgagaaagaattgtgtaaaatggctgattccttttttggaacagatactattttagagtctcctgatgacttttctcaacacgaccaagataaaagtcccttgtctgacagtggctttgaaacaagaagtgaaaagacaccttcagccccacaaagcgctgaaagcactggtcctaaaccactttttcatgaagttcccatccctcctgtcattacagaaacaagaactgaagtggttcatgttatcaggagctatgatccctcagctggggatgttccccagacccaaccagaggagcctgtgtcacctaaaccttcacctacttttatggaattggaaccaaagcccaccacctctagtattaaagaaaaggttaaagcatttcaaatgaaagccagtagtgaagaagatgaccacaatcgggttttaagcaaaggcatgcgtgttaaagaagagactcacataaccacaaccaccagaatggtttatcattctccaccaggcggtgaaggtgcatctgaaagaattgaagaaaccatgtcagtccatgacatcatgaaggcctttcagtccgggcgggatccttccaaagaactggcaggtctgtttgaacataagtcggcagtgtctccagatgttcacaagtctgctgctgaaacctcagcccagcatgcagagaaggacaaccaaatgaaacccaaactggagcgtataatagaagtccacatcgaaaaaggtaaccaagctgagcccactgaagtcattattagagaaaccaaaaagcatccagaaaaagaaatgtatgtatatcagaaagacttatcccggggagatattaacctaaaagattttctgccagaaaaacacgatgcttttccttgttcagaggaacagggtcagcaagaagaagaagaacttactgctgaagagtcattgccttcttatctggagtcttccagagtaaacactcctgtgtcccaagaagaagatagccgccctagttctgctcaactcatatctgatgactcttataaaacattgaagcttttgagtcaacactcaatagaataccatgacgatgagttgtcagaactaagaggggagtcttacaggtttgctgagaaaatgcttctgtcagaaaagctagatgtgtctcattctgatactgaggaatcggttacagaccatgcaggaccccctagctcagagttacaggggtctgataagcggtccagagaaaaaatagccactgcccccaaaaaagaaattctctccaaaatctataaagatgtttctgaaaatggtgtaggtaaagtgtctaaagatgagcattttgataaagtgacagtgttgcactattctggcaatgttagtagtccaaaacatgccatgtggatgcgctttactgaggacagattagacagaggtagagagaagttgatatatgaagatagggtggacaggactgtgaaggaggctgaagaaaaactgactgaagtgtcacagttttttcgtgacaaaactgaaaagctaaatgatgaactgcagtccccagagaaaaaggcacgccctaaaaatggcaaagaatattcttctcaaagccctaccagtagcagccctgagaaagtgctactgacagaactgctggcatccaatgatgagtgggttaaggcaagacagcatggccctgatggacaaggcttccccaaggccgaggagaaggcacccagtctgcccagcagcccagagaagatggttctctcccaacagactgaggacagcaagtccacagtggaagccaaaggaagtatttcacagagcaaagcaccagatgggccccagtctggattccagctcaaacaatctaaactcagttccattagattaaaatttgaacaaggcacacacgcaaaaagtaaggacatgtctcaagaagacagaaagtcagatggccagtccagaatcccagttaaaaaaatacaggagagcaagctacccgtctaccaagtttttgctagagaaaaacagcagaaggccatagacctcccagatgaaagtgtatctgtgcaaaaagattttatggtattaaaaaccaaagatgagcatgcccaaagcaacgaaattgttgtaaatgattctggctctgataatgtgaaaaaacagagaactgaaatgtcaagtaaagcaatgcctgactctttttctgagcagcaggctaaagacttggcatgtcatataacctcagatttagcaactaggggaccatgggacaaaaaggtctttagaacatgggagagttcgggagccactaacaataagtctcagaaagaaaaactttcgcatgtacttgttcatgatgtaagagagaatcacattggtcaccctgagagtaaaagtgttgatcaaaagaatgaatttatgtctgtgactgagagagaacgcaaattgttaacaaacggctctctctcagaaattaaagaaatgactgtaaaatctccctccaaaaaagtcttatatagggaatatgttgtgaaagaaggggaccatccaggcggattgcttgatcagccttccaggaggagcgagagctcagcagtgtcacacattcccgtcagagttgctgatgagaggagaatgctgtcttctaatattcccgatggtttttgtgaacagtcggcatttccaaaacatgaactatcacaaaaattgtcccagtcaagcatgagtaaagagacagttgagacacagcactttaattctatagaagatgaaaaagttacctattcagaaatcagcaaagtttccaaacaccagagttatgtaggtttatgcccacctctcgaggaaaccgaaacctcccccaccaaatctcctgattctttagagtttagcccaggaaaggaatctccctctagtgatgtattcgaccacagtcccattgatggattggaaaaactcgcaccactagcccagacagagggagggaaagagataaaaactttacccgtttatgtcagttttgtacaagtggggaagcaatatgaaaaggagatacaacaaggaggtgtaaaaaaaatcataagtcaggaatgtaagacagtacaagaaaccagggggaccttttatacaactagacagcaaaagcaacctccttctccccaaggtagtccagaagatgatactctagagcaagtatcctttctagacagctctgggaaaagccctttaaccccagaaacacccagttcagaggaagtgagttatgaatttacatctaagacacctgactcgctcatagcttatataccaggcaaacccagcccaattcccgaggtttctgaggagtcagaggaggaggaacaggccaagtcaacctcccttaagcagactacagtggaggaaacagcagttgagcgtgaaatgcctaatgacgtgagcaaagactctaaccaaagacccaaaaataacagagttgcctatattgaatttccccctcctccaccactggatgcggaccagattgagtcagataagaagcatcattatctcccagaaaaagaggttgacatgattgaagtcaatctgcaagatgagcatgacaagtaccagctggctgaacctgtcattagagtgcagccaccttcaccagttcctcccggggcagacgtcagtgattcaagcgatgacgaatctatttatcagccagtcccagttaaaaaatataccttcaaattaaaggaagtggacgatgaacaaaaagaaaaacccaaagcttctgctgaaaaggcttccaaccagaaagaactggaaagtaatggatctggaaaagataatgaatttggccttggccttgattcacctcagaatgaaattgcccagaatgggaacaacgaccagtccatcacagagtgttccattgccaccacagcagagttttctcatgacacggatgccacagagatcgactctctggatggctatgacctgcaagatgaagatgatggcttgacagagagtgattctaaactcccaattcaagccatggaaattaagaaagatatctggaacacagagggcattctgaagccagctgaccgctcttttagccaaagtaaacttgaagttatcgaggaggagggaaaggtgggaccagatgaggacaagccaccttctaaaagttcttcatctgaaaagactcctgataagactgatcagaagtcaggggcccagttcttcacactggaaggcagacatcctgacagatcagtgtttcctgatacttacttcagttacaaagtagatgaagaatttgccactccttttaaaacagtagctaccaaaggtctagattttgacccttggtctaataaccgaggggatgatgaagtttttgacagtaaatcacgggaagatgaaactaagccatttgggctggcggtagaagaccgctctccagcaacaacccctgatacaacgccagccagaacgccaactgatgaaagtaccccaactagtgagcctaaccccttcccatttcatgaaggaaaaatgtttgagatgactcgcagtggtgcaattgacatgagcaagagggattttgttgaagagaggctccaatttttccagattggtgagcatacttctgaagggaagtcaggggaccagggggaaggggataaaagtatggtcactgccacaccacagccacagtcaggggacaccactgtagaaaccaatctagagagaaatgtagagacacctacagtggaacctaaccccagcatcccgaccagcggagagtgtcaggaaggcacatccagtagtggctccctggagaaatcagcagcagccactaacacctctaaagttgaccccaagttgcgcacgcctataaaaatgggaatttctgcatccaccatgaccatgaagaaagaaggccctggagaaataacagataagatagaagcggtgatgaccagttgtcagggattagaaaatgaaactataacaatgatttcaaatacagccaatagccagatgggcgttaggccccatgaaaaacatgattttcaaaaagataactttaataacaacaacaatttggattcttccactatacagacagataacattatgagtaatatagttctgacagaacattctgcacccacttgtaccacagagaaagataacccagtgaaagtctcatcaggaaaaaagacaggggtactacaaggacactgtgtaagagataagcagaaagttcttggagaacagcaaaaaacaaaggaattgatagggattaggcaaaaatccaaacttcccataaaggccacttcaccaaaagataccttcccaccgaaccatatgtcaaacactaaagcaagtaaaatgaagcaggttagtcaatccgagaaaaccaaagcccttactacttcttcatgtgtagatgtaaagtccagaattccagtgaaaaacacacacagggataacataattgcagttagaaaagcatgtgccacacaaaagcaagggcagccagagaaaggcaaggccaaacagcttccatccaagttgccagtaaaggtaagatccacctgtgtcactaccaccaccaccactgccaccaccaccaccactaccaccactaccaccaccaccagctgcacagttaaagttaggaaaagtcagctcaaggaagtatgtaaacattccattgaatattttaagggaattagtggtgagaccttaaagcttgtggaccgcctctctgaagaagaaaaaaagatgcagtccgagttgtccgatgaggaagaaagtacctcaagaaacacgtcgttgtccgagacttcccggggtggccagccttcggttacaacgaagtctgctagagataagaaaacagaggcagcacctttaaaatcaaagagtgaaaaggccggcagtgagaaaaggagcagtagaaggactggtccacagagtccatgtgaacggacagatatcaggatggcaatagtagccgatcacctgggacttagttggacagaactggcaagggaactgaatttttcagtggatgaaatcaatcaaatacgtgtggaaaatccaaattctttaatttctcagagcttcatgttattaaaaaaatgggttaccagagacggaaaaaatgccacaactgatgccttaacttcggtcttgacaaaaattaatcgaatagatatagtgacactgctagaaggaccaatatttgattatggaaatatttcaggcaccagaagttttgcagatgagaacaatgttttccatgaccctgttgatggttggcagaatgagacatcaagtggaaacctagagtcctgcgctcaagctcgaagagtaactggtgggttactagatcgactggatgacagccctgaccagtgtagagattccattacctcatatctcaaaggagaagctggcaaatttgaagcaaatggaagccatacagaaatcactccagaagcaaagacaaaatcttactttccagaatcccaaaatgatgtaggaaaacagagtaccaaggaaactctgaaaccaaaaatacatggatctggtcatgttgaagaaccagcatcaccactagcagcatatcagaaatctctagaagaaaccagcaagcttataatagaagagactaaaccctgtgtgcctgtcagtatgaaaaagatgagtaggacttctccagcagatggcaagccaaggcttagcctccatgaagaagaggggtccagtgggtctgagcaaaagcagggagaaggttttaaggtgaaaacgaagaaagaaatccggcatgtggaaaagaagagccactcgtaa

SEQ ID NO: 498 - DNA, 372 bp, Homo sapiens
atggcggacagcgccagcgagagcgacacggacggggcggggggcaacagcagcagctcggccgccatgcagtcgtcctgctcgtcgacctcgggcggcggcggtggcggcgggggaggcggcggcggtgggaagtcggggggcattgtcatctcgccgttccgcctggaggagctcaccaaccgcctggcctcgctgcagcaagagaacaaggtgctgaagatagagctggagacctacaaactgaagtgcaaggcactgcaggaggagaaccgcgacctgcgcaaagccagcgtgaccatccagggagaaggttttaaggtgaaaacgaagaaagaaatccggcatgtggaaaagaagagccactcgtaa

SEQ ID NO: 499 - DNA, 10596 bp, Homo sapiens
atggcggacagcgccagcgagagcgacacggacggggcggggggcaacagcagcagctcggccgccatgcagtcgtcctgctcgtcgacctcgggcggcggcggtggcggcgggggaggcggcggcggtgggaagtcggggggcattgtcatctcgccgttccgcctggaggagctcaccaaccgcctggcctcgctgcagcaagagaacaaggtgctgaagatagagctggagacctacaaactgaagtgcaaggcactgcaggaggagaaccgcgacctgcgcaaagccagcgtgaccatccatctaacattcacaagggaatttgattcagattctcttagacattacagctgggctgcagacaccttagacaatgtcaatcttgtttcaagccccattcattctgggtttctggttagctttatggtggacgcgagagggggctccatgagaggaagccgtcatcacgggatgagaatcatcattcctccacgcaagtgtacggcccccactcgaatcacctgccgtttggtaaagagacataaactggccaacccaccccccatggtggaaggagagggattagccagtaggctggtagaaatgggtcctgcaggggcacaatttttaggccctgtcatagtggaaatccctcactttgggtccatgagaggaaaagagagagaactcattgttcttcgaagtgaaaatggtgaaacttggaaggagcatcagtttgacagcaaaaatgaagatttaaccgagttacttaatggcatggatgaagaacttgatagcccagaagagttagggaaaaagcgtatctgcaggattatcacgaaagatttcccccagtattttgcagtggtttcccggattaagcaggaaagcaaccagattggtcctgaaggtggaattctgagcagcaccacagtgccccttgttcaagcatctttcccagagggtgccctaactaaaagaattcgagtgggcctccaggcccagcctgttccagatgaaattgtgaaaaagatccttggaaacaaagcaacttttagcccaattgtcactgtggaaccaagaagacggaaattccataaaccaatcacaatgaccattccggtgcccccgccctcaggagaaggtgtatccaatggatacaaaggggacactacacccaatctgcgtcttctctgtagcattacagggggcacttcgcctgctcagtgggaagacatcacaggaacaactcctttgacgtttataaaagattgtgtctcctttacaaccaatgtttcagccagattttggcttgcagactgccatcaagttttagaaactgtggggttagccacgcaactgtacagagaattgatatgtgttccatatatggccaagtttgttgtttttgccaaaatgaatgatcccgtagaatcttccttgcgatgtttctgcatgacagatgacaaagtggacaaaactttagagcaacaagagaattttgaggaagtcgcaagaagcaaagatattgaggttctggaaggaaaacctatttatgttgattgttatggaaatttggccccacttaccaaaggaggacagcaacttgtttttaacttttattctttcaaagaaaatagactgccattttccatcaagattagagacaccagccaagagccctgtggtcgtctgtcttttctgaaagaaccaaagacaacaaaaggactgcctcaaacagcggtttgcaacttaaatatcactctgccagcacataaaaaggagacagagtcagatcaagatgatgagattgagaaaacagatagacgacagagcttcgcatccttagctttacgtaagcgctacagctacttgactgagcctggaatgattgaacggagtacaggagcaacaagatccctccccaccacttactcatacaagccattcttttctacaagaccataccagtcctggacaacagctccgattacagtgcctgggccagccaagtcaggcttcacttccttatcaagttcttcctctaatacgccatcagcttctccgttaaaatcaatatggtctgtttcgacaccttctccaatcaaatccacattaggcgcgtcaactacatcttcagttaaatccattagtgacgtggcatctccaattagatcctttcggacaatgtcttcgccgataaaaactgtggtgtcacaatctccatacaatatccaagtttcctctggtaccctggctagagctccagcagtcacggaagctacgcccttaaaagggctggcatccaattctacgttttcctctcgaacctctccagtgactacagcagggtctcttttggagaggtcatcaattactatgacaccccctgcctcccccaaatcaaacattaatatgtattcctcaagtttgccatttaagtcaattattacatcagcagcaccgctaatatcttcacctttaaagtcagtggtgtctccagttaaatcagcagttgatgtcatttcatcagccaaaattacaatggcatcttctctctcatcacctgtgaagcagatgcctggacatgcagaggtagcattagtcaatggatctatttcccctctaaaatatccatcatcctcaactttaattaatggatgcaaagccactgccacgttacaggaaaaaatttcttctgctacaaactctgtgagctctgtggtcagtgcagccactgacacagttgagaaagtgttttctaccacgactgcaatgccattttccccactcaggtcatatgtttctgcagcaccatcagcttttcagtctctaagaactccttccgcaagtgcactctatacatcccttgggtcgtcaatatctgcaactacctcatctgtaacttcatcaattataacagtgccagtatactctgtagtcaatgttttgccagaaccagcattaaagaaacttccagactctaattcatttacaaaatcagcagcagccttgctgtcacccattaaaacattgactacggagacacatcctcagcctcacttcagtcgaacttcatctccagttaagtcatctttgttccttgcaccctctgcccttaagttgtctacaccatcttctttatcttccagtcaggagatactaaaagatgtagctgaaatgaaagaggacctaatgcggatgaccgcaatactacagacagatgtgcctgaggagaagccattccaacctgaactcccaaaggaagggagaatagatgatgaagaacctttcaaaattgtagagaaagtaaaggaagacttagtgaaagttagtgaaatccttaaaaaggatgtatgtgtagataataaaggatcacccaaatcaccaaagagtgacaaaggacactctcctgaagatgactggatagaatttagttcggaagaaatccgggaagccagacaacaagctgctgcgagccagtctccatctctgccagagagagtgcaagtaaaagcaaaagccgcctccgaaaaggattataacttgaccaaagttattgattacctaacaaatgatattgggagtagttcactgacaaacttaaaatacaagtttgaggatgcaaagaaggatggtgaggagagacagaaaagagttttaaaaccagcaattgctttgcaggaacacaaactcaaaatgcctccagcctccatgaggacttccacctctgagaaagaattgtgtaaaatggctgattccttttttggaacagatactattttagagtctcctgatgacttttctcaacacgaccaagataaaagtcccttgtctgacagtggctttgaaacaagaagtgaaaagacaccttcagccccacaaagcgctgaaagcactggtcctaaaccactttttcatgaagttcccatccctcctgtcattacagaaacaagaactgaagtggttcatgttatcaggagctatgatccctcagctggggatgttccccagacccaaccagaggagcctgtgtcacctaaaccttcacctacttttatggaattggaaccaaagcccaccacctctagtattaaagaaaaggttaaagcatttcaaatgaaagccagtagtgaagaagatgaccacaatcgggttttaagcaaaggcatgcgtgttaaagaagagactcacataaccacaaccaccagaatggtttatcattctccaccaggcggtgaaggtgcatctgaaagaattgaagaaaccatgtcagtccatgacatcatgaaggcctttcagtccgggcgggatccttccaaagaactggcaggtctgtttgaacataagtcggcagtgtctccagatgttcacaagtctgctgctgaaacctcagcccagcatgcagagaaggacaaccaaatgaaacccaaactggagcgtataatagaagtccacatcgaaaaaggtaaccaagctgagcccactgaagtcattattagagaaaccaaaaagcatccagaaaaagaaatgtatgtatatcagaaagacttatcccggggagatattaacctaaaagattttctgccagaaaaacacgatgcttttccttgttcagaggaacagggtcagcaagaagaagaagaacttactgctgaagagtcattgccttcttatctggagtcttccagagtaaacactcctgtgtcccaagaagaagatagccgccctagttctgctcaactcatatctgatgactcttataaaacattgaagcttttgagtcaacactcaatagaataccatgacgatgagttgtcagaactaagaggggagtcttacaggtttgctgagaaaatgcttctgtcagaaaagctagatgtgtctcattctgatactgaggaatcggttacagaccatgcaggaccccctagctcagagttacaggggtctgataagcggtccagagaaaaaatagccactgcccccaaaaaagaaattctctccaaaatctataaagatgtttctgaaaatggtgtaggtaaagtgtctaaagatgagcattttgataaagtgacagtgttgcactattctggcaatgttagtagtccaaaacatgccatgtggatgcgctttactgaggacagattagacagaggtagagagaagttgatatatgaagatagggtggacaggactgtgaaggaggctgaagaaaaactgactgaagtgtcacagttttttcgtgacaaaactgaaaagctaaatgatgaactgcagtccccagagaaaaaggcacgccctaaaaatggcaaagaatattcttctcaaagccctaccagtagcagccctgagaaagtgctactgacagaactgctggcatccaatgatgagtgggttaaggcaagacagcatggccctgatggacaaggcttccccaaggccgaggagaaggcacccagtctgcccagcagcccagagaagatggttctctcccaacagactgaggacagcaagtccacagtggaagccaaaggaagtatttcacagagcaaagcaccagatgggccccagtctggattccagctcaaacaatctaaactcagttccattagattaaaatttgaacaaggcacacacgcaaaaagtaaggacatgtctcaagaagacagaaagtcagatggccagtccagaatcccagttaaaaaaatacaggagagcaagctacccgtctaccaagtttttgctagagaaaaacagcagaaggccatagacctcccagatgaaagtgtatctgtgcaaaaagattttatggtattaaaaaccaaagatgagcatgcccaaagcaacgaaattgttgtaaatgattctggctctgataatgtgaaaaaacagagaactgaaatgtcaagtaaagcaatgcctgactctttttctgagcagcaggctaaagacttggcatgtcatataacctcagatttagcaactaggggaccatgggacaaaaaggtctttagaacatgggagagttcgggagccactaacaataagtctcagaaagaaaaactttcgcatgtacttgttcatgatgtaagagagaatcacattggtcaccctgagagtaaaagtgttgatcaaaagaatgaatttatgtctgtgactgagagagaacgcaaattgttaacaaacggctctctctcagaaattaaagaaatgactgtaaaatctccctccaaaaaagtcttatatagggaatatgttgtgaaagaaggggaccatccaggcggattgcttgatcagccttccaggaggagcgagagctcagcagtgtcacacattcccgtcagagttgctgatgagaggagaatgctgtcttctaatattcccgatggtttttgtgaacagtcggcatttccaaaacatgaactatcacaaaaattgtcccagtcaagcatgagtaaagagacagttgagacacagcactttaattctatagaagatgaaaaagttacctattcagaaatcagcaaagtttccaaacaccagagttatgtaggtttatgcccacctctcgaggaaaccgaaacctcccccaccaaatctcctgattctttagagtttagcccaggaaaggaatctccctctagtgatgtattcgaccacagtcccattgatggattggaaaaactcgcaccactagcccagacagagggagggaaagagataaaaactttacccgtttatgtcagttttgtacaagtggggaagcaatatgaaaaggagatacaacaaggaggtgtaaaaaaaatcataagtcaggaatgtaagacagtacaagaaaccagggggaccttttatacaactagacagcaaaagcaacctccttctccccaaggtagtccagaagatgatactctagagcaagtatcctttctagacagctctgggaaaagccctttaaccccagaaacacccagttcagaggaagtgagttatgaatttacatctaagacacctgactcgctcatagcttatataccaggcaaacccagcccaattcccgaggtttctgaggagtcagaggaggaggaacaggccaagtcaacctcccttaagcagactacagtggaggaaacagcagttgagcgtgaaatgcctaatgacgtgagcaaagactctaaccaaagacccaaaaataacagagttgcctatattgaatttccccctcctccaccactggatgcggaccagattgagtcagataagaagcatcattatctcccagaaaaagaggttgacatgattgaagtcaatctgcaagatgagcatgacaagtaccagctggctgaacctgtcattagagtgcagccaccttcaccagttcctcccggggcagacgtcagtgattcaagcgatgacgaatctatttatcagccagtcccagttaaaaaatataccttcaaattaaaggaagtggacgatgaacaaaaagaaaaacccaaagcttctgctgaaaaggcttccaaccagaaagaactggaaagtaatggatctggaaaagataatgaatttggccttggccttgattcacctcagaatgaaattgcccagaatgggaacaacgaccagtccatcacagagtgttccattgccaccacagcagagttttctcatgacacggatgccacagagatcgactctctggatggctatgacctgcaagatgaagatgatggcttgacagagagtgattctaaactcccaattcaagccatggaaattaagaaagatatctggaacacagagggcattctgaagccagctgaccgctcttttagccaaagtaaacttgaagttatcgaggaggagggaaaggtgggaccagatgaggacaagccaccttctaaaagttcttcatctgaaaagactcctgataagactgatcagaagtcaggggcccagttcttcacactggaaggcagacatcctgacagatcagtgtttcctgatacttacttcagttacaaagtagatgaagaatttgccactccttttaaaacagtagctaccaaaggtctagattttgacccttggtctaataaccgaggggatgatgaagtttttgacagtaaatcacgggaagatgaaactaagccatttgggctggcggtagaagaccgctctccagcaacaacccctgatacaacgccagccagaacgccaactgatgaaagtaccccaactagtgagcctaaccccttcccatttcatgaaggaaaaatgtttgagatgactcgcagtggtgcaattgacatgagcaagagggattttgttgaagagaggctccaatttttccagattggtgagcatacttctgaagggaagtcaggggaccagggggaaggggataaaagtatggtcactgccacaccacagccacagtcaggggacaccactgtagaaaccaatctagagagaaatgtagagacacctacagtggaacctaaccccagcatcccgaccagcggagagtgtcaggaaggcacatccagtagtggctccctggagaaatcagcagcagccactaacacctctaaagttgaccccaagttgcgcacgcctataaaaatgggaatttctgcatccaccatgaccatgaagaaagaaggccctggagaaataacagataagatagaagcggtgatgaccagttgtcagggattagaaaatgaaactataacaatgatttcaaatacagccaatagccagatgggcgttaggccccatgaaaaacatgattttcaaaaagataactttaataacaacaacaatttggattcttccactatacagacagataacattatgagtaatatagttctgacagaacattctgcacccacttgtaccacagagaaagataacccagtgaaagtctcatcaggaaaaaagacaggggtactacaaggacactgtgtaagagataagcagaaagttcttggagaacagcaaaaaacaaaggaattgatagggattaggcaaaaatccaaacttcccataaaggccacttcaccaaaagataccttcccaccgaaccatatgtcaaacactaaagcaagtaaaatgaagcaggttagtcaatccgagaaaaccaaagcccttactacttcttcatgtgtagatgtaaagtccagaattccagtgaaaaacacacacagggataacataattgcagttagaaaagcatgtgccacacaaaagcaagggcagccagagaaaggcaaggccaaacagcttccatccaagttgccagtaaaggtaagatccacctgtgtcactaccaccaccaccactgccaccaccaccaccactaccaccactaccaccaccaccagctgcacagttaaagttaggaaaagtcagctcaaggaagtatgtaaacattccattgaatattttaagggaattagtggtgagaccttaaagcttgtggaccgcctctctgaagaagaaaaaaagatgcagtccgagttgtccgatgaggaagaaagtacctcaagaaacacgtcgttgtccgagacttcccggggtggccagccttcggttacaacgaagtctgctagagataagaaaacagaggcagcacctttaaaatcaaagagtgaaaaggccggcagtgagaaaaggagcagtagaaggactggtccacagagtccatgtgaacggacagatatcaggatggcaatagtagccgatcacctgggacttagttggacagaactggcaagggaactgaatttttcagtggatgaaatcaatcaaatacgtgtggaaaatccaaattctttaatttctcagagcttcatgttattaaaaaaatgggttaccagagacggaaaaaatgccacaactgatgccttaacttcggtcttgacaaaaattaatcgaatagatatagtgacactgctagaaggaccaatatttgattatggaaatatttcaggcaccagaagttttgcagatgagaacaatgttttccatgaccctgttgatggttggcagaatgagacatcaagtggaaacctagagtcctgcgctcaagctcgaagagtaactggtgggttactagatcgactggatgacagccctgaccagtgtagagattccattacctcatatctcaaaggagaagctggcaaatttgaagcaaatggaagccatacagaaatcactccagaagcaaagacaaaatcttactttccagaatcccaaaatgatgtaggaaaacagagtaccaaggaaactctgaaaccaaaaatacatggatctggtcatgttgaagaaccagcatcaccactagcagcatatcagaaatctctagaagaaaccagcaagcttataatagaagagactaaaccctgtgtgcctgtcagtatgaaaaagatgagtaggacttctccagcagatggcaagccaaggcttagcctccatgaagaagaggggtccagtgggtctgagcaaaagcagggagaaggttttaaggtgaaaacgaagaaagaaatccggcatgtggaaaagaagagccactcgtaa

SEQ ID NO: 500 - DNA, 3066 bp, Homo sapiens
atggcggacagcgccagcgagagcgacacggacggggcggggggcaacagcagcagctcggccgccatgcagtcgtcctgctcgtcgacctcgggcggcggcggtggcggcgggggaggcggcggcggtgggaagtcggggggcattgtcatctcgccgttccgcctggaggagctcaccaaccgcctggcctcgctgcagcaagagaacaaggtgctgaagatagagctggagacctacaaactgaagtgcaaggcactgcaggaggagaaccgcgacctgcgcaaagccagcgtgaccatccatctaacattcacaagggaatttgattcagattctcttagacattacagctgggctgcagacaccttagacaatgtcaatcttgtttcaagccccattcattctgggtttctggttagctttatggtggacgcgagagggggctccatgagaggaagccgtcatcacgggatgagaatcatcattcctccacgcaagtgtacggcccccactcgaatcacctgccgtttggtaaagagacataaactggccaacccaccccccatggtggaaggagagggattagccagtaggctggtagaaatgggtcctgcaggggcacaatttttaggccctgtcatagtggaaatccctcactttgggtccatgagaggaaaagagagagaactcattgttcttcgaagtgaaaatggtgaaacttggaaggagcatcagtttgacagcaaaaatgaagatttaaccgagttacttaatggcatggatgaagaacttgatagcccagaagagttagggaaaaagcgtatctgcaggattatcacgaaagatttcccccagtattttgcagtggtttcccggattaagcaggaaagcaaccagattggtcctgaaggtggaattctgagcagcaccacagtgccccttgttcaagcatctttcccagagggtgccctaactaaaagaattcgagtgggcctccaggcccagcctgttccagatgaaattgtgaaaaagatccttggaaacaaagcaacttttagcccaattgtcactgtggaaccaagaagacggaaattccataaaccaatcacaatgaccattccggtgcccccgccctcaggagaaggtgtatccaatggatacaaaggggacactacacccaatctgcgtcttctctgtagcattacagggggcacttcgcctgctcagtgggaagacatcacaggaacaactcctttgacgtttataaaagattgtgtctcctttacaaccaatgtttcagccagattttggcttgcagactgccatcaagttttagaaactgtggggttagccacgcaactgtacagagaattgatatgtgttccatatatggccaagtttgttgtttttgccaaaatgaatgatcccgtagaatcttccttgcgatgtttctgcatgacagatgacaaagtggacaaaactttagagcaacaagagaattttgaggaagtcgcaagaagcaaagatattgaggttctggaaggaaaacctatttatgttgattgttatggaaatttggccccacttaccaaaggaggacagcaacttgtttttaacttttattctttcaaagaaaatagactgccattttccatcaagattagagacaccagccaagagccctgtggtcgtctgtcttttctgaaagaaccaaagacaacaaaaggactgcctcaaacagcggtttgcaacttaaatatcactctgccagcacataaaaagattgagaaaacagatagacgacagagcttcgcatccttagctttacgtaagcgctacagctacttgactgagcctggaatgagtccacagagtccatgtgaacggacagatatcaggatggcaatagtagccgatcacctgggacttagttggacagaactggcaagggaactgaatttttcagtggatgaaatcaatcaaatacgtgtggaaaatccaaattctttaatttctcagagcttcatgttattaaaaaaatgggttaccagagacggaaaaaatgccacaactgatgccttaacttcggtcttgacaaaaattaatcgaatagatatagtgacactgctagaaggaccaatatttgattatggaaatatttcaggcaccagaagttttgcagatgagaacaatgttttccatgaccctgttgatggttatccttcccttcaagtggaactggaaacccccacagggttgcactacacaccacctacccctttccagcaagatgattattttagtgatatctctagcatagaatctccccttagaacccctagtagactgagtgatgggctagtgccttcccaggggaacatagagcattccgcagatggacctccagtcgtaactgcagaagacgcttccttagaagacagcaaactggaagactcagtgcctttaacagaaatgcctgaagcagtggatgtagatgagagccagttggagaatgtatgtctgagttggcagaatgagacatcaagtggaaacctagagtcctgcgctcaagctcgaagagtaactggtgggttactagatcgactggatgacagccctgaccagtgtagagattccattacctcatatctcaaaggagaagctggcaaatttgaagcaaatggaagccatacagaaatcactccagaagcaaagacaaaatcttactttccagaatcccaaaatgatgtaggaaaacagagtaccaaggaaactctgaaaccaaaaatacatggatctggtcatgttgaagaaccagcatcaccactagcagcatatcagaaatctctagaagaaaccagcaagcttataatagaagagactaaaccctgtgtgcctgtcagtatgaaaaagatgagtaggacttctccagcagatggcaagccaaggcttagcctccatgaagaagaggggtccagtgggtctgagcaaaagcagggagaaggttttaaggtgaaaacgaagaaagaaatccggcatgtggaaaagaagagccactcgtaa

SEQ ID NO: 501 - DNA, 3381 bp, Homo sapiens
atggcggacagcgccagcgagagcgacacggacggggcggggggcaacagcagcagctcggccgccatgcagtcgtcctgctcgtcgacctcgggcggcggcggtggcggcgggggaggcggcggcggtgggaagtcggggggcattgtcatctcgccgttccgcctggaggagctcaccaaccgcctggcctcgctgcagcaagagaacaaggtgctgaagatagagctggagacctacaaactgaagtgcaaggcactgcaggaggagaaccgcgacctgcgcaaagccagcgtgaccatccaagccagggctgagcaggaagaagaattcattagtaacactttattcaagaaaattcaggctttgcagaaggagaaagaaacccttgctgtaaattatgagaaagaagaagaattcctcactaatgagctctccagaaaattgatgcagttgcagcatgagaaagccgaactagaacagcatcttgaacaagagcaggaatttcaggtcaacaaactgatgaagaaaattaaaaaactggagaatgacaccatttctaagcaacttacattagaacagttgagacgggagaagattgaccttgaaaatacattggaacaagaacaagaagcactagttaatcgcctctggaaaaggatggataagcttgaagctgaaaagcgaatcctgcaggaaaaattagaccagcccgtctctgctccaccatcgcctagagatatctccatggagattgattctccagaaaatatgatgcgtcacatcaggtttttaaagaatgaagtggaacggctgaagaagcaactgagagctgctcagttacagcattcagagaaaatggcacagtatctggaggaggaacgtcacatgagagaagagaacttgaggctccagaggaagctgcagagggagatggagagaagagaagccctctgtcgacagctctccgagagtgagtccagcttagaaatggacgacgaaaggtattttaatgagatgtctgcacaaggattaagacctcgcactgtgtccagcccgatcccttacacaccttctccgagttcaagcaggcctatatcacctgaacttgatagcccagaagagttagggaaaaagcgtatctgcaggattatcacgaaagatttcccccagtattttgcagtggtttcccggattaagcaggaaagcaaccagattggtcctgaaggtggaattctgagcagcaccacagtgccccttgttcaagcatctttcccagagggtgccctaactaaaagaattcgagtgggcctccaggcccagcctgttccagatgaaattgtgaaaaagatccttggaaacaaagcaacttttagcccaattgtcactgtggaaccaagaagacggaaattccataaaccaatcacaatgaccattccggtgcccccgccctcaggagaaggtgtatccaatggatacaaaggggacactacacccaatctgcgtcttctctgtagcattacagggggcacttcgcctgctcagtgggaagacatcacaggaacaactcctttgacgtttataaaagattgtgtctcctttacaaccaatgtttcagccagattttggcttgcagactgccatcaagttttagaaactgtggggttagccacgcaactgtacagagaattgatatgtgttccatatatggccaagtttgttgtttttgccaaaatgaatgatcccgtagaatcttccttgcgatgtttctgcatgacagatgacaaagtggacaaaactttagagcaacaagagaattttgaggaagtcgcaagaagcaaagatattgaggttctggaaggaaaacctatttatgttgattgttatggaaatttggccccacttaccaaaggaggacagcaacttgtttttaacttttattctttcaaagaaaatagactgccattttccatcaagattagagacaccagccaagagccctgtggtcgtctgtcttttctgaaagaaccaaagacaacaaaaggactgcctcaaacagcggtttgcaacttaaatatcactctgccagcacataaaaagattgagaaaacagatagacgacagagcttcgcatccttagctttacgtaagcgctacagctacttgactgagcctggaatgagtccacagagtccatgtgaacggacagatatcaggatggcaatagtagccgatcacctgggacttagttggacagaactggcaagggaactgaatttttcagtggatgaaatcaatcaaatacgtgtggaaaatccaaattctttaatttctcagagcttcatgttattaaaaaaatgggttaccagagacggaaaaaatgccacaactgatgccttaacttcggtcttgacaaaaattaatcgaatagatatagtgacactgctagaaggaccaatatttgattatggaaatatttcaggcaccagaagttttgcagatgagaacaatgttttccatgaccctgttgatggttatccttcccttcaagtggaactggaaacccccacagggttgcactacacaccacctacccctttccagcaagatgattattttagtgatatctctagcatagaatctccccttagaacccctagtagactgagtgatgggctagtgccttcccaggggaacatagagcattccgcagatggacctccagtcgtaactgcagaagacgcttccttagaagacagcaaactggaagactcagtgcctttaacagaaatgcctgaagcagtggatgtagatgagagccagttggagaatgtatgtctgagttggcagaatgagacatcaagtggaaacctagagtcctgcgctcaagctcgaagagtaactggtgggttactagatcgactggatgacagccctgaccagtgtagagattccattacctcatatctcaaaggagaagctggcaaatttgaagcaaatggaagccatacagaaatcactccagaagcaaagacaaaatcttactttccagaatcccaaaatgatgtaggaaaacagagtaccaaggaaactctgaaaccaaaaatacatggatctggtcatgttgaagaaccagcatcaccactagcagcatatcagaaatctctagaagaaaccagcaagcttataatagaagagactaaaccctgtgtgcctgtcagtatgaaaaagatgagtaggacttctccagcagatggcaagccaaggcttagcctccatgaagaagaggggtccagtgggtctgagcaaaagcagggagaaggttttaaggtgaaaacgaagaaagaaatccggcatgtggaaaagaagagccactcgtaa

SEQ ID NO: 502 - DNA, 588 bp, Homo sapiens
atgtactcgggagccggccccgatcctgcagctccaccaaagaaaccgcctcgccctggagctcccggtcatctgggaagccttgccagcctcagcagccctgctgacagctacaacgagggtgtcaagccatggaggcttcagccccaggaaatcagcccccctcctactgccaacctggaccggtcgaatgataaggtgtacgagaatgtgacgggcctggtgaaagctgtcatcgagatgtccagtaaaatccagccagccccaccagaggagtatgtccctatggtgaaggaagtcggcttggccctgaggacattattggccactgtggatgagaccattcccctcctaccagccagcacccaccgagagattgagatggcacagaagctattgaactctgacctgggtgagctcatcaacaagatgaaactggcccagcagtatgtcatgaccagcctccagcaagagtacaaaaagcaaatgctgactgctgctcacgccctggctgtggatgccaaaaacttactcgatgtcattgaccaagcaagactgaaaatgcttgggcagacgagaccacactga

SEQ ID NO: 503 - DNA, 1764 bp, Homo sapiens
atgtactcgggagccggccccgtaacaatgcgtcagtttgaccatcctcatattgtgaagctgattggagtcatcacagagaatcctgtctggataatcatggagctgtgcacacttggagagctgaggtcatttttgcaagtaaggaaatacagtttggatctagcatctttgatcctgtatgcctatcagcttagtacagctcttgcatatctagagagcaaaagatttgtacacagggacattgctgctcggaatgttctggtgtcctcaaatgattgtgtaaaattaggagactttggattatcccgatatatggaagatagtacttactacaaagcttccaaaggaaaattgcctattaaatggatggctccagagtcaatcaattttcgacgttttacctcagctagtgacgtatggatgtttggtgtgtgtatgtgggagatactgatgcatggtgtgaagccttttcaaggagtgaagaacaatgatgtaatcggtcgaattgaaaatggggaaagattaccaatgcctccaaattgtcctcctaccctctacagccttatgacgaaatgctgggcctatgaccccagcaggcggcccaggtttactgaacttaaagctcagctcagcacaatcctggaggaagagaaggctcagcaagaagagcgcatgaggatggagtccagaagacaggccacagtgtcctgggactccggagggtctgatgaagcaccgcccaagcccagcagaccgggttatcccagtccgaggtccagcgaaggattttatcccagcccacagcacatggtacaaaccaatcattaccaggtttctggctaccctggttcacatggaatcacagccatggctggcagcatctatccaggtcaggcatctcttttggaccaaacagattcatggaatcatagacctcaggagatagcaatgtggcagcccaatgtggaggactctacagtattggacctgcgagggattgggcaagtgttgccaacccatctgatggaagagcgtctaatccgacagcaacaggaaatggaagaagatcagcgctggctggaaaaagaggaaagatttctgaaacctgatgtgagactctctcgaggcagtattgacagggaggatggaagtcttcagggtccgattggaaaccaacatatatatcagcctgtgggtaaaccagatcctgcagctccaccaaagaaaccgcctcgccctggagctcccggtcatctgggaagccttgccagcctcagcagccctgctgacagctacaacgagggtgtcaagcttcagccccaggaaatcagcccccctcctactgccaacctggaccggtcgaatgataaggtgtacgagaatgtgacgggcctggtgaaagctgtcatcgagatgtccagtaaaatccagccagccccaccagaggagtatgtccctatggtgaaggaagtcggcttggccctgaggacattattggccactgtggatgagaccattcccctcctaccagccagcacccaccgagagattgagatggcacagaagctattgaactctgacctgggtgagctcatcaacaagatgaaactggcccagcagtatgtcatgaccagcctccagcaagagtacaaaaagcaaatgctgactgctgctcacgccctggctgtggatgccaaaaacttactcgatgtcattgaccaagcaagactgaaaatgcttgggcagacgagaccacactga

SEQ ID NO: 504 - DNA, 1773 bp, Homo sapiens
atgtactcgggagccggccccgtaacaatgcgtcagtttgaccatcctcatattgtgaagctgattggagtcatcacagagaatcctgtctggataatcatggagctgtgcacacttggagagctgaggtcatttttgcaagtaaggaaatacagtttggatctagcatctttgatcctgtatgcctatcagcttagtacagctcttgcatatctagagagcaaaagatttgtacacagggacattgctgctcggaatgttctggtgtcctcaaatgattgtgtaaaattaggagactttggattatcccgatatatggaagatagtacttactacaaagcttccaaaggaaaattgcctattaaatggatggctccagagtcaatcaattttcgacgttttacctcagctagtgacgtatggatgtttggtgtgtgtatgtgggagatactgatgcatggtgtgaagccttttcaaggagtgaagaacaatgatgtaatcggtcgaattgaaaatggggaaagattaccaatgcctccaaattgtcctcctaccctctacagccttatgacgaaatgctgggcctatgaccccagcaggcggcccaggtttactgaacttaaagctcagctcagcacaatcctggaggaagagaaggctcagcaagaagagcgcatgaggatggagtccagaagacaggccacagtgtcctgggactccggagggtctgatgaagcaccgcccaagcccagcagaccgggttatcccagtccgaggtccagcgaaggattttatcccagcccacagcacatggtacaaaccaatcattaccaggtttctggctaccctggttcacatggaatcacagccatggctggcagcatctatccaggtcaggcatctcttttggaccaaacagattcatggaatcatagacctcaggagatagcaatgtggcagcccaatgtggaggactctacagtattggacctgcgagggattgggcaagtgttgccaacccatctgatggaagagcgtctaatccgacagcaacaggaaatggaagaagatcagcgctggctggaaaaagaggaaagatttctgaaacctgatgtgagactctctcgaggcagtattgacagggaggatggaagtcttcagggtccgattggaaaccaacatatatatcagcctgtgggtaaaccagatcctgcagctccaccaaagaaaccgcctcgccctggagctcccggtcatctgggaagccttgccagcctcagcagccctgctgacagctacaacgagggtgtcaagccatggaggcttcagccccaggaaatcagcccccctcctactgccaacctggaccggtcgaatgataaggtgtacgagaatgtgacgggcctggtgaaagctgtcatcgagatgtccagtaaaatccagccagccccaccagaggagtatgtccctatggtgaaggaagtcggcttggccctgaggacattattggccactgtggatgagaccattcccctcctaccagccagcacccaccgagagattgagatggcacagaagctattgaactctgacctgggtgagctcatcaacaagatgaaactggcccagcagtatgtcatgaccagcctccagcaagagtacaaaaagcaaatgctgactgctgctcacgccctggctgtggatgccaaaaacttactcgatgtcattgaccaagcaagactgaaaatgcttgggcagacgagaccacactga

SEQ ID NO: 505 - DNA, 1674 bp, Homo sapiens
atgcgtcagtttgaccatcctcatattgtgaagctgattggagtcatcacagagaatcctgtctggataatcatggagctgtgcacacttggagagctgaggtcatttttgcaagtaaggaaatacagtttggatctagcatctttgatcctgtatgcctatcagcttagtacagctcttgcatatctagagagcaaaagatttgtacacagggacattgctgctcggaatgttctggtgtcctcaaatgattgtgtaaaattaggagactttggattatcccgatatatggaagatagtacttactacaaagcttccaaaggaaaattgcctattaaatggatggctccagagtcaatcaattttcgacgttttacctcagctagtgacgtatggatgtttggtgtgtgtatgtgggagatactgatgcatggtgtgaagccttttcaaggagtgaagaacaatgatgtaatcggtcgaattgaaaatggggaaagattaccaatgcctccaaattgtcctcctaccctctacagccttatgacgaaatgctgggcctatgaccccagcaggcggcccaggtttactgaacttaaagctcagctcagcacaatcctggaggaagagaaggctcagcaagaagagcgcatgaggatggagtccagaagacaggccacagtgtcctgggactccggagggtctgatgaagcaccgcccaagcccagcagaccgggttatcccagtccgaggtccagcgaaggattttatcccagcccacagcacatggtacaaaccaatcattaccaggtttctggctaccctggttcacatggaatcacagccatggctggcagcatctatccaggtcaggcatctcttttggaccaaacagattcatggaatcatagacctcaggagatagcaatgtggcagcccaatgtggaggactctacagtattggacctgcgagggattgggcaagtgttgccaacccatctgatggaagagcgtctaatccgacagcaacaggaaatggaagaagatcagcgctggctggaaaaagaggaaagatttctgattggaaaccaacatatatatcagcctgtgggtaaaccagatcctgcagctccaccaaagaaaccgcctcgccctggagctcccggtcatctgggaagccttgccagcctcagcagccctgctgacagctacaacgagggtgtcaagcttcagccccaggaaatcagcccccctcctactgccaacctggaccggtcgaatgataaggtgtacgagaatgtgacgggcctggtgaaagctgtcatcgagatgtccagtaaaatccagccagccccaccagaggagtatgtccctatggtgaaggaagtcggcttggccctgaggacattattggccactgtggatgagaccattcccctcctaccagccagcacccaccgagagattgagatggcacagaagctattgaactctgacctgggtgagctcatcaacaagatgaaactggcccagcagtatgtcatgaccagcctccagcaagagtacaaaaagcaaatgctgactgctgctcacgccctggctgtggatgccaaaaacttactcgatgtcattgaccaagcaagactgaaaatgcttgggcagacgagaccacactga

SEQ ID NO: 506 - DNA, 579 bp, Homo sapiens
atgtactcgggagccggccccgatcctgcagctccaccaaagaaaccgcctcgccctggagctcccggtcatctgggaagccttgccagcctcagcagccctgctgacagctacaacgagggtgtcaagcttcagccccaggaaatcagcccccctcctactgccaacctggaccggtcgaatgataaggtgtacgagaatgtgacgggcctggtgaaagctgtcatcgagatgtccagtaaaatccagccagccccaccagaggagtatgtccctatggtgaaggaagtcggcttggccctgaggacattattggccactgtggatgagaccattcccctcctaccagccagcacccaccgagagattgagatggcacagaagctattgaactctgacctgggtgagctcatcaacaagatgaaactggcccagcagtatgtcatgaccagcctccagcaagagtacaaaaagcaaatgctgactgctgctcacgccctggctgtggatgccaaaaacttactcgatgtcattgaccaagcaagactgaaaatgcttgggcagacgagaccacactga

SEQ ID NO: 507 - DNA, 1626 bp, Homo sapiens
atgtactcgggagccggccccgtaacaatgcgtcagtttgaccatcctcatattgtgaagctgattggagtcatcacagagaatcctgtctggataatcatggagctgtgcacacttggagagctgaggtcatttttgcaagtaaggaaatacagtttggatctagcatctttgatcctgtatgcctatcagcttagtacagctcttgcatatctagagagcaaaagatttgtacacagggacattgctgctcggaatgttctggtgtcctcaaatgattgtgtaaaattaggagactttggattatcccgatatatggaagatagtacttactacaaagcttccaaaggaaaattgcctattaaatggatggctccagagtcaatcaattttcgacgttttacctcagctagtgacgtatggatgtttggtgtgtgtatgtgggagatactgatgcatggtgtgaagccttttcaaggagtgaagaacaatgatgtaatcggtcgaattgaaaatggggaaagattaccaatgcctccaaattgtcctcctaccctctacagccttatgacgaaatgctgggcctatgaccccagcaggcggcccaggtttactgaacttaaagctcagctcagcacaatcctggaggaagagaaggctcagcaagaagagcgcatgaggatggagtccagaagacaggccacagtgtcctgggactccggagggtctgatgaagcaccgcccaagcccagcagaccgggttatcccagtccgaggtccagcgaaggattttatcccagcccacagcacatggtacaaaccaatcattaccaggactctacagtattggacctgcgagggattgggcaagtgttgccaacccatctgatggaagagcgtctaatccgacagcaacaggaaatggaagaagatcagcgctggctggaaaaagaggaaagatttctgaaacctgatgtgagactctctcgaggcagtattgacagggaggatggaagtcttcagggtccgattggaaaccaacatatatatcagcctgtgggtaaaccagatcctgcagctccaccaaagaaaccgcctcgccctggagctcccggtcatctgggaagccttgccagcctcagcagccctgctgacagctacaacgagggtgtcaagcttcagccccaggaaatcagcccccctcctactgccaacctggaccggtcgaatgataaggtgtacgagaatgtgacgggcctggtgaaagctgtcatcgagatgtccagtaaaatccagccagccccaccagaggagtatgtccctatggtgaaggaagtcggcttggccctgaggacattattggccactgtggatgagaccattcccctcctaccagccagcacccaccgagagattgagatggcacagaagctattgaactctgacctgggtgagctcatcaacaagatgaaactggcccagcagtatgtcatgaccagcctccagcaagagtacaaaaagcaaatgctgactgctgctcacgccctggctgtggatgccaaaaacttactcgatgtcattgaccaagcaagactgaaaatgcttgggcagacgagaccacactga

SEQ ID NO: 508 - DNA, 1803 bp, Homo sapiens
atgtactcgggagccggccccgtaacaatgcgtcagtttgaccatcctcatattgtgaagctgattggagtcatcacagagaatcctgtctggataatcatggagctgtgcacacttggagagctgaggtcatttttgcaagtaaggaaatacagtttggatctagcatctttgatcctgtatgcctatcagcttagtacagctcttgcatatctagagagcaaaagatttgtacacagggacattgctgctcggaatgttctggtgtcctcaaatgattgtgtaaaattaggagactttggattatcccgatatatggaagatagtacttactacaaagcttccaaaggaaaattgcctattaaatggatggctccagagtcaatcaattttcgacgttttacctcagctagtgacgtatggatgtttggtgtgtgtatgtgggagatactgatgcatggtgtgaagccttttcaaggagtgaagaacaatgatgtaatcggtcgaattgaaaatggggaaagattaccaatgcctccaaattgtcctcctaccctctacagccttatgacgaaatgctgggcctatgaccccagcaggcggcccaggtttactgaacttaaagctcagctcagcacaatcctggaggaagagaaggctcagcaagaagagcgcatgaggatggagtccagaagacaggccacagtgtcctgggactccggagggtctgatgaagcaccgcccaagcccagcagaccgggttatcccagtccgaggtccagcgaaggattttatcccagcccacagcacatggtacaaaccaatcattaccaggtttctggctaccctggttcacatggaatcacagccatggctggcagcatctatccaggtcaggcatctcttttggaccaaacagattcatggaatcatagacctcaggagatagcaatgtggcagcccaatgtggaggactctacagtattggacctgcgagggattgggcaagtgttgccaacccatctgatggaagagcgtctaatccgacagcaacaggaaatggaagaagatcagcgctggctggaaaaagaggaaagatttctgaaacctgatgtgagactctctcgaggcagtattgacagggaggatggaagtcttcagggtccgattggaaaccaacatatatatcagcctgtgggtaaaccaggtaaagaagaaaagaattgggcggaaagaaatcctgcagctccaccaaagaaaccgcctcgccctggagctcccggtcatctgggaagccttgccagcctcagcagccctgctgacagctacaacgagggtgtcaagccatggaggcttcagccccaggaaatcagcccccctcctactgccaacctggaccggtcgaatgataaggtgtacgagaatgtgacgggcctggtgaaagctgtcatcgagatgtccagtaaaatccagccagccccaccagaggagtatgtccctatggtgaaggaagtcggcttggccctgaggacattattggccactgtggatgagaccattcccctcctaccagccagcacccaccgagagattgagatggcacagaagctattgaactctgacctgggtgagctcatcaacaagatgaaactggcccagcagtatgtcatgaccagcctccagcaagagtacaaaaagcaaatgctgactgctgctcacgccctggctgtggatgccaaaaacttactcgatgtcattgaccaagcaagactgaaaatgcttgggcagacgagaccacactga

SEQ ID NO: 509 - DNA, 1083 bp, Homo sapiens
atggagtccagaagacaggccacagtgtcctgggactccggagggtctgatgaagcaccgcccaagcccagcagaccgggttatcccagtccgaggtccagcgaaggattttatcccagcccacagcacatggtacaaaccaatcattaccaggtttctggctaccctggttcacatggaatcacagccatggctggcagcatctatccaggtcaggcatctcttttggaccaaacagattcatggaatcatagacctcaggagatagcaatgtggcagcccaatgtggaggactctacagtattggacctgcgagggattgggcaagtgttgccaacccatctgatggaagagcgtctaatccgacagcaacaggaaatggaagaagatcagcgctggctggaaaaagaggaaagatttctgaaacctgatgtgagactctctcgaggcagtattgacagggaggatggaagtcttcagggtccgattggaaaccaacatatatatcagcctgtgggtaaaccagatcctgcagctccaccaaagaaaccgcctcgccctggagctcccggtcatctgggaagccttgccagcctcagcagccctgctgacagctacaacgagggtgtcaagcttcagccccaggaaatcagcccccctcctactgccaacctggaccggtcgaatgataaggtgtacgagaatgtgacgggcctggtgaaagctgtcatcgagatgtccagtaaaatccagccagccccaccagaggagtatgtccctatggtgaaggaagtcggcttggccctgaggacattattggccactgtggatgagaccattcccctcctaccagccagcacccaccgagagattgagatggcacagaagctattgaactctgacctgggtgagctcatcaacaagatgaaactggcccagcagtatgtcatgaccagcctccagcaagagtacaaaaagcaaatgctgactgctgctcacgccctggctgtggatgccaaaaacttactcgatgtcattgaccaagcaagactgaaaatgcttgggcagacgagaccacactga

SEQ ID NO: 510 - DNA, 1494 bp, Homo sapiens
atggtccaggggcctgtgattaccaccaggatctgtatgatgactttgaatgggtgcatgttagtgctcaagagcctcattatctaccacccgagatgccccaaggtaatatttgaagctgaagtctcaggagggagaagtggttatattgccattgatgacatccaagtactgagttatccttgtgataaatctcctcatttcctccgtctaggggatgtagaggtgaatgcagggcaaaacgctacatttcagtgcattgccacagggagagatgctgtgcataacaagttatggctccagagacgaaatggagaagatataccagtagcccagactaagaacatcaatcatagaaggtttgccgcttccttcagattgcaagaagtgacaaaaactgaccaggatttgtatcgctgtgtaactcagtcagaacgaggttccggtgtgtccaattttgctcaacttattgtgagagaaccgccaagacccattgctcctcctcagcttcttggtgttgggcctacatatttgctgatccaactaaatgccaactcgatcattggcgatggtcctatcatcctgaaagaagtagagtaccgaatgacatcaggatcctggacagaaacccatgcagtcaatgctccaacttacaaattatggcatttagatccagataccgaatatgagatccgagttctacttacaagacctggtgaaggtggaacggggctcccaggacctccactaatcaccagaacaaaatgtgcagtgcatcctaacgttagtcaaggctgccaaggaggctgtgcaacatgctcagattacaatggatgtttgtcatgtaagcccagactattttttgctctggaaagaattggcatgaagcagattggagtatgtctctcttcatgtccaagtggatattatggaactcgatatccagatataaataagtgtacaaaatgcaaagctgactgtgatacctgtttcaacaaaaatttctgcacaaaatgtaaaagtggattttacttacaccttggaaagtgccttgacaattgcccagaagggttggaagccaacaaccatactatggagtgtgtcagtattgtgcactgtgaggtcagtgaatggaatccttggagtccatgcacgaagaagggaaaaacatgtggcttcaaaagagggactgaaacacgggtccgagaaataatacagcatccttcagcaaagggtaacctgtgtcccccaacaaatgagacaagaaagtgtacagtgcaaaggaagaagtgtcagaagggagaacgaggaaaaaaaggaagggagaggaaaagaaaaaaacctaataaaggagaaagtaaagaagcaatacctgacagcaaaagtctggaatccagcaaagaaatcccagagcaacgagaaaacaaacagcagcagaagaagcgaaaagtccaagataaacagaaatcggtatcagtcagcactgtacactag

SEQ ID NO: 511 - DNA, 690 bp, Homo sapiens
atggatacgactgcggcggcggcgctgcctgcttttgtggcgctcttgctcctctctccttggcctctcctgggatcggcccaaggccagttctccgcagaatgcaaagctgactgtgatacctgtttcaacaaaaatttctgcacaaaatgtaaaagtggattttacttacaccttggaaagtgccttgacaattgcccagaagggttggaagccaacaaccatactatggagtgtgtcagtattgtgcactgtgaggtcagtgaatggaatccttggagtccatgcacgaagaagggaaaaacatgtggcttcaaaagagggactgaaacacgggtccgagaaataatacagcatccttcagcaaagggtaacctgtgtcccccaacaaatgagacaagaaagtgtacagtgcaaaggaagaagtgtcagaagggagaacgaggaaaaaaaggaagggagaggaaaagaaaaaaacctaataaaggagaaagtaaagaagcaatacctgacagcaaaagtctggaatccagcaaagaaatcccagagcaacgagaaaacaaacagcagcagaagaagcgaaaagtccaagataaacagaaatcggggattgaagtcaccctagctgaaggcctcaccagtgtttcacagaggacacagcccaccccttgcaggaggaggtatctctga

SEQ ID NO: 512 - DNA, 630 bp, Homo sapiens
atggatacgactgcggcggcggcgctgcctgcttttgtggcgctcttgctcctctctccttggcctctcctgggatcggcccaaggccagttctccgcagaatgcaaagctgactgtgatacctgtttcaacaaaaatttctgcacaaaatgtaaaagtggattttacttacaccttggaaagtgccttgacaattgcccagaagggttggaagccaacaaccatactatggagtgtgtcagtattgtgcactgtgaggtcagtgaatggaatccttggagtccatgcacgaagaagggaaaaacatgtggcttcaaaagagggactgaaacacgggtccgagaaataatacagcatccttcagcaaagggtaacctgtgtcccccaacaaatgagacaagaaagtgtacagtgcaaaggaagaagtgtcagaagggagaacgaggaaaaaaaggaagggagaggaaaagaaaaaaacctaataaaggagaaagtaaagaagcaatacctgacagcaaaagtctggaatccagcaaagaaatcccagagcaacgagaaaacaaacagcagcagaagaagcgaaaagtccaagataaacagaaatcggtatcagtcagcactgtacactag

SEQ ID NO: 513 - DNA, 1884 bp, Homo sapiens
atggatacgactgcggcggcggcgctgcctgcttttgtggcgctcttgctcctctctccttggcctctcctgggatcggcccaaggccagttctccgcaggtggctgtacttttgatgatggtccaggggcctgtgattaccaccaggatctgtatgatgactttgaatgggtgcatgttagtgctcaagagcctcattatctaccacccgagatgccccaaggttcctatatgatagtggactcttcagatcacgaccctggagaaaaagccagacttcagctgcctacaatgaaggagaacgacactcactgcattgatttcagttacctattatatagccagaaaggactgaatcctggcactttgaacatattagttagggtgaataaaggacctcttgccaatccaatttggaatgtgactggattcacgggtagagattggcttcgggctgagctagcagtgagcaccttttggcccaatgaatatcaggtaatatttgaagctgaagtctcaggagggagaagtggttatattgccattgatgacatccaagtactgagttatccttgtgataaatctcctcatttcctccgtctaggggatgtagaggtgaatgcagggcaaaacgctacatttcagtgcattgccacagggagagatgctgtgcataacaagttatggctccagagacgaaatggagaagatataccagtagcccagactaagaacatcaatcatagaaggtttgccgcttccttcagattgcaagaagtgacaaaaactgaccaggatttgtatcgctgtgtaactcagtcagaacgaggttccggtgtgtccaattttgctcaacttattgtgagagaaccgccaagacccattgctcctcctcagcttcttggtgttgggcctacatatttgctgatccaactaaatgccaactcgatcattggcgatggtcctatcatcctgaaagaagtagagtaccgaatgacatcaggatcctggacagaaacccatgcagtcaatgctccaacttacaaattatggcatttagatccagataccgaatatgagatccgagttctacttacaagacctggtgaaggtggaacggggctcccaggacctccactaatcaccagaacaaaatgtgcagtgcatcctaacgttagtcaaggctgccaaggaggctgtgcaacatgctcagattacaatggatgtttgtcatgtaagcccagactattttttgctctggaaagaattggcatgaagcagattggagtatgtctctcttcatgtccaagtggatattatggaactcgatatccagatataaataagtgtacaaaatgcaaagctgactgtgatacctgtttcaacaaaaatttctgcacaaaatgtaaaagtggattttacttacaccttggaaagtgccttgacaattgcccagaagggttggaagccaacaaccatactatggagtgtgtcagtattgtgcactgtgaggtcagtgaatggaatccttggagtccatgcacgaagaagggaaaaacatgtggcttcaaaagagggactgaaacacgggtccgagaaataatacagcatccttcagcaaagggtaacctgtgtcccccaacaaatgagacaagaaagtgtacagtgcaaaggaagaagtgtcagaagggagaacgaggaaaaaaaggaagggagaggaaaagaaaaaaacctaataaaggagaaagtaaagaagcaatacctgacagcaaaagtctggaatccagcaaagaaatcccagagcaacgagaaaacaaacagcagcagaagaagcgaaaagtccaagataaacagaaatcggtatcagtcagcactgtacactag

SEQ ID NO: 514 - DNA, 882 bp, Homo sapiens
atggatacgactgcggcggcggcgctgcctgcttttgtggcgctcttgctcctctctccttggcctctcctgggatcggcccaaggccagttctccgcagtgcatcctaacgttagtcaaggctgccaaggaggctgtgcaacatgctcagattacaatggatgtttgtcatgtaagcccagactattttttgctctggaaagaattggcatgaagcagattggagtatgtctctcttcatgtccaagtggatattatggaactcgatatccagatataaataagtgtacaaaatgcaaagctgactgtgatacctgtttcaacaaaaatttctgcacaaaatgtaaaagtggattttacttacaccttggaaagtgccttgacaattgcccagaagggttggaagccaacaaccatactatggagtgtgtcagtattgtgcactgtgaggtcagtgaatggaatccttggagtccatgcacgaagaagggaaaaacatgtggcttcaaaagagggactgaaacacgggtccgagaaataatacagcatccttcagcaaagggtaacctgtgtcccccaacaaatgagacaagaaagtgtacagtgcaaaggaagaagtgtcagaagggagaacgaggaaaaaaaggaagggagaggaaaagaaaaaaacctaataaaggagaaagtaaagaagcaatacctgacagcaaaagtctggaatccagcaaagaaatcccagagcaacgagaaaacaaacagcagcagaagaagcgaaaagtccaagataaacagaaatcggggattgaagtcaccctagctgaaggcctcaccagtgtttcacagaggacacagcccaccccttgcaggaggaggtatctctga

SEQ ID NO: 515 - DNA, 1944 bp, Homo sapiens
atggatacgactgcggcggcggcgctgcctgcttttgtggcgctcttgctcctctctccttggcctctcctgggatcggcccaaggccagttctccgcaggtggctgtacttttgatgatggtccaggggcctgtgattaccaccaggatctgtatgatgactttgaatgggtgcatgttagtgctcaagagcctcattatctaccacccgagatgccccaaggttcctatatgatagtggactcttcagatcacgaccctggagaaaaagccagacttcagctgcctacaatgaaggagaacgacactcactgcattgatttcagttacctattatatagccagaaaggactgaatcctggcactttgaacatattagttagggtgaataaaggacctcttgccaatccaatttggaatgtgactggattcacgggtagagattggcttcgggctgagctagcagtgagcaccttttggcccaatgaatatcaggtaatatttgaagctgaagtctcaggagggagaagtggttatattgccattgatgacatccaagtactgagttatccttgtgataaatctcctcatttcctccgtctaggggatgtagaggtgaatgcagggcaaaacgctacatttcagtgcattgccacagggagagatgctgtgcataacaagttatggctccagagacgaaatggagaagatataccagtagcccagactaagaacatcaatcatagaaggtttgccgcttccttcagattgcaagaagtgacaaaaactgaccaggatttgtatcgctgtgtaactcagtcagaacgaggttccggtgtgtccaattttgctcaacttattgtgagagaaccgccaagacccattgctcctcctcagcttcttggtgttgggcctacatatttgctgatccaactaaatgccaactcgatcattggcgatggtcctatcatcctgaaagaagtagagtaccgaatgacatcaggatcctggacagaaacccatgcagtcaatgctccaacttacaaattatggcatttagatccagataccgaatatgagatccgagttctacttacaagacctggtgaaggtggaacggggctcccaggacctccactaatcaccagaacaaaatgtgcagtgcatcctaacgttagtcaaggctgccaaggaggctgtgcaacatgctcagattacaatggatgtttgtcatgtaagcccagactattttttgctctggaaagaattggcatgaagcagattggagtatgtctctcttcatgtccaagtggatattatggaactcgatatccagatataaataagtgtacaaaatgcaaagctgactgtgatacctgtttcaacaaaaatttctgcacaaaatgtaaaagtggattttacttacaccttggaaagtgccttgacaattgcccagaagggttggaagccaacaaccatactatggagtgtgtcagtattgtgcactgtgaggtcagtgaatggaatccttggagtccatgcacgaagaagggaaaaacatgtggcttcaaaagagggactgaaacacgggtccgagaaataatacagcatccttcagcaaagggtaacctgtgtcccccaacaaatgagacaagaaagtgtacagtgcaaaggaagaagtgtcagaagggagaacgaggaaaaaaaggaagggagaggaaaagaaaaaaacctaataaaggagaaagtaaagaagcaatacctgacagcaaaagtctggaatccagcaaagaaatcccagagcaacgagaaaacaaacagcagcagaagaagcgaaaagtccaagataaacagaaatcggggattgaagtcaccctagctgaaggcctcaccagtgtttcacagaggacacagcccaccccttgcaggaggaggtatctctga

SEQ ID NO: 516 - DNA, 822 bp, Homo sapiens
atggatacgactgcggcggcggcgctgcctgcttttgtggcgctcttgctcctctctccttggcctctcctgggatcggcccaaggccagttctccgcagtgcatcctaacgttagtcaaggctgccaaggaggctgtgcaacatgctcagattacaatggatgtttgtcatgtaagcccagactattttttgctctggaaagaattggcatgaagcagattggagtatgtctctcttcatgtccaagtggatattatggaactcgatatccagatataaataagtgtacaaaatgcaaagctgactgtgatacctgtttcaacaaaaatttctgcacaaaatgtaaaagtggattttacttacaccttggaaagtgccttgacaattgcccagaagggttggaagccaacaaccatactatggagtgtgtcagtattgtgcactgtgaggtcagtgaatggaatccttggagtccatgcacgaagaagggaaaaacatgtggcttcaaaagagggactgaaacacgggtccgagaaataatacagcatccttcagcaaagggtaacctgtgtcccccaacaaatgagacaagaaagtgtacagtgcaaaggaagaagtgtcagaagggagaacgaggaaaaaaaggaagggagaggaaaagaaaaaaacctaataaaggagaaagtaaagaagcaatacctgacagcaaaagtctggaatccagcaaagaaatcccagagcaacgagaaaacaaacagcagcagaagaagcgaaaagtccaagataaacagaaatcggtatcagtcagcactgtacactag

SEQ ID NO: 517 - DNA, 1554 bp, Homo sapiens
atggtccaggggcctgtgattaccaccaggatctgtatgatgactttgaatgggtgcatgttagtgctcaagagcctcattatctaccacccgagatgccccaaggtaatatttgaagctgaagtctcaggagggagaagtggttatattgccattgatgacatccaagtactgagttatccttgtgataaatctcctcatttcctccgtctaggggatgtagaggtgaatgcagggcaaaacgctacatttcagtgcattgccacagggagagatgctgtgcataacaagttatggctccagagacgaaatggagaagatataccagtagcccagactaagaacatcaatcatagaaggtttgccgcttccttcagattgcaagaagtgacaaaaactgaccaggatttgtatcgctgtgtaactcagtcagaacgaggttccggtgtgtccaattttgctcaacttattgtgagagaaccgccaagacccattgctcctcctcagcttcttggtgttgggcctacatatttgctgatccaactaaatgccaactcgatcattggcgatggtcctatcatcctgaaagaagtagagtaccgaatgacatcaggatcctggacagaaacccatgcagtcaatgctccaacttacaaattatggcatttagatccagataccgaatatgagatccgagttctacttacaagacctggtgaaggtggaacggggctcccaggacctccactaatcaccagaacaaaatgtgcagtgcatcctaacgttagtcaaggctgccaaggaggctgtgcaacatgctcagattacaatggatgtttgtcatgtaagcccagactattttttgctctggaaagaattggcatgaagcagattggagtatgtctctcttcatgtccaagtggatattatggaactcgatatccagatataaataagtgtacaaaatgcaaagctgactgtgatacctgtttcaacaaaaatttctgcacaaaatgtaaaagtggattttacttacaccttggaaagtgccttgacaattgcccagaagggttggaagccaacaaccatactatggagtgtgtcagtattgtgcactgtgaggtcagtgaatggaatccttggagtccatgcacgaagaagggaaaaacatgtggcttcaaaagagggactgaaacacgggtccgagaaataatacagcatccttcagcaaagggtaacctgtgtcccccaacaaatgagacaagaaagtgtacagtgcaaaggaagaagtgtcagaagggagaacgaggaaaaaaaggaagggagaggaaaagaaaaaaacctaataaaggagaaagtaaagaagcaatacctgacagcaaaagtctggaatccagcaaagaaatcccagagcaacgagaaaacaaacagcagcagaagaagcgaaaagtccaagataaacagaaatcggggattgaagtcaccctagctgaaggcctcaccagtgtttcacagaggacacagcccaccccttgcaggaggaggtatctctga

SEQ ID NO: 518 - DNA, 1407 bp, Homo sapiens
atggatacgactgcggcggcggcgctgcctgcttttgtggcgctcttgctcctctctccttggcctctcctgggatcggcccaaggccagttctccgcaggtggctgtacttttgatgatggtccaggggcctgtgattaccaccaggatctgtatgatgactttgaatgggtgcatgttagtgctcaagagcctcattatctaccacccgagatgccccaaggttcctatatgatagtggactcttcagatcacgaccctggagaaaaagccagacttcagctgcctacaatgaaggagaacgacactcactgcattgatttcagttacctattatatagccagaaaggactgaatcctggcactttgaacatattagttagggtgaataaaggacctcttgccaatccaatttggaatgtgactggattcacgggtagagattggcttcgggctgagctagcagtgagcaccttttggcccaatgaatatcaggtaatatttgaagctgaagtctcaggagggagaagtggttatattgccattgatgacatccaagtactgagttatccttgtgataaatctcctcatttcctccgtctaggggatgtagaggtgaatgcagggcaaaacgctacatttcagtgcattgccacagggagagatgctgtgcataacaagttatggctccagagacgaaatggagaagatataccagtagcccagactaagaacatcaatcatagaaggtttgccgcttccttcagattgcaagaagtgacaaaaactgaccaggatttgtatcgctgtgtaactcagtcagaacgaggttccggtgtgtccaattttgctcaacttattgtgagagaaccgccaagacccattgctcctcctcagcttcttggtgttgggcctacatatttgctgatccaactaaatgccaactcgatcattggcgatggtcctatcatcctgaaagaagtagagtaccgaatgacatcaggatcctggacagaaacccatgcagtcaatgctccaacttacaaattatggcatttagatccagataccgaatatgagatccgagttctacttacaagacctggtgaaggtggaacggggctcccaggacctccactaatcaccagaacaaaatgtgcaggaaaaaaaggaagggagaggaaaagaaaaaaacctaataaaggagaaagtaaagaagcaatacctgacagcaaaagtctggaatccagcaaagaaatcccagagcaacgagaaaacaaacagcagcagaagaagcgaaaagtccaagataaacagaaatcggggattgaagtcaccctagctgaaggcctcaccagtgtttcacagaggacacagcccaccccttgcaggaggaggtatctctga

SEQ ID NO: 519 - DNA, 1017 bp, Homo sapiens
atggtccaggggcctgtgattaccaccaggatctgtatgatgactttgaatgggtgcatgttagtgctcaagagcctcattatctaccacccgagatgccccaaggtaatatttgaagctgaagtctcaggagggagaagtggttatattgccattgatgacatccaagtactgagttatccttgtgataaatctcctcatttcctccgtctaggggatgtagaggtgaatgcagggcaaaacgctacatttcagtgcattgccacagggagagatgctgtgcataacaagttatggctccagagacgaaatggagaagatataccagtagcccagactaagaacatcaatcatagaaggtttgccgcttccttcagattgcaagaagtgacaaaaactgaccaggatttgtatcgctgtgtaactcagtcagaacgaggttccggtgtgtccaattttgctcaacttattgtgagagaaccgccaagacccattgctcctcctcagcttcttggtgttgggcctacatatttgctgatccaactaaatgccaactcgatcattggcgatggtcctatcatcctgaaagaagtagagtaccgaatgacatcaggatcctggacagaaacccatgcagtcaatgctccaacttacaaattatggcatttagatccagataccgaatatgagatccgagttctacttacaagacctggtgaaggtggaacggggctcccaggacctccactaatcaccagaacaaaatgtgcaggaaaaaaaggaagggagaggaaaagaaaaaaacctaataaaggagaaagtaaagaagcaatacctgacagcaaaagtctggaatccagcaaagaaatcccagagcaacgagaaaacaaacagcagcagaagaagcgaaaagtccaagataaacagaaatcggggattgaagtcaccctagctgaaggcctcaccagtgtttcacagaggacacagcccaccccttgcaggaggaggtatctctga

SEQ ID NO: 520 - DNA, 285 bp, Homo sapiens
atggatacgactgcggcggcggcgctgcctgcttttgtggcgctcttgctcctctctccttggcctctcctgggatcggcccaaggccagttctccgcaggaaaaaaaggaagggagaggaaaagaaaaaaacctaataaaggagaaagtaaagaagcaatacctgacagcaaaagtctggaatccagcaaagaaatcccagagcaacgagaaaacaaacagcagcagaagaagcgaaaagtccaagataaacagaaatcggtatcagtcagcactgtacactag

SEQ ID NO: 521 - DNA, 447 bp, Homo sapiens
atggcacagcaagctgccgataagtatctctatgtggataaaaacttcatcaacaatccgctggcccaggccgactgggctgccaagaagctggtatgggtgccttccgacaagagtggctttgagccagccagcctcaaggaggaggtgggcgaagaggccatcgtggagctggtggagaatgggaagaaggtgaaggtgaacaaggatgacatccagaagatgaacccgcccaagttctccaaggtggaggacatggcagagctcacgtgcctcaacgaagcctcggtgctgcacaacctcaaggagcgttactactcagggctcatctacgtgtcagcggtgcccactgtgctggccatgaagaatggggacgtggtggacaagtttgtgggcatcaaggatgaggatcagttggaggccttcctgaagaagctgattggctga

SEQ ID NO: 522 - DNA, 501 bp, Homo sapiens
atggctcagcgacttcttctgaggaggttcctggcctctgtcatctccaggaagccctctcagggtcagtggccacccctcacttccagagccctgcagaccccacaatgcagtcctggtggcctgactgtaacacccaacccagcccggacaatatacaccacgaggatctccttgacaacctttaatatccaggatggacctgactttcaagaccgagtggtcaacagtgagacaccagtggttgtggatttccacgcacagtggtgtggaccctgcaagatcctggggccgaggttagagaagatggtggccaagcagcacgggaaggtggtgatggccaaggtggatattgatgaccacacagacctcgccattgagtatgaggtgtcagcggtgcccactgtgctggccatgaagaatggggacgtggtggacaagtttgtgggcatcaaggatgaggatcagttggaggccttcctgaagaagctgattggctga

SEQ ID NO: 523 - DNA, 2205 bp, Homo sapiens
atgtacaagggcaagaagaggcacgagatgccccctcacatctatgccatcacagacaccgcctacaggagtatgatgcaagaccgagaagatcaatccatcttgtgcactggtgaatctggagctggcaagacggagaacaccaagaaggtcatccagtatctggcgtacgtggcgtcctcgcacaagagcaagaaggaccagggcgagctggagcggcagctgctgcaggccaaccccatcctggaggccttcgggaacgccaagaccgtgaagaatgacaactcctcccgcttcggcaaattcattcgcatcaactttgatgtcaatggctacattgttggagccaacattgagacttatcttttggagaaatctcgtgctatccgccaagccaaggaagaacggaccttccacatcttctattatctcctgtctggggctggagagcacctgaagaccgatctcctgttggagccgtacaacaaataccgcttcctgtccaatggacacgtcaccatccccgggcagcaggacaaggacatgttccaggagaccatggaggccatgaggattatgggcatcccagaagaggagcaaatgggcctgctgcgggtcatctcaggggttcttcagctcggcaacatcgtcttcaagaaggagcggaacactgaccaggcgtccatgcccgacaacacagctgcccaaaaggtgtcccatctcttgggtatcaatgtgaccgatttcaccagaggaatcctcaccccgcgcatcaaggtgggacgggattacgtccagaaggcgcagactaaagagcaggctgactttgccatcgaggccttggccaaggcgacctatgagcggatgttccgctggctggtgctgcgcatcaacaaggctctggacaagaccaagaggcagggcgcctccttcatcgggatcctggacattgccggcttcgagatctttgatctgaactcgtttgagcagctgtgcatcaattacaccaatgagaagctgcagcagctcttcaaccacaccatgttcatcctggagcaggaggagtaccagcgcgagggcatcgagtggaacttcatcgactttggcctcgacctgcagccctgcatcgacctcattgagaagccagcaggccccccgggcattctggccctgctggacgaggagtgctggttccccaaagccaccgacaagagcttcgtggagaaggtgatgcaggagcagggcacccaccccaagttccagaagcccaagcagctgaaggacaaagctgatttctgcattatccactatgccggcaaggtggattacaaagctgacgagtggctgatgaagaacatggatcccctgaatgacaacatcgccacactgctccaccagtcctctgacaagtttgtctcggagctgtggaaggatgtggaccgcatcatcggcctggaccaggtggccggcatgtcggagaccgcactgcccggggccttcaagacgcggaagggcatgttccgcactgtggggcagctttacaaggagcagctggccaagctgatggctacgctgaggaacacgaaccccaactttgtccgctgcatcatccccaaccacgagaagaaggccggcaagctggacccgcatctcgtgctggaccagctgcgctgcaacggtgttctcgagggcatccgtatctgccgccagggcttccccaacagggtggtcttccaggagtttcggcagagatatgagatcctgactccaaactccattcccaagggtttcatggacgggaagcaggcgtgcgtgctcatgataaaagccctggagctcgacagcaatctgtaccgcattggccagagcaaagtcttcttccgtgccggtgtgctggcccacctggaggaggagcgagacctgaagatcaccgacgtcatcatagggttccaggcctgctgcaggggctacctggccaggaaagcatttgccaagcggcagcagcagcttaccgccatgaaggtcctccagcggaactgcgctgcctacctgaagctgcggaactggcagtggtggcggctcttcaccaaggtgtcagcggtgcccactgtgctggccatgaagaatggggacgtggtggacaagtttgtgggcatcaaggatgaggatcagttggaggccttcctgaagaagctgattggctga

SEQ ID NO: 524 - DNA, 2613 bp, Homo sapiens
atggcacagcaagctgccgataagtatctctatgtggataaaaacttcatcaacaatccgctggcccaggccgactgggctgccaagaagctggtatgggtgccttccgacaagagtggctttgagccagccagcctcaaggaggaggtgggcgaagaggccatcgtggagctggtggagaatgggaagaaggtgaaggtgaacaaggatgacatccagaagatgaacccgcccaagttctccaaggtggaggacatggcagagctcacgtgcctcaacgaagcctcggtgctgcacaacctcaaggagcgttactactcagggctcatctacacctattcaggcctgttctgtgtggtcatcaatccttacaagaacctgcccatctactctgaagagattgtggaaatgtacaagggcaagaagaggcacgagatgccccctcacatctatgccatcacagacaccgcctacaggagtatgatgcaagaccgagaagatcaatccatcttgtgcactggtgaatctggagctggcaagacggagaacaccaagaaggtcatccagtatctggcgtacgtggcgtcctcgcacaagagcaagaaggaccagggcgagctggagcggcagctgctgcaggccaaccccatcctggaggccttcgggaacgccaagaccgtgaagaatgacaactcctcccgcttcggcaaattcattcgcatcaactttgatgtcaatggctacattgttggagccaacattgagacttatcttttggagaaatctcgtgctatccgccaagccaaggaagaacggaccttccacatcttctattatctcctgtctggggctggagagcacctgaagaccgatctcctgttggagccgtacaacaaataccgcttcctgtccaatggacacgtcaccatccccgggcagcaggacaaggacatgttccaggagaccatggaggccatgaggattatgggcatcccagaagaggagcaaatgggcctgctgcgggtcatctcaggggttcttcagctcggcaacatcgtcttcaagaaggagcggaacactgaccaggcgtccatgcccgacaacacagctgcccaaaaggtgtcccatctcttgggtatcaatgtgaccgatttcaccagaggaatcctcaccccgcgcatcaaggtgggacgggattacgtccagaaggcgcagactaaagagcaggctgactttgccatcgaggccttggccaaggcgacctatgagcggatgttccgctggctggtgctgcgcatcaacaaggctctggacaagaccaagaggcagggcgcctccttcatcgggatcctggacattgccggcttcgagatctttgatctgaactcgtttgagcagctgtgcatcaattacaccaatgagaagctgcagcagctcttcaaccacaccatgttcatcctggagcaggaggagtaccagcgcgagggcatcgagtggaacttcatcgactttggcctcgacctgcagccctgcatcgacctcattgagaagccagcaggccccccgggcattctggccctgctggacgaggagtgctggttccccaaagccaccgacaagagcttcgtggagaaggtgatgcaggagcagggcacccaccccaagttccagaagcccaagcagctgaaggacaaagctgatttctgcattatccactatgccggcaaggtggattacaaagctgacgagtggctgatgaagaacatggatcccctgaatgacaacatcgccacactgctccaccagtcctctgacaagtttgtctcggagctgtggaaggatgtggaccgcatcatcggcctggaccaggtggccggcatgtcggagaccgcactgcccggggccttcaagacgcggaagggcatgttccgcactgtggggcagctttacaaggagcagctggccaagctgatggctacgctgaggaacacgaaccccaactttgtccgctgcatcatccccaaccacgagaagaaggccggcaagctggacccgcatctcgtgctggaccagctgcgctgcaacggtgttctcgagggcatccgtatctgccgccagggcttccccaacagggtggtcttccaggagtttcggcagagatatgagatcctgactccaaactccattcccaagggtttcatggacgggaagcaggcgtgcgtgctcatgataaaagccctggagctcgacagcaatctgtaccgcattggccagagcaaagtcttcttccgtgccggtgtgctggcccacctggaggaggagcgagacctgaagatcaccgacgtcatcatagggttccaggcctgctgcaggggctacctggccaggaaagcatttgccaagcggcagcagcagcttaccgccatgaaggtcctccagcggaactgcgctgcctacctgaagctgcggaactggcagtggtggcggctcttcaccaaggtgtcagcggtgcccactgtgctggccatgaagaatggggacgtggtggacaagtttgtgggcatcaaggatgaggatcagttggaggccttcctgaagaagctgattggctga

SEQ ID NO: 525 - DNA, 906 bp, Homo sapiens
atgatcccgcggaaacgctacgggtctaagaacacggatcagggtgtctacctgggtctctcaaagacacaggtcctgtcccctgcaactgctggcagtagcagcagcgacatcgcccctctgccccccccagtgaccctcgtccctccccctcccgacaccatgtcctgccgggatcggacccaggagtttctgtctgcctgcaagtcgctgcagacccgtcagaatggaatccagacaaataagccagctttgcgtgctgtccgacaacgcagtgaattcaccctcatggccaagcgcattgggaaagaccttagcaacacatttgccaagctggagaagctgacaatcttggcaaagcgcaagtccctctttgatgataaagcagtggaaattgaagagctaacatatatcatcaaacaggtccgtgtttatgatccagcatccccccagcgccggccagtcctagagaccacctatggagagtacccactaacagccatgaccctcactccgggaggcaactcagtgattgtgggaaacactcatgggcagctggcagaaattgaccttcggcaagggcgtctactgggctgtctgaaggggctggcaggcagtgtgcgtgggttgcagtgccacccttcaaagcctctactagcctcctgtggcttggacagagtcttgaggatacacaggatccagaatccacggggtctggagcataaggatgagccccaagagcctcaagaacccaacaaggtgcccctagaagacacagagacagatgaactttgggcatccttggaggcagctgccaagcggaagctctcgggtttggagcagccccaaggagctctccaaacgagacggagaaagaagaagcggcctgggtccaccagcccctga

SEQ ID NO: 526 - DNA, 1101 bp, Homo sapiens
atggcggctgctgctgcacgctggaaccatgtgtgggtcggcaccgagactgggatcttgaaaggggtaaatcttcagcgaaaacaggcggcgaacttcacggccggaggacagccgcggcgcgaggaggcagtgagcgccctgtgttggggcaccggcggcgagacccagatgctggtgggctgcgcggacaggacggtgaagcacttcagcaccgaggatggcatattccagggtcagagacactgcccgggcggggagggcatgttccgtggcctcgcccaggccgacggcaccctcatcacatgtgtggattctgggattctcagagtctggcatgacaaggacaaggacacatcctctgacccactcctggaactgagagtgggccctggggtgtgtaggatgcgccaagacccagcacacccccatgtggttgccacaggtgggaaagagaatgctttgaagatatgggacctgcagggctctgaggaacctgtgttcagggccaagaacgtgcggaatgactggctggacttgcgggttcccatctgggaccaggacatacagtttctcccaggatcacagaagcttgtcacctgcacagggtaccaccaggtccgtgtttatgatccagcatccccccagcgccggccagtcctagagaccacctatggagagtacccactaacagccatgaccctcactccgggaggcaactcagtgattgtgggaaacactcatgggcagctggcagaaattgaccttcggcaagggcgtctactgggctgtctgaaggggctggcaggcagtgtgcgtgggttgcagtgccacccttcaaagcctctactagcctcctgtggcttggacagagtcttgaggatacacaggatccagaatccacggggtctggagcataaggatgagccccaagagcctcaagaacccaacaaggtgcccctagaagacacagagacagatgaactttgggcatccttggaggcagctgccaagcggaagctctcgggtttggagcagccccaaggagctctccaaacgagacggagaaagaagaagcggcctgggtccaccagcccctga

SEQ ID NO: 527 - DNA, 675 bp, Homo sapiens
atggccaagcgcattgggaaagaccttagcaacacatttgccaagctggagaagctgacaatcttggcaaagcgcaagtccctctttgatgataaagcagtggaaattgaagagctaacatatatcatcaaacaggtccgtgtttatgatccagcatccccccagcgccggccagtcctagagaccacctatggagagtacccactaacagccatgaccctcactccgggaggcaactcagtgattgtgggaaacactcatgggcagctggcagaaattgaccttcggcaagggcgtctactgggctgtctgaaggggctggcaggcagtgtgcgtgggttgcagtgccacccttcaaagcctctactagcctcctgtggcttggacagagtcttgaggatacacaggatccagaatccacggggtctggagcataaggtttatctcaagtctcaattgaactgcctcctcttgtcaggcagggacaactgggaggatgagccccaagagcctcaagaacccaacaaggtgcccctagaagacacagagacagatgaactttgggcatccttggaggcagctgccaagcggaagctctcgggtttggagcagccccaaggagctctccaaacgagacggagaaagaagaagcggcctgggtccaccagcccctga

SEQ ID NO: 528 - DNA, 618 bp, Homo sapiens
atggccaagcgcattgggaaagaccttagcaacacatttgccaagctggagaagctgacaatcttggcaaagcgcaagtccctctttgatgataaagcagtggaaattgaagagctaacatatatcatcaaacaggtccgtgtttatgatccagcatccccccagcgccggccagtcctagagaccacctatggagagtacccactaacagccatgaccctcactccgggaggcaactcagtgattgtgggaaacactcatgggcagctggcagaaattgaccttcggcaagggcgtctactgggctgtctgaaggggctggcaggcagtgtgcgtgggttgcagtgccacccttcaaagcctctactagcctcctgtggcttggacagagtcttgaggatacacaggatccagaatccacggggtctggagcataaggatgagccccaagagcctcaagaacccaacaaggtgcccctagaagacacagagacagatgaactttgggcatccttggaggcagctgccaagcggaagctctcgggtttggagcagccccaaggagctctccaaacgagacggagaaagaagaagcggcctgggtccaccagcccctga

SEQ ID NO: 529 - DNA, 603 bp, Homo sapiens
atggcggctgctgctgcacgctggaaccatgtgtgggtcggcaccgagactgggatcttgaaaggggtaaatcttcagcgaaaacaggcggcgaacttcacggccggaggacagccgcggcgcgaggaggcagtgagcgccctgtgttggggcaccggcggcgagacccagatgctggtgggctgcgcggacaggacggtgaagcacttcagcaccgaggatggcatattccagggtcagagacactgcccgggcggggagggcatgttccgtggcctcgcccaggccgacggcaccctcatcacatgtgtggattctgggattctcagagtctggcatgacaaggacaaggacacatcctctgacccactcctggaactgagagtgggccctggggtgtgtaggatgcgccaagacccagcacacccccatgtggttgccacaggtgggaaagagaatgctttgaagatatgggacctgcagggctctgaggaacctgtgttcagggccaagaacgtgagtgacaagagtgtgaaggagctgttcctgaagtcgagggaggctgaggccactgacgatgcattagagactagatggacttag

SEQ ID NO: 530 - DNA, 963 bp, Homo sapiens
atgatcccgcggaaacgctacgggtctaagaacacggatcagggtgtctacctgggtctctcaaagacacaggtcctgtcccctgcaactgctggcagtagcagcagcgacatcgcccctctgccccccccagtgaccctcgtccctccccctcccgacaccatgtcctgccgggatcggacccaggagtttctgtctgcctgcaagtcgctgcagacccgtcagaatggaatccagacaaataagccagctttgcgtgctgtccgacaacgcagtgaattcaccctcatggccaagcgcattgggaaagaccttagcaacacatttgccaagctggagaagctgacaatcttggcaaagcgcaagtccctctttgatgataaagcagtggaaattgaagagctaacatatatcatcaaacaggtccgtgtttatgatccagcatccccccagcgccggccagtcctagagaccacctatggagagtacccactaacagccatgaccctcactccgggaggcaactcagtgattgtgggaaacactcatgggcagctggcagaaattgaccttcggcaagggcgtctactgggctgtctgaaggggctggcaggcagtgtgcgtgggttgcagtgccacccttcaaagcctctactagcctcctgtggcttggacagagtcttgaggatacacaggatccagaatccacggggtctggagcataaggtttatctcaagtctcaattgaactgcctcctcttgtcaggcagggacaactgggaggatgagccccaagagcctcaagaacccaacaaggtgcccctagaagacacagagacagatgaactttgggcatccttggaggcagctgccaagcggaagctctcgggtttggagcagccccaaggagctctccaaacgagacggagaaagaagaagcggcctgggtccaccagcccctga

SEQ ID NO: 531 - DNA, 1158 bp, Homo sapiens
atggcggctgctgctgcacgctggaaccatgtgtgggtcggcaccgagactgggatcttgaaaggggtaaatcttcagcgaaaacaggcggcgaacttcacggccggaggacagccgcggcgcgaggaggcagtgagcgccctgtgttggggcaccggcggcgagacccagatgctggtgggctgcgcggacaggacggtgaagcacttcagcaccgaggatggcatattccagggtcagagacactgcccgggcggggagggcatgttccgtggcctcgcccaggccgacggcaccctcatcacatgtgtggattctgggattctcagagtctggcatgacaaggacaaggacacatcctctgacccactcctggaactgagagtgggccctggggtgtgtaggatgcgccaagacccagcacacccccatgtggttgccacaggtgggaaagagaatgctttgaagatatgggacctgcagggctctgaggaacctgtgttcagggccaagaacgtgcggaatgactggctggacttgcgggttcccatctgggaccaggacatacagtttctcccaggatcacagaagcttgtcacctgcacagggtaccaccaggtccgtgtttatgatccagcatccccccagcgccggccagtcctagagaccacctatggagagtacccactaacagccatgaccctcactccgggaggcaactcagtgattgtgggaaacactcatgggcagctggcagaaattgaccttcggcaagggcgtctactgggctgtctgaaggggctggcaggcagtgtgcgtgggttgcagtgccacccttcaaagcctctactagcctcctgtggcttggacagagtcttgaggatacacaggatccagaatccacggggtctggagcataaggtttatctcaagtctcaattgaactgcctcctcttgtcaggcagggacaactgggaggatgagccccaagagcctcaagaacccaacaaggtgcccctagaagacacagagacagatgaactttgggcatccttggaggcagctgccaagcggaagctctcgggtttggagcagccccaaggagctctccaaacgagacggagaaagaagaagcggcctgggtccaccagcccctga

SEQ ID NO: 532 - DNA, 546 bp, Homo sapiens
atgaagtccagcggcctcttccccttcctggtgctgcttgccctgggaactctggcaccttgggctgtggaaggctctggaaagtccttcaaagctggagtctgtcctcctaagaaatctgcccagtgccttagatacaagaaacctgagtgccagagtgactggcagtgtccagggaagaagagatgttgtcctgacacttgtggcatcaaatgcctggatcctgttgacaccccaaacccaacaaggaggaagcctgggaagtgcccagtgacttatggccaatgtttgatgcttaacccccccaatttctgtgagatggatggccagtgcaagcgtgacttgaagtgttgcatgggcatgtgtgggaaatcctgcgtttcccctgtgaaagataaggagggttcctgcccccaggtgaacattaactttccccagctcggcctctgtcgggaccagtgccaggtggacagccagtgtcctggccagatgaaatgctgccgcaatggctgtgggaaggtgtcctgtgtcactcccaatttctga

SEQ ID NO: 533 - DNA, 396 bp, Homo sapiens
atgaagtccagcggcctcttccccttcctggtgctgcttgccctgggaactctggcaccttgggctgtggaaggctctggaaagtccttcaaagctggagtctgtcctcctaagaaatctgcccagtgccttagatacaagaaacctgagtgccagagtgactggcagtgtccagggaagaagagatgttgtcctgacacttgtggcatcaaatgcctggatcctgttgacaccccaaacccaaataaggagggttcctgcccccaggtgaacattaactttccccagctcggcctctgtcgggaccagtgccaggtggacagccagtgtcctggccagatgaaatgctgccgcaatggctgtgggaaggtgtcctgtgtcactcccaatttctga

SEQ ID NO: 534 - DNA, 1137 bp, Homo sapiens
atggctagcgaagacaatcgtgtcccttccccgccaccaacaggtgatgacgggggaggtggagggagagaagaaacccctactgaagggggtgcattgtctctgaaaccagggctccccatcaggggcatcagaatgaaatttgccgtgttgaccggtttggttgaagttggagaagtatccaatagggatattgtagaaactgtctttaacctggatccaagccacgctcagaagcctgttgacagtggtgctcctcatgctgtcgttcttcatgatttcccagcagagcaagttgatgatttgaacctcacttctggagaaattgtttatcttctggagaagatagatacagattggtacagagggaactgtagaaaccagattggcatatttcctgccaactatgtcaaagtgattattgatatcccagaaggaggaaatgggaaaagagaatgtgtttcatctcattgtgttaaaggctcaagatgtgttgctcggtttgaatatattggagagcagaaggatgagttgagtttctcagagggagaaattattattcttaaagagtatgtgaatgaggaatgggccagaggagaagttcgaggcagaactgggattttccccctgaactttgtggagcctgttgaggattatcccacctctggtgcaaatgttttaagcacaaaggtaccactgaaaaccaaaaaagaagattctggctcaaactctcaggttaacagtcttccggcagaatggtgtgaagctcttcacagttttacagcagagaccagtgatgacttatcattcaagaggggagaccggatccagattctggaacgtctggattctgactggtgcaggggcagactgcaggacagggaggggatcttcccagcagtgtttgtgaggccctgcccagctgaggcaaaaagtatgttggccatagtaccgaaggggaggaaggccaaagccttatatgatttccgaggggagaatgaagatgaactttccttcaaggctggagatataataacagagctggaatctgtagatgatgactggatgagtggagaacttatgggaaaatctggaatatttcccaaaaactacatacagtttctacagatcagctag

SEQ ID NO: 535 - DNA, 1674 bp, Homo sapiens
atggctagcgaagacaatcgtgtcccttccccgccaccaacaggtgatgacgggggaggtggagggagagaagaaacccctactgaagggggtgcattgtctctgaaaccagggctccccatcaggggcatcagaatgaaatttgccgtgttgaccggtttggttgaagttggagaagtatccaatagggatattgtagaaactgtctttaacctggaatccaaccacccaggtcaaacaggaggttttgtgcgagtacccccaaggttgccaccgagacctgtgaatggaaaaaccattccaactcaacagcctccaaccaaggtgccccctgagagaccacctcccccaaagctttctgcaaccagaagatctaataagaaactgccttttaatcgatcctcttctgacatggatcttcagaaaaaacaaagtaacttggcaactggactctcaaaagccaagagtcaagtttttaaaaatcaagatccggtgctaccccctcgtcccaaaccaggacaccctctctacagtaaatacatgctgtctgtgcctcatggaattgccaatgaagatattgtctctcaaaaccccggagaactctcttgtaagcgtggggatgtacttgtgatgctgaagcagacggaaaataattacttggagtgccaaaagggagaagacactggcagagttcacctgtctcaaatgaagattatcactccacttgatgaacatcttagaagcagaccaaacgatccaagccacgctcagaagcctgttgacagtggtgctcctcatgctgtcgttcttcatgatttcccagcagagcaagttgatgatttgaacctcacttctggagaaattgtttatcttctggagaagatagatacagattggtacagagggaactgtagaaaccagattggcatatttcctgccaactatgtcaaagtgattattgatatcccagaaggaggaaatgggaaaagagaatgtgtttcatctcattgtgttaaaggctcaagatgtgttgctcggtttgaatatattggagagcagaaggatgagttgagtttctcagagggagaaattattattcttaaagagtatgtgaatgaggaatgggccagaggagaagttcgaggcagaactgggattttccccctgaactttgtggagcctgttgaggattatcccacctctggtgcaaatgttttaagcacaaaggtaccactgaaaaccaaaaaagaagattctggctcaaactctcaggttaacagtcttccggcagaatggtgtgaagctcttcacagttttacagcagagaccagtgatgacttatcattcaagaggggagaccggatccagattctggaacgtctggattctgactggtgcaggggcagactgcaggacagggaggggatcttcccagcagtgtttgtgaggccctgcccagctgaggcaaaaagtatgttggccatagtaccgaaggggaggaaggccaaagccttatatgatttccgaggggagaatgaagatgaactttccttcaaggctggagatataataacagagctggaatctgtagatgatgactggatgagtggagaacttatgggaaaatctggaatatttcccaaaaactacatacagtttctacagatcagctag

SEQ ID NO: 536 - DNA, 1605 bp, Homo sapiens
atggctagcgaagacaatcgtgtcccttccccgccaccaacaggtgatgacgggggaggtggagggagagaagaaacccctactgaagggggtgcattgtctctgaaaccagggctccccatcaggggcatcagaatgaaatttgccgtgttgaccggtttggttgaagttggagaagtatccaatagggatattgtagaaactgtctttaacctggaatccaaccacccaggtcaaacaggaggttttgtgcgagtacccccaaggttgccaccgagacctgtgaatggaaaaaccattccaactcaacagcctccaaccaaggtgccccctgagagaccacctcccccaaagctttctgcaaccagaagatctaataagaaactgccttttaatcgatcctcttctgacatggatcttcagaaaaaacaaagtaacttggcaactggactctcaaaagccaagagtcaagtttttaaaaatcaagatccggtgctaccccctcgtcccaaaccaggacaccctctctacagtaaatacatgcgtggggatgtacttgtgatgctgaagcagacggaaaataattacttggagtgccaaaagggagaagacactggcagagttcacctgtctcaaatgaagattatcactccacttgatgaacatcttagaagcagaccaaacgatccaagccacgctcagaagcctgttgacagtggtgctcctcatgctgtcgttcttcatgatttcccagcagagcaagttgatgatttgaacctcacttctggagaaattgtttatcttctggagaagatagatacagattggtacagagggaactgtagaaaccagattggcatatttcctgccaactatgtcaaagtgattattgatatcccagaaggaggaaatgggaaaagagaatgtgtttcatctcattgtgttaaaggctcaagatgtgttgctcggtttgaatatattggagagcagaaggatgagttgagtttctcagagggagaaattattattcttaaagagtatgtgaatgaggaatgggccagaggagaagttcgaggcagaactgggattttccccctgaactttgtggagcctgttgaggattatcccacctctggtgcaaatgttttaagcacaaaggtaccactgaaaaccaaaaaagaagattctggctcaaactctcaggttaacagtcttccggcagaatggtgtgaagctcttcacagttttacagcagagaccagtgatgacttatcattcaagaggggagaccggatccagattctggaacgtctggattctgactggtgcaggggcagactgcaggacagggaggggatcttcccagcagtgtttgtgaggccctgcccagctgaggcaaaaagtatgttggccatagtaccgaaggggaggaaggccaaagccttatatgatttccgaggggagaatgaagatgaactttccttcaaggctggagatataataacagagctggaatctgtagatgatgactggatgagtggagaacttatgggaaaatctggaatatttcccaaaaactacatacagtttctacagatcagctag

SEQ ID NO: 537 - DNA, 933 bp, Homo sapiens
atggctagcgaagacaatcgtgtcccttccccgccaccaacaggtgatgacgggggaggtggagggagagaagaaacccctactgaagggggtgcattgtctctgaaaccagggctccccatcaggggcatcagaatgaaatttgccgtgttgaccggtttggttgaagttggagaagtatccaatagggatattgtagaaactgtctttaacctgattgatatcccagaaggaggaaatgggaaaagagaatgtgtttcatctcattgtgttaaaggctcaagatgtgttgctcggtttgaatatattggagagcagaaggatgagttgagtttctcagagggagaaattattattcttaaagagtatgtgaatgaggaatgggccagaggagaagttcgaggcagaactgggattttccccctgaactttgtggagcctgttgaggattatcccacctctggtgcaaatgttttaagcacaaaggtaccactgaaaaccaaaaaagaagattctggctcaaactctcaggttaacagtcttccggcagaatggtgtgaagctcttcacagttttacagcagagaccagtgatgacttatcattcaagaggggagaccggatccagattctggaacgtctggattctgactggtgcaggggcagactgcaggacagggaggggatcttcccagcagtgtttgtgaggccctgcccagctgaggcaaaaagtatgttggccatagtaccgaaggggaggaaggccaaagccttatatgatttccgaggggagaatgaagatgaactttccttcaaggctggagatataataacagagctggaatctgtagatgatgactggatgagtggagaacttatgggaaaatctggaatatttcccaaaaactacatacagtttctacagatcagctag

SEQ ID NO: 538 - DNA, 2835 bp, Homo sapiens
atggccttgctgggtaagcgctgtgacgtccccaccaacggctgcggacccgaccgctggaactccgcgttcacccgcaaagacgagatcatcaccagcctcgtgtctgccttagactccatgtgctcagcgctgtccaaactgaacgccgaggtggcctgtgtcgccgtgcacgatgagagcgcctttgtggtgggcacagagaaggggagaatgttcctgaatgcccggaaggagctacagtcagacttcctcaggttctgccgagggcccccgtggaaggatccggaggcagagcaccccaagaaggtgcagcggggcgagggtggaggccgtagcctccctcggtcctccctggaacatggctcagatgtgtaccttctgcggaagatggtagaggaggtgtttgatgttctttatagcgaggccctgggaagggccagtgtggtgccactgccctatgagaggctgctcagggagccagggctgctggccgtgcaggggctgcccgaaggcctggccttccgaaggccagccgagtatgaccccaaggccctcatggccatcctggaacacagccaccgcatccgcttcaagctcaagaggccacttgaggatggcgggcgggactcgaaggccctggtggagctgaacggtgtctccctgattcccaaggggtcacgggactgtggcctgcatggccaggcccccaaggtgccaccccaggacctgcccccaaccgccacctcctcctccatggccagcttcctgtacagcacggcgctccccaaccacgccatccgagagctcaagcaggaagcaccttcctgcccccttgcccccagcgacctgggcctgagtcggcccatgccagagcccaaggccaccggtgcccaagacttctccgactgttgtggacagaagcccactgggcctggtgggcctctcatccagaacgtccatgcctccaagcgcattctcttctccatcgtccatgacaagtcagagaagtgggacgccttcataaaggaaaccgaggacatcaacacgctccgggagtgtgtgcagatcctgtttaacagcagatatgcggaagccctgggcctggaccacatggtccccgtgccctaccggaagattgcctgtgacccggaggctgtggagatcgtgggcatcccggacaagatccccttcaagcgcccctgcacttatggagtccccaagctgaagcggatcctggaggagcgccatagtatccacttcatcattaagaggatgtttgatgagcgaattttcacagggaacaagtttaccaaagacaccacgaagctggagccagccagcccgccagaggacacctctgcagaggtctctagggccaccgtccttgaccttgctgggaatgctcggtcagacaagggcagcatgtctgaagactgtgggccaggaacctccggggagctgggcgggctgaggccgatcaaaattgagccagaggatctggacatcattcaggtcaccgtcccagacccctcgccaacctctgaggaaatgacagactcgatgcctgggcacctgccatcggaggattctggttatgggatggagatgctgacagacaaaggtctgagtgaggacgcgcggcccgaggagaggcccgtggaggacagccacggtgacgtgatccggcccctgcggaagcaggtggagctgctcttcaacacacgatacgccaaggccattggcatctcggagcccgtcaaggtgccgtactccaagtttctgatgcacccggaggagctgtttgtggtgggactgcctgaaggcatctccctccgcaggcccaactgcttcgggatcgccaagctccggaagattctggaggccagcaacagcatccagtttgtcatcaagaggcccgagctgctcactgagggagtcaaagagcccatcatggatagtcaagagagggattccggggaccctctggtggacgagagcctgaagagacagggctttcaagaaaattatgacgcgaggctctcacggatcgacatcgccaacacactaagggagcaggtccaggaccttttcaataagaaatacggggaagccttgggcatcaagtacccggtccaggtcccctacaagcggatcaagagtaaccccggctccgtgatcatcgaggggctgcccccaggaatcccgttccgaaagccctgtaccttcggctcccagaacctggagaggattcttgctgtggctgacaagatcaagttcacagtcaccaggcctttccaaggactcatcccaaagcctgatgaagatgacgccaacagactcggggagaaggtgatcctgcgggagcaggtgaaggaactcttcaacgagaaatacggtgaggccctgggcctgaaccggccggtgctggtcccttataaactaatccgggacagcccagacgccgtggaggtcacgggtctgcctgatgacatccccttccggaaccccaacacgtacgacatccaccggctggagaagatcctgaaggcccgagagcatgtccgcatggtcatcattaaccagctccaaccctttgcagaaatctgcaatgatgccaaggtgccagccaaagacagcagcattcccaagcgcaagagaaagcgggtctcggaaggaaattccgtctcctcttcctcctcgtcttcctcttcctcgtcctctaacccggattcagtggcatcggccaaccagatctcactcgtgcaatggccaatgtacatggtggactatgccggcctgaacgtgcagctcccgggacctcttaattactag

SEQ ID NO: 539 - DNA, 1248 bp, Homo sapiens
atggcccaagttgcaatgtccaccctccccgttgaagatgaggagtcctcggagagcaggatggtggtgacattcctcatgtcagctctcgagtccatgtgtaaagaactggccaagtccaaagccgaagtggcctgcattgcagtgtatgaaacagacgtgtttgtcgtcggaactgaaagaggacgtgcttttgtcaataccagaaaggattttcaaaaagattttgtaaaatattgtgttgaagaagaagaaaaagctgcagagatgcataaaatgaaatctacaacccaggcaaatcggatgagtgtagatgctgtagaaattgaaacactcagaaaaacagttgaggactatttctgcttttgctatgggaaagctttaggcaaatccacagtggtacctgtaccatatgagaagatgctgcgagaccagtcggctgtggtagtgcaggggcttccggaaggtgttgcctttaaacaccccgagaactatgatcttgcaaccctgaaatggattttggagaacaaagcagggatttcattcatcattaagagaccttttttagagccaaagaagcatgtaggtggtcgtgtgatggtaacagatgctgacaggtcaatactatctccaggtggaagttgtggccccatcaaagtgaaaactgaacccacagaagattctgatgaagatgacgccaacagactcggggagaaggtgatcctgcgggagcaggtgaaggaactcttcaacgagaaatacggtgaggccctgggcctgaaccggccggtgctggtcccttataaactaatccgggacagcccagacgccgtggaggtcacgggtctgcctgatgacatccccttccggaaccccaacacgtacgacatccaccggctggagaagatcctgaaggcccgagagcatgtccgcatggtcatcattaaccagctccaaccctttgcagaaatctgcaatgatgccaaggtgccagccaaagacagcagcattcccaagcgcaagagaaagcgggtctcggaaggaaattccgtctcctcttcctcctcgtcttcctcttcctcgtcctctaacccggattcagtggcatcggccaaccagatctcactcgtggtaaagttgcaccgatttggactccggcactcatctctgtggccctcacccctctgtctggcagggccgtctactctgggatgtgggcccaggggacggggaggcactgggctttga

SEQ ID NO: 540 - DNA, 2082 bp, Homo sapiens
atggcccaagttgcaatgtccaccctccccgttgaagatgaggagtcctcggagagcaggatggtggtgacattcctcatgtcagctctcgagtccatgtgtaaagaactggccaagtccaaagccgaagtggcctgcattgcagtgtatgaaacagacgtgtttgtcgtcggaactgaaagaggacgtgcttttgtcaataccagaaaggattttcaaaaagattttgtaaaatattgtgttgaagaagaagaaaaagctgcagagatgcataaaatgaaatctacaacccaggcaaatcggatgagtgtagatgctgtagaaattgaaacactcagaaaaacagttgaggactatttctgcttttgctatgggaaagctttaggcaaatccacagtggtacctgtaccatatgagaagatgctgcgagaccagtcggctgtggtagtgcaggggcttccggaaggtgttgcctttaaacaccccgagaactatgatcttgcaaccctgaaatggattttggagaacaaagcagggatttcattcatcattaagagaccttttttagagccaaagaagcatgtaggtggtcgtgtgatggtaacagatgctgacaggtcaatactatctccaggtggaagttgtggccccatcaaagtgaaaactgaacccacagaagattctggcatttccctggaaatggcagctgtgacagtaaaggaagaatcagaagatcctgattattatcaatataacattcaaggaagccaccattcttcagagggcaatgaaggcacagaaatggaagtaccagcagaagacaaaggtctgagtgaggacgcgcggcccgaggagaggcccgtggaggacagccacggtgacgtgatccggcccctgcggaagcaggtggagctgctcttcaacacacgatacgccaaggccattggcatctcggagcccgtcaaggtgccgtactccaagtttctgatgcacccggaggagctgtttgtggtgggactgcctgaaggcatctccctccgcaggcccaactgcttcgggatcgccaagctccggaagattctggaggccagcaacagcatccagtttgtcatcaagaggcccgagctgctcactgagggagtcaaagagcccatcatggatagtcaaggaactgcctcctcacttggcttctctccccctgccctgcccccagagagggattccggggaccctctggtggacgagagcctgaagagacagggctttcaagaaaattatgacgcgaggctctcacggatcgacatcgccaacacactaagggagcaggtccaggaccttttcaataagaaatacggggaagccttgggcatcaagtacccggtccaggtcccctacaagcggatcaagagtaaccccggctccgtgatcatcgaggggctgcccccaggaatcccgttccgaaagccctgtaccttcggctcccagaacctggagaggattcttgctgtggctgacaagatcaagttcacagtcaccaggcctttccaaggactcatcccaaagcctgatgaagatgacgccaacagactcggggagaaggtgatcctgcgggagcaggtgaaggaactcttcaacgagaaatacggtgaggccctgggcctgaaccggccggtgctggtcccttataaactaatccgggacagcccagacgccgtggaggtcacgggtctgcctgatgacatccccttccggaaccccaacacgtacgacatccaccggctggagaagatcctgaaggcccgagagcatgtccgcatggtcatcattaaccagctccaaccctttgcagaaatctgcaatgatgccaaggtgccagccaaagacagcagcattcccaagcgcaagagaaagcgggtctcggaaggaaattccgtctcctcttcctcctcgtcttcctcttcctcgtcctctaacccggattcagtggcatcggccaaccagatctcactcgtgcaatggccaatgtacatggtggactatgccggcctgaacgtgcagctcccgggacctcttaattactag

SEQ ID NO: 541 - DNA, 2034 bp, Homo sapiens
atggcccaagttgcaatgtccaccctccccgttgaagatgaggagtcctcggagagcaggatggtggtgacattcctcatgtcagctctcgagtccatgtgtaaagaactggccaagtccaaagccgaagtggcctgcattgcagtgtatgaaacagacgtgtttgtcgtcggaactgaaagaggacgtgcttttgtcaataccagaaaggattttcaaaaagattttgtaaaatattgtgttgaagaagaagaaaaagctgcagagatgcataaaatgaaatctacaacccaggcaaatcggatgagtgtagatgctgtagaaattgaaacactcagaaaaacagttgaggactatttctgcttttgctatgggaaagctttaggcaaatccacagtggtacctgtaccatatgagaagatgctgcgagaccagtcggctgtggtagtgcaggggcttccggaaggtgttgcctttaaacaccccgagaactatgatcttgcaaccctgaaatggattttggagaacaaagcagggatttcattcatcattaagagaccttttttagagccaaagaagcatgtaggtggtcgtgtgatggtaacagatgctgacaggtcaatactatctccaggtggaagttgtggccccatcaaagtgaaaactgaacccacagaagattctggcatttccctggaaatggcagctgtgacagtaaaggaagaatcagaagatcctgattattatcaatataacattcaaggaagccaccattcttcagagggcaatgaaggcacagaaatggaagtaccagcagaagacagccacggtgacgtgatccggcccctgcggaagcaggtggagctgctcttcaacacacgatacgccaaggccattggcatctcggagcccgtcaaggtgccgtactccaagtttctgatgcacccggaggagctgtttgtggtgggactgcctgaaggcatctccctccgcaggcccaactgcttcgggatcgccaagctccggaagattctggaggccagcaacagcatccagtttgtcatcaagaggcccgagctgctcactgagggagtcaaagagcccatcatggatagtcaaggaactgcctcctcacttggcttctctccccctgccctgcccccagagagggattccggggaccctctggtggacgagagcctgaagagacagggctttcaagaaaattatgacgcgaggctctcacggatcgacatcgccaacacactaagggagcaggtccaggaccttttcaataagaaatacggggaagccttgggcatcaagtacccggtccaggtcccctacaagcggatcaagagtaaccccggctccgtgatcatcgaggggctgcccccaggaatcccgttccgaaagccctgtaccttcggctcccagaacctggagaggattcttgctgtggctgacaagatcaagttcacagtcaccaggcctttccaaggactcatcccaaagcctgatgaagatgacgccaacagactcggggagaaggtgatcctgcgggagcaggtgaaggaactcttcaacgagaaatacggtgaggccctgggcctgaaccggccggtgctggtcccttataaactaatccgggacagcccagacgccgtggaggtcacgggtctgcctgatgacatccccttccggaaccccaacacgtacgacatccaccggctggagaagatcctgaaggcccgagagcatgtccgcatggtcatcattaaccagctccaaccctttgcagaaatctgcaatgatgccaaggtgccagccaaagacagcagcattcccaagcgcaagagaaagcgggtctcggaaggaaattccgtctcctcttcctcctcgtcttcctcttcctcgtcctctaacccggattcagtggcatcggccaaccagatctcactcgtgcaatggccaatgtacatggtggactatgccggcctgaacgtgcagctcccgggacctcttaattactag

SEQ ID NO: 542 - DNA, 2085 bp, Homo sapiens
atggcccaagttgcaatgtccaccctccccgttgaagatgaggagtcctcggagagcaggatggtggtgacattcctcatgtcagctctcgagtccatgtgtaaagaactggccaagtccaaagccgaagtggcctgcattgcagtgtatgaaacagacgtgtttgtcgtcggaactgaaagaggacgtgcttttgtcaataccagaaaggattttcaaaaagattttgtaaaatattgtgttgaagaagaagaaaaagctgcagagatgcataaaatgaaatctacaacccaggcaaatcggatgagtgtagatgctgtagaaattgaaacactcagaaaaacagttgaggactatttctgcttttgctatgggaaagctttaggcaaatccacagtggtacctgtaccatatgagaagatgctgcgagaccagtcggctgtggtagtgcaggggcttccggaaggtgttgcctttaaacaccccgagaactatgatcttgcaaccctgaaatggattttggagaacaaagcagggatttcattcatcattaagagaccttttttagagccaaagaagcatgtaggtggtcgtgtgatggtaacagatgctgacaggtcaatactatctccaggtggaagttgtggccccatcaaagtgaaaactgaacccacagaagattctggcatttccctggaaatggcagctgtgacagtaaaggaagaatcagaagatcctgattattatcaatataacattcaaggaagccaccattcttcagagggcaatgaaggcacagaaatggaagtaccagcagaagacaaaggtctgagtgaggacgcgcggcccgaggagaggcccgtggaggacagccacggtgacgtgatccggcccctgcggaagcaggtggagctgctcttcaacacacgatacgccaaggccattggcatctcggagcccgtcaaggtgccgtactccaagtttctgatgcacccggaggagctgtttgtggtgggactgcctgaaggcatctccctccgcaggcccaactgcttcgggatcgccaagctccggaagattctggaggccagcaacagcatccagtttgtcatcaagaggcccgagctgctcactgagggagtcaaagagcccatcatggatagtcaagagagggattccggggaccctctggtggacgagagcctgaagagacagggctttcaagaaaattatgacgcgaggctctcacggatcgacatcgccaacacactaagggagcaggtccaggaccttttcaataagaaatacggggaagccttgggcatcaagtacccggtccaggtcccctacaagcggatcaagagtaaccccggctccgtgatcatcgaggggctgcccccaggaatcccgttccgaaagccctgtaccttcggctcccagaacctggagaggattcttgctgtggctgacaagatcaagttcacagtcaccaggcctttccaaggactcatcccaaagcctgatgaagatgacgccaacagactcggggagaaggtgatcctgcgggagcaggtgaaggaactcttcaacgagaaatacggtgaggccctgggcctgaaccggccggtgctggtcccttataaactaatccgggacagcccagacgccgtggaggtcacgggtctgcctgatgacatccccttccggaaccccaacacgtacgacatccaccggctggagaagatcctgaaggcccgagagcatgtccgcatggtcatcattaaccagctccaaccctttgcagaaatctgcaatgatgccaaggtgccagccaaagacagcagcattcccaagcgcaagagaaagcgggtctcggaaggaaattccgtctcctcttcctcctcgtcttcctcttcctcgtcctctaacccggattcagtggcatcggccaaccagatctcactcgtggtaaagttgcaccgatttggactccggcactcatctctgtggccctcacccctctgtctggcagggccgtctactctgggatgtgggcccaggggacggggaggcactgggctttga

SEQ ID NO: 543 - DNA, 2145 bp, Homo sapiens
atggcccaagttgcaatgtccaccctccccgttgaagatgaggagtcctcggagagcaggatggtggtgacattcctcatgtcagctctcgagtccatgtgtaaagaactggccaagtccaaagccgaagtggcctgcattgcagtgtatgaaacagacgtgtttgtcgtcggaactgaaagaggacgtgcttttgtcaataccagaaaggattttcaaaaagattttgtaaaatattgtgttgaagaagaagaaaaagctgcagagatgcataaaatgaaatctacaacccaggcaaatcggatgagtgtagatgctgtagaaattgaaacactcagaaaaacagttgaggactatttctgcttttgctatgggaaagctttaggcaaatccacagtggtacctgtaccatatgagaagatgctgcgagaccagtcggctgtggtagtgcaggggcttccggaaggtgttgcctttaaacaccccgagaactatgatcttgcaaccctgaaatggattttggagaacaaagcagggatttcattcatcattaagagaccttttttagagccaaagaagcatgtaggtggtcgtgtgatggtaacagatgctgacaggtcaatactatctccaggtggaagttgtggccccatcaaagtgaaaactgaacccacagaagattctggcatttccctggaaatggcagctgtgacagtaaaggaagaatcagaagatcctgattattatcaatataacattcaagcaggcccttctgaaactgatgatgttgatgaaaaacagcccctatcgaagcctttgcaaggaagccaccattcttcagagggcaatgaaggcacagaaatggaagtaccagcagaagacaaaggtctgagtgaggacgcgcggcccgaggagaggcccgtggaggacagccacggtgacgtgatccggcccctgcggaagcaggtggagctgctcttcaacacacgatacgccaaggccattggcatctcggagcccgtcaaggtgccgtactccaagtttctgatgcacccggaggagctgtttgtggtgggactgcctgaaggcatctccctccgcaggcccaactgcttcgggatcgccaagctccggaagattctggaggccagcaacagcatccagtttgtcatcaagaggcccgagctgctcactgagggagtcaaagagcccatcatggatagtcaagagagggattccggggaccctctggtggacgagagcctgaagagacagggctttcaagaaaattatgacgcgaggctctcacggatcgacatcgccaacacactaagggagcaggtccaggaccttttcaataagaaatacggggaagccttgggcatcaagtacccggtccaggtcccctacaagcggatcaagagtaaccccggctccgtgatcatcgaggggctgcccccaggaatcccgttccgaaagccctgtaccttcggctcccagaacctggagaggattcttgctgtggctgacaagatcaagttcacagtcaccaggcctttccaaggactcatcccaaagcctgatgaagatgacgccaacagactcggggagaaggtgatcctgcgggagcaggtgaaggaactcttcaacgagaaatacggtgaggccctgggcctgaaccggccggtgctggtcccttataaactaatccgggacagcccagacgccgtggaggtcacgggtctgcctgatgacatccccttccggaaccccaacacgtacgacatccaccggctggagaagatcctgaaggcccgagagcatgtccgcatggtcatcattaaccagctccaaccctttgcagaaatctgcaatgatgccaaggtgccagccaaagacagcagcattcccaagcgcaagagaaagcgggtctcggaaggaaattccgtctcctcttcctcctcgtcttcctcttcctcgtcctctaacccggattcagtggcatcggccaaccagatctcactcgtggtaaagttgcaccgatttggactccggcactcatctctgtggccctcacccctctgtctggcagggccgtctactctgggatgtgggcccaggggacggggaggcactgggctttga

SEQ ID NO: 544 - DNA, 2037 bp, Homo sapiens
atggcccaagttgcaatgtccaccctccccgttgaagatgaggagtcctcggagagcaggatggtggtgacattcctcatgtcagctctcgagtccatgtgtaaagaactggccaagtccaaagccgaagtggcctgcattgcagtgtatgaaacagacgtgtttgtcgtcggaactgaaagaggacgtgcttttgtcaataccagaaaggattttcaaaaagattttgtaaaatattgtgttgaagaagaagaaaaagctgcagagatgcataaaatgaaatctacaacccaggcaaatcggatgagtgtagatgctgtagaaattgaaacactcagaaaaacagttgaggactatttctgcttttgctatgggaaagctttaggcaaatccacagtggtacctgtaccatatgagaagatgctgcgagaccagtcggctgtggtagtgcaggggcttccggaaggtgttgcctttaaacaccccgagaactatgatcttgcaaccctgaaatggattttggagaacaaagcagggatttcattcatcattaagagaccttttttagagccaaagaagcatgtaggtggtcgtgtgatggtaacagatgctgacaggtcaatactatctccaggtggaagttgtggccccatcaaagtgaaaactgaacccacagaagattctggcatttccctggaaatggcagctgtgacagtaaaggaagaatcagaagatcctgattattatcaatataacattcaaggaagccaccattcttcagagggcaatgaaggcacagaaatggaagtaccagcagaagacaaaggtctgagtgaggacgcgcggcccgaggagaggcccgtggaggacagccacggtgacgtgatccggcccctgcggaagcaggtggagctgctcttcaacacacgatacgccaaggccattggcatctcggagcccgtcaaggtgccgtactccaagtttctgatgcacccggaggagctgtttgtggtgggactgcctgaaggcatctccctccgcaggcccaactgcttcgggatcgccaagctccggaagattctggaggccagcaacagcatccagtttgtcatcaagaggcccgagctgctcactgagggagtcaaagagcccatcatggatagtcaagagagggattccggggaccctctggtggacgagagcctgaagagacagggctttcaagaaaattatgacgcgaggctctcacggatcgacatcgccaacacactaagggagcaggtccaggaccttttcaataagaaatacggggaagccttgggcatcaagtacccggtccaggtcccctacaagcggatcaagagtaaccccggctccgtgatcatcgaggggctgcccccaggaatcccgttccgaaagccctgtaccttcggctcccagaacctggagaggattcttgctgtggctgacaagatcaagttcacagtcaccaggcctttccaaggactcatcccaaagcctgatgaagatgacgccaacagactcggggagaaggtgatcctgcgggagcaggtgaaggaactcttcaacgagaaatacggtgaggccctgggcctgaaccggccggtgctggtcccttataaactaatccgggacagcccagacgccgtggaggtcacgggtctgcctgatgacatccccttccggaaccccaacacgtacgacatccaccggctggagaagatcctgaaggcccgagagcatgtccgcatggtcatcattaaccagctccaaccctttgcagaaatctgcaatgatgccaaggtgccagccaaagacagcagcattcccaagcgcaagagaaagcgggtctcggaaggaaattccgtctcctcttcctcctcgtcttcctcttcctcgtcctctaacccggattcagtggcatcggccaaccagatctcactcgtgcaatggccaatgtacatggtggactatgccggcctgaacgtgcagctcccgggacctcttaattactag

SEQ ID NO: 545 - DNA, 939 bp, Homo sapiens
atggcccaagttgcaatgtccaccctccccgttgaagatgaggagtcctcggagagcaggatggtggtgacattcctcatgtcagctctcgagtccatgtgtaaagaactggccaagtccaaagccgaagtggcctgcattgcagtgtatgaaacagacgtgtttgtcgtcggaactgaaagaggacgtgcttttgtcaataccagaaaggattttcaaaaagattttgtaaaatattgtgttgaagaagaagaaaaagctgcagagatgcataaaatgaaatctacaacccaggcaaatcggatgagtgtagatgctgtagaaattgaaacactcagaaaaacagttgaggactatttctgcttttgctatgggaaagctttaggcaaatccacagtggtacctgtaccatatgagaagatgctgcgagaccagtcggctgtggtagtgcaggggcttccggaaggtgttgcctttaaacaccccgagaactatgatcttgcaaccctgaaatggattttggagaacaaagcagggatttcattcatcattaagagaccttttttagagccaaagaagcatgtaggtggtcgtgtgatggtaacagatgctgacaggtcaatactatctccaggtggaagttgtggccccatcaaagtgaaaactgaacccacagaagattctgccaaagacagcagcattcccaagcgcaagagaaagcgggtctcggaaggaaattccgtctcctcttcctcctcgtcttcctcttcctcgtcctctaacccggattcagtggcatcggccaaccagatctcactcgtggtaaagttgcaccgatttggactccggcactcatctctgtggccctcacccctctgtctggcagggccgtctactctgggatgtgggcccaggggacggggaggcactgggctttga

SEQ ID NO: 546 - DNA, 1200 bp, Homo sapiens
atggcccaagttgcaatgtccaccctccccgttgaagatgaggagtcctcggagagcaggatggtggtgacattcctcatgtcagctctcgagtccatgtgtaaagaactggccaagtccaaagccgaagtggcctgcattgcagtgtatgaaacagacgtgtttgtcgtcggaactgaaagaggacgtgcttttgtcaataccagaaaggattttcaaaaagattttgtaaaatattgtgttgaagaagaagaaaaagctgcagagatgcataaaatgaaatctacaacccaggcaaatcggatgagtgtagatgctgtagaaattgaaacactcagaaaaacagttgaggactatttctgcttttgctatgggaaagctttaggcaaatccacagtggtacctgtaccatatgagaagatgctgcgagaccagtcggctgtggtagtgcaggggcttccggaaggtgttgcctttaaacaccccgagaactatgatcttgcaaccctgaaatggattttggagaacaaagcagggatttcattcatcattaagagaccttttttagagccaaagaagcatgtaggtggtcgtgtgatggtaacagatgctgacaggtcaatactatctccaggtggaagttgtggccccatcaaagtgaaaactgaacccacagaagattctgatgaagatgacgccaacagactcggggagaaggtgatcctgcgggagcaggtgaaggaactcttcaacgagaaatacggtgaggccctgggcctgaaccggccggtgctggtcccttataaactaatccgggacagcccagacgccgtggaggtcacgggtctgcctgatgacatccccttccggaaccccaacacgtacgacatccaccggctggagaagatcctgaaggcccgagagcatgtccgcatggtcatcattaaccagctccaaccctttgcagaaatctgcaatgatgccaaggtgccagccaaagacagcagcattcccaagcgcaagagaaagcgggtctcggaaggaaattccgtctcctcttcctcctcgtcttcctcttcctcgtcctctaacccggattcagtggcatcggccaaccagatctcactcgtgcaatggccaatgtacatggtggactatgccggcctgaacgtgcagctcccgggacctcttaattactag

SEQ ID NO: 547 - DNA, 2880 bp, Homo sapiens
atggccttgctgggtaagcgctgtgacgtccccaccaacggctgcggacccgaccgctggaactccgcgttcacccgcaaagacgagatcatcaccagcctcgtgtctgccttagactccatgtgctcagcgctgtccaaactgaacgccgaggtggcctgtgtcgccgtgcacgatgagagcgcctttgtggtgggcacagagaaggggagaatgttcctgaatgcccggaaggagctacagtcagacttcctcaggttctgccgagggcccccgtggaaggatccggaggcagagcaccccaagaaggtgcagcggggcgagggtggaggccgtagcctccctcggtcctccctggaacatggctcagatgtgtaccttctgcggaagatggtagaggaggtgtttgatgttctttatagcgaggccctgggaagggccagtgtggtgccactgccctatgagaggctgctcagggagccagggctgctggccgtgcaggggctgcccgaaggcctggccttccgaaggccagccgagtatgaccccaaggccctcatggccatcctggaacacagccaccgcatccgcttcaagctcaagaggccacttgaggatggcgggcgggactcgaaggccctggtggagctgaacggtgtctccctgattcccaaggggtcacgggactgtggcctgcatggccaggcccccaaggtgccaccccaggacctgcccccaaccgccacctcctcctccatggccagcttcctgtacagcacggcgctccccaaccacgccatccgagagctcaagcaggaagcaccttcctgcccccttgcccccagcgacctgggcctgagtcggcccatgccagagcccaaggccaccggtgcccaagacttctccgactgttgtggacagaagcccactgggcctggtgggcctctcatccagaacgtccatgcctccaagcgcattctcttctccatcgtccatgacaagtcagagaagtgggacgccttcataaaggaaaccgaggacatcaacacgctccgggagtgtgtgcagatcctgtttaacagcagatatgcggaagccctgggcctggaccacatggtccccgtgccctaccggaagattgcctgtgacccggaggctgtggagatcgtgggcatcccggacaagatccccttcaagcgcccctgcacttatggagtccccaagctgaagcggatcctggaggagcgccatagtatccacttcatcattaagaggatgtttgatgagcgaattttcacagggaacaagtttaccaaagacaccacgaagctggagccagccagcccgccagaggacacctctgcagaggtctctagggccaccgtccttgaccttgctgggaatgctcggtcagacaagggcagcatgtctgaagactgtgggccaggaacctccggggagctgggcgggctgaggccgatcaaaattgagccagaggatctggacatcattcaggtcaccgtcccagacccctcgccaacctctgaggaaatgacagactcgatgcctgggcacctgccatcggaggattctggttatgggatggagatgctgacagacaaaggtctgagtgaggacgcgcggcccgaggagaggcccgtggaggacagccacggtgacgtgatccggcccctgcggaagcaggtggagctgctcttcaacacacgatacgccaaggccattggcatctcggagcccgtcaaggtgccgtactccaagtttctgatgcacccggaggagctgtttgtggtgggactgcctgaaggcatctccctccgcaggcccaactgcttcgggatcgccaagctccggaagattctggaggccagcaacagcatccagtttgtcatcaagaggcccgagctgctcactgagggagtcaaagagcccatcatggatagtcaaggaactgcctcctcacttggcttctctccccctgccctgcccccagagagggattccggggaccctctggtggacgagagcctgaagagacagggctttcaagaaaattatgacgcgaggctctcacggatcgacatcgccaacacactaagggagcaggtccaggaccttttcaataagaaatacggggaagccttgggcatcaagtacccggtccaggtcccctacaagcggatcaagagtaaccccggctccgtgatcatcgaggggctgcccccaggaatcccgttccgaaagccctgtaccttcggctcccagaacctggagaggattcttgctgtggctgacaagatcaagttcacagtcaccaggcctttccaaggactcatcccaaagcctgatgaagatgacgccaacagactcggggagaaggtgatcctgcgggagcaggtgaaggaactcttcaacgagaaatacggtgaggccctgggcctgaaccggccggtgctggtcccttataaactaatccgggacagcccagacgccgtggaggtcacgggtctgcctgatgacatccccttccggaaccccaacacgtacgacatccaccggctggagaagatcctgaaggcccgagagcatgtccgcatggtcatcattaaccagctccaaccctttgcagaaatctgcaatgatgccaaggtgccagccaaagacagcagcattcccaagcgcaagagaaagcgggtctcggaaggaaattccgtctcctcttcctcctcgtcttcctcttcctcgtcctctaacccggattcagtggcatcggccaaccagatctcactcgtgcaatggccaatgtacatggtggactatgccggcctgaacgtgcagctcccgggacctcttaattactag

SEQ ID NO: 548 - DNA, 2142 bp, Homo sapiens
atggcccaagttgcaatgtccaccctccccgttgaagatgaggagtcctcggagagcaggatggtggtgacattcctcatgtcagctctcgagtccatgtgtaaagaactggccaagtccaaagccgaagtggcctgcattgcagtgtatgaaacagacgtgtttgtcgtcggaactgaaagaggacgtgcttttgtcaataccagaaaggattttcaaaaagattttgtaaaatattgtgttgaagaagaagaaaaagctgcagagatgcataaaatgaaatctacaacccaggcaaatcggatgagtgtagatgctgtagaaattgaaacactcagaaaaacagttgaggactatttctgcttttgctatgggaaagctttaggcaaatccacagtggtacctgtaccatatgagaagatgctgcgagaccagtcggctgtggtagtgcaggggcttccggaaggtgttgcctttaaacaccccgagaactatgatcttgcaaccctgaaatggattttggagaacaaagcagggatttcattcatcattaagagaccttttttagagccaaagaagcatgtaggtggtcgtgtgatggtaacagatgctgacaggtcaatactatctccaggtggaagttgtggccccatcaaagtgaaaactgaacccacagaagattctggcatttccctggaaatggcagctgtgacagtaaaggaagaatcagaagatcctgattattatcaatataacattcaaggcccttctgaaactgatgatgttgatgaaaaacagcccctatcgaagcctttgcaaggaagccaccattcttcagagggcaatgaaggcacagaaatggaagtaccagcagaagacaaaggtctgagtgaggacgcgcggcccgaggagaggcccgtggaggacagccacggtgacgtgatccggcccctgcggaagcaggtggagctgctcttcaacacacgatacgccaaggccattggcatctcggagcccgtcaaggtgccgtactccaagtttctgatgcacccggaggagctgtttgtggtgggactgcctgaaggcatctccctccgcaggcccaactgcttcgggatcgccaagctccggaagattctggaggccagcaacagcatccagtttgtcatcaagaggcccgagctgctcactgagggagtcaaagagcccatcatggatagtcaagagagggattccggggaccctctggtggacgagagcctgaagagacagggctttcaagaaaattatgacgcgaggctctcacggatcgacatcgccaacacactaagggagcaggtccaggaccttttcaataagaaatacggggaagccttgggcatcaagtacccggtccaggtcccctacaagcggatcaagagtaaccccggctccgtgatcatcgaggggctgcccccaggaatcccgttccgaaagccctgtaccttcggctcccagaacctggagaggattcttgctgtggctgacaagatcaagttcacagtcaccaggcctttccaaggactcatcccaaagcctgatgaagatgacgccaacagactcggggagaaggtgatcctgcgggagcaggtgaaggaactcttcaacgagaaatacggtgaggccctgggcctgaaccggccggtgctggtcccttataaactaatccgggacagcccagacgccgtggaggtcacgggtctgcctgatgacatccccttccggaaccccaacacgtacgacatccaccggctggagaagatcctgaaggcccgagagcatgtccgcatggtcatcattaaccagctccaaccctttgcagaaatctgcaatgatgccaaggtgccagccaaagacagcagcattcccaagcgcaagagaaagcgggtctcggaaggaaattccgtctcctcttcctcctcgtcttcctcttcctcgtcctctaacccggattcagtggcatcggccaaccagatctcactcgtggtaaagttgcaccgatttggactccggcactcatctctgtggccctcacccctctgtctggcagggccgtctactctgggatgtgggcccaggggacggggaggcactgggctttga

SEQ ID NO: 549 - DNA, 2169 bp, Homo sapiens
atggcccaagttgcaatgtccaccctccccgttgaagatgaggagtcctcggagagcaggatggtggtgacattcctcatgtcagctctcgagtccatgtgtaaagaactggccaagtccaaagccgaagtggcctgcattgcagtgtatgaaacagacgtgtttgtcgtcggaactgaaagaggacgtgcttttgtcaataccagaaaggattttcaaaaagattttgtaaaatattgtgttgaagaagaagaaaaagctgcagagatgcataaaatgaaatctacaacccaggcaaatcggatgagtgtagatgctgtagaaattgaaacactcagaaaaacagttgaggactatttctgcttttgctatgggaaagctttaggcaaatccacagtggtacctgtaccatatgagaagatgctgcgagaccagtcggctgtggtagtgcaggggcttccggaaggtgttgcctttaaacaccccgagaactatgatcttgcaaccctgaaatggattttggagaacaaagcagggatttcattcatcattaagagaccttttttagagccaaagaagcatgtagggaacaagtttaccaaagacaccacgaagctggagccagccagcccgccagaggacacctctgcagaggtctctagggccaccgtccttgaccttgctgggaatgctcggtcagacaagggcagcatgtctgaagactgtgggccaggaacctccggggagctgggcgggctgaggccgatcaaaattgagccagaggatctggacatcattcaggtcaccgtcccagacccctcgccaacctctgaggaaatgacagactcgatgcctgggcacctgccatcggaggattctggttatgggatggagatgctgacagacaaaggtctgagtgaggacgcgcggcccgaggagaggcccgtggaggacagccacggtgacgtgatccggcccctgcggaagcaggtggagctgctcttcaacacacgatacgccaaggccattggcatctcggagcccgtcaaggtgccgtactccaagtttctgatgcacccggaggagctgtttgtggtgggactgcctgaaggcatctccctccgcaggcccaactgcttcgggatcgccaagctccggaagattctggaggccagcaacagcatccagtttgtcatcaagaggcccgagctgctcactgagggagtcaaagagcccatcatggatagtcaagagagggattccggggaccctctggtggacgagagcctgaagagacagggctttcaagaaaattatgacgcgaggctctcacggatcgacatcgccaacacactaagggagcaggtccaggaccttttcaataagaaatacggggaagccttgggcatcaagtacccggtccaggtcccctacaagcggatcaagagtaaccccggctccgtgatcatcgaggggctgcccccaggaatcccgttccgaaagccctgtaccttcggctcccagaacctggagaggattcttgctgtggctgacaagatcaagttcacagtcaccaggcctttccaaggactcatcccaaagcctgatgaagatgacgccaacagactcggggagaaggtgatcctgcgggagcaggtgaaggaactcttcaacgagaaatacggtgaggccctgggcctgaaccggccggtgctggtcccttataaactaatccgggacagcccagacgccgtggaggtcacgggtctgcctgatgacatccccttccggaaccccaacacgtacgacatccaccggctggagaagatcctgaaggcccgagagcatgtccgcatggtcatcattaaccagctccaaccctttgcagaaatctgcaatgatgccaaggtgccagccaaagacagcagcattcccaagcgcaagagaaagcgggtctcggaaggaaattccgtctcctcttcctcctcgtcttcctcttcctcgtcctctaacccggattcagtggcatcggccaaccagatctcactcgtggtaaagttgcaccgatttggactccggcactcatctctgtggccctcacccctctgtctggcagggccgtctactctgggatgtgggcccaggggacggggaggcactgggctttga

SEQ ID NO: 550 - DNA, 2091 bp, Homo sapiens
atggcccaagttgcaatgtccaccctccccgttgaagatgaggagtcctcggagagcaggatggtggtgacattcctcatgtcagctctcgagtccatgtgtaaagaactggccaagtccaaagccgaagtggcctgcattgcagtgtatgaaacagacgtgtttgtcgtcggaactgaaagaggacgtgcttttgtcaataccagaaaggattttcaaaaagattttgtaaaatattgtgttgaagaagaagaaaaagctgcagagatgcataaaatgaaatctacaacccaggcaaatcggatgagtgtagatgctgtagaaattgaaacactcagaaaaacagttgaggactatttctgcttttgctatgggaaagctttaggcaaatccacagtggtacctgtaccatatgagaagatgctgcgagaccagtcggctgtggtagtgcaggggcttccggaaggtgttgcctttaaacaccccgagaactatgatcttgcaaccctgaaatggattttggagaacaaagcagggatttcattcatcattaagagaccttttttagagccaaagaagcatgtaggtggtcgtgtgatggtaacagatgctgacaggtcaatactatctccaggtggaagttgtggccccatcaaagtgaaaactgaacccacagaagattctggcatttccctggaaatggcagctgtgacagtaaaggaagaatcagaagatcctgattattatcaatataacattcaaggcccttctgaaactgatgatgttgatgaaaaacagcccctatcgaagcctttgcaaggaagccaccattcttcagagggcaatgaaggcacagaaatggaagtaccagcagaagacagccacggtgacgtgatccggcccctgcggaagcaggtggagctgctcttcaacacacgatacgccaaggccattggcatctcggagcccgtcaaggtgccgtactccaagtttctgatgcacccggaggagctgtttgtggtgggactgcctgaaggcatctccctccgcaggcccaactgcttcgggatcgccaagctccggaagattctggaggccagcaacagcatccagtttgtcatcaagaggcccgagctgctcactgagggagtcaaagagcccatcatggatagtcaaggaactgcctcctcacttggcttctctccccctgccctgcccccagagagggattccggggaccctctggtggacgagagcctgaagagacagggctttcaagaaaattatgacgcgaggctctcacggatcgacatcgccaacacactaagggagcaggtccaggaccttttcaataagaaatacggggaagccttgggcatcaagtacccggtccaggtcccctacaagcggatcaagagtaaccccggctccgtgatcatcgaggggctgcccccaggaatcccgttccgaaagccctgtaccttcggctcccagaacctggagaggattcttgctgtggctgacaagatcaagttcacagtcaccaggcctttccaaggactcatcccaaagcctgatgaagatgacgccaacagactcggggagaaggtgatcctgcgggagcaggtgaaggaactcttcaacgagaaatacggtgaggccctgggcctgaaccggccggtgctggtcccttataaactaatccgggacagcccagacgccgtggaggtcacgggtctgcctgatgacatccccttccggaaccccaacacgtacgacatccaccggctggagaagatcctgaaggcccgagagcatgtccgcatggtcatcattaaccagctccaaccctttgcagaaatctgcaatgatgccaaggtgccagccaaagacagcagcattcccaagcgcaagagaaagcgggtctcggaaggaaattccgtctcctcttcctcctcgtcttcctcttcctcgtcctctaacccggattcagtggcatcggccaaccagatctcactcgtgcaatggccaatgtacatggtggactatgccggcctgaacgtgcagctcccgggacctcttaattactag

SEQ ID NO: 551 - DNA, 1617 bp, Homo sapiens
atggcccaagttgcaatgtccaccctccccgttgaagatgaggagtcctcggagagcaggatggtggtgacattcctcatgtcagctctcgagtccatgtgtaaagaactggccaagtccaaagccgaagtggcctgcattgcagtgtatgaaacagacgtgtttgtcgtcggaactgaaagaggacgtgcttttgtcaataccagaaaggattttcaaaaagattttgtaaaatattgtgttgaagaagaagaaaaagctgcagagatgcataaaatgaaatctacaacccaggcaaatcggatgagtgtagatgctgtagaaattgaaacactcagaaaaacagttgaggactatttctgcttttgctatgggaaagctttaggcaaatccacagtggtacctgtaccatatgagaagatgctgcgagaccagtcggctgtggtagtgcaggggcttccggaaggtgttgcctttaaacaccccgagaactatgatcttgcaaccctgaaatggattttggagaacaaagcagggatttcattcatcattaagagaccttttttagagccaaagaagcatgtaggtggtcgtgtgatggtaacagatgctgacaggtcaatactatctccaggtggaagttgtggccccatcaaagtgaaaactgaacccacagaagattctggcatttccctggaaatggcagctgtgacagtaaaggaagaatcagaagatcctgattattatcaatataacattcaagcaggcccttctgaaactgatgatgttgatgaaaaacagcccctatcgaagcctttgcaaggaagccaccattcttcagagggcaatgaaggcacagaaatggaagtaccagcagaagattctactcaacatgtcccttcagaaacaagtgaggaccctgaagttgaggtgactattgaagatgatgattattctccaccgtctaagagaccaaaggccaatgagctaccgcagccaccagtcccggaacccgccaatgctgggaagcggaaagtgagggagttcaacttcgagaaatggaatgctcgcatcactgatctacgtaaacaagttgaagaattgtttgaaaggaaatatgctcaagccataaaagccaaaggtccggtgacgatcccgtaccctcttttccagtctcatgttgaagatctttatgtagaaggacttcctgaaggaattccttttagaaggccatctacttacggaattcctcgcctggagaggatattacttgcaaaggaaaggattcgttttgtgattaagaaacatgagcttctgaattcaacacgtgaagatttacagcttgataagccagcttcaggagccaaagacagcagcattcccaagcgcaagagaaagcgggtctcggaaggaaattccgtctcctcttcctcctcgtcttcctcttcctcgtcctctaacccggattcagtggcatcggccaaccagatctcactcgtggtaaagttgcaccgatttggactccggcactcatctctgtggccctcacccctctgtctggcagggccgtctactctgggatgtgggcccaggggacggggaggcactgggctttga

SEQ ID NO: 552 - DNA, 2046 bp, Homo sapiens
atggcccaagttgcaatgtccaccctccccgttgaagatgaggagtcctcggagagcaggatggtggtgacattcctcatgtcagctctcgagtccatgtgtaaagaactggccaagtccaaagccgaagtggcctgcattgcagtgtatgaaacagacgtgtttgtcgtcggaactgaaagaggacgtgcttttgtcaataccagaaaggattttcaaaaagattttgtaaaatattgtgttgaagaagaagaaaaagctgcagagatgcataaaatgaaatctacaacccaggcaaatcggatgagtgtagatgctgtagaaattgaaacactcagaaaaacagttgaggactatttctgcttttgctatgggaaagctttaggcaaatccacagtggtacctgtaccatatgagaagatgctgcgagaccagtcggctgtggtagtgcaggggcttccggaaggtgttgcctttaaacaccccgagaactatgatcttgcaaccctgaaatggattttggagaacaaagcagggatttcattcatcattaagagaccttttttagagccaaagaagcatgtaggtggtcgtgtgatggtaacagatgctgacaggtcaatactatctccaggtggaagttgtggccccatcaaagtgaaaactgaacccacagaagattctggcatttccctggaaatggcagctgtgacagtaaaggaagaatcagaagatcctgattattatcaatataacattcaaggcccttctgaaactgatgatgttgatgaaaaacagcccctatcgaagcctttgcaaggaagccaccattcttcagagggcaatgaaggcacagaaatggaagtaccagcagaagacagccacggtgacgtgatccggcccctgcggaagcaggtggagctgctcttcaacacacgatacgccaaggccattggcatctcggagcccgtcaaggtgccgtactccaagtttctgatgcacccggaggagctgtttgtggtgggactgcctgaaggcatctccctccgcaggcccaactgcttcgggatcgccaagctccggaagattctggaggccagcaacagcatccagtttgtcatcaagaggcccgagctgctcactgagggagtcaaagagcccatcatggatagtcaagagagggattccggggaccctctggtggacgagagcctgaagagacagggctttcaagaaaattatgacgcgaggctctcacggatcgacatcgccaacacactaagggagcaggtccaggaccttttcaataagaaatacggggaagccttgggcatcaagtacccggtccaggtcccctacaagcggatcaagagtaaccccggctccgtgatcatcgaggggctgcccccaggaatcccgttccgaaagccctgtaccttcggctcccagaacctggagaggattcttgctgtggctgacaagatcaagttcacagtcaccaggcctttccaaggactcatcccaaagcctgatgaagatgacgccaacagactcggggagaaggtgatcctgcgggagcaggtgaaggaactcttcaacgagaaatacggtgaggccctgggcctgaaccggccggtgctggtcccttataaactaatccgggacagcccagacgccgtggaggtcacgggtctgcctgatgacatccccttccggaaccccaacacgtacgacatccaccggctggagaagatcctgaaggcccgagagcatgtccgcatggtcatcattaaccagctccaaccctttgcagaaatctgcaatgatgccaaggtgccagccaaagacagcagcattcccaagcgcaagagaaagcgggtctcggaaggaaattccgtctcctcttcctcctcgtcttcctcttcctcgtcctctaacccggattcagtggcatcggccaaccagatctcactcgtgcaatggccaatgtacatggtggactatgccggcctgaacgtgcagctcccgggacctcttaattactag

SEQ ID NO: 553 - DNA, 2049 bp, Homo sapiens
atggcccaagttgcaatgtccaccctccccgttgaagatgaggagtcctcggagagcaggatggtggtgacattcctcatgtcagctctcgagtccatgtgtaaagaactggccaagtccaaagccgaagtggcctgcattgcagtgtatgaaacagacgtgtttgtcgtcggaactgaaagaggacgtgcttttgtcaataccagaaaggattttcaaaaagattttgtaaaatattgtgttgaagaagaagaaaaagctgcagagatgcataaaatgaaatctacaacccaggcaaatcggatgagtgtagatgctgtagaaattgaaacactcagaaaaacagttgaggactatttctgcttttgctatgggaaagctttaggcaaatccacagtggtacctgtaccatatgagaagatgctgcgagaccagtcggctgtggtagtgcaggggcttccggaaggtgttgcctttaaacaccccgagaactatgatcttgcaaccctgaaatggattttggagaacaaagcagggatttcattcatcattaagagaccttttttagagccaaagaagcatgtaggtggtcgtgtgatggtaacagatgctgacaggtcaatactatctccaggtggaagttgtggccccatcaaagtgaaaactgaacccacagaagattctggcatttccctggaaatggcagctgtgacagtaaaggaagaatcagaagatcctgattattatcaatataacattcaagcaggcccttctgaaactgatgatgttgatgaaaaacagcccctatcgaagcctttgcaaggaagccaccattcttcagagggcaatgaaggcacagaaatggaagtaccagcagaagacagccacggtgacgtgatccggcccctgcggaagcaggtggagctgctcttcaacacacgatacgccaaggccattggcatctcggagcccgtcaaggtgccgtactccaagtttctgatgcacccggaggagctgtttgtggtgggactgcctgaaggcatctccctccgcaggcccaactgcttcgggatcgccaagctccggaagattctggaggccagcaacagcatccagtttgtcatcaagaggcccgagctgctcactgagggagtcaaagagcccatcatggatagtcaagagagggattccggggaccctctggtggacgagagcctgaagagacagggctttcaagaaaattatgacgcgaggctctcacggatcgacatcgccaacacactaagggagcaggtccaggaccttttcaataagaaatacggggaagccttgggcatcaagtacccggtccaggtcccctacaagcggatcaagagtaaccccggctccgtgatcatcgaggggctgcccccaggaatcccgttccgaaagccctgtaccttcggctcccagaacctggagaggattcttgctgtggctgacaagatcaagttcacagtcaccaggcctttccaaggactcatcccaaagcctgatgaagatgacgccaacagactcggggagaaggtgatcctgcgggagcaggtgaaggaactcttcaacgagaaatacggtgaggccctgggcctgaaccggccggtgctggtcccttataaactaatccgggacagcccagacgccgtggaggtcacgggtctgcctgatgacatccccttccggaaccccaacacgtacgacatccaccggctggagaagatcctgaaggcccgagagcatgtccgcatggtcatcattaaccagctccaaccctttgcagaaatctgcaatgatgccaaggtgccagccaaagacagcagcattcccaagcgcaagagaaagcgggtctcggaaggaaattccgtctcctcttcctcctcgtcttcctcttcctcgtcctctaacccggattcagtggcatcggccaaccagatctcactcgtgcaatggccaatgtacatggtggactatgccggcctgaacgtgcagctcccgggacctcttaattactag

SEQ ID NO: 554 - DNA, 753 bp, Homo sapiens
atggcccaagttgcaatgtccaccctccccgttgaagatgaggagtcctcggagagcaggatggtggtgacattcctcatgtcagctctcgagtccatgtgtaaagaactggccaagtccaaagccgaagtggcctgcattgcagtgtatgaaacagacgtgtttgtcgtcggaactgaaagaggacgtgcttttgtcaataccagaaaggattttcaaaaagattttgtaaaatattatgaagatgacgccaacagactcggggagaaggtgatcctgcgggagcaggtgaaggaactcttcaacgagaaatacggtgaggccctgggcctgaaccggccggtgctggtcccttataaactaatccgggacagcccagacgccgtggaggtcacgggtctgcctgatgacatccccttccggaaccccaacacgtacgacatccaccggctggagaagatcctgaaggcccgagagcatgtccgcatggtcatcattaaccagctccaaccctttgcagaaatctgcaatgatgccaaggtgccagccaaagacagcagcattcccaagcgcaagagaaagcgggtctcggaaggaaattccgtctcctcttcctcctcgtcttcctcttcctcgtcctctaacccggattcagtggcatcggccaaccagatctcactcgtgcaatggccaatgtacatggtggactatgccggcctgaacgtgcagctcccgggacctcttaattactag

SEQ ID NO: 555 - DNA, 1494 bp, Homo sapiens
atggcccaagttgcaatgtccaccctccccgttgaagatgaggagtcctcggagagcaggatggtggtgacattcctcatgtcagctctcgagtccatgtgtaaagaactggccaagtccaaagccgaagtggcctgcattgcagtgtatgaaacagacgtgtttgtcgtcggaactgaaagaggacgtgcttttgtcaataccagaaaggattttcaaaaagattttgtaaaatattgtgttgaagaagaagaaaaagctgcagagatgcataaaatgaaatctacaacccaggcaaatcggatgagtgtagatgctgtagaaattgaaacactcagaaaaacagttgaggactatttctgcttttgctatgggaaagctttaggcaaatccacagtggtacctgtaccatatgagaagatgctgcgagaccagtcggctgtggtagtgcaggggcttccggaaggtgttgcctttaaacaccccgagaactatgatcttgcaaccctgaaatggattttggagaacaaagcagggatttcattcatcattaagagaccttttttagagccaaagaagcatgtaggtggtcgtgtgatggtaacagatgctgacaggtcaatactatctccaggtggaagttgtggccccatcaaagtgaaaactgaacccacagaagattctggcatttccctggaaatggcagctgtgacagtaaaggaagaatcagaagatcctgattattatcaatataacattcaaggaagccaccattcttcagagggcaatgaaggcacagaaatggaagtaccagcagaagatgatgattattctccaccgtctaagagaccaaaggccaatgagctaccgcagccaccagtcccggaacccgccaatgctgggaagcggaaagtgagggagttcaacttcgagaaatggaatgctcgcatcactgatctacgtaaacaagttgaagaattgtttgaaaggaaatatgctcaagccataaaagccaaaggtccggtgacgatcccgtaccctcttttccagtctcatgttgaagatctttatgtagaaggacttcctgaaggaattccttttagaaggccatctacttacggaattcctcgcctggagaggatattacttgcaaaggaaaggattcgttttgtgattaagaaacatgagcttctgaattcaacacgtgaagatttacagcttgataagccagcttcaggagccaaagacagcagcattcccaagcgcaagagaaagcgggtctcggaaggaaattccgtctcctcttcctcctcgtcttcctcttcctcgtcctctaacccggattcagtggcatcggccaaccagatctcactcgtggtaaagttgcaccgatttggactccggcactcatctctgtggccctcacccctctgtctggcagggccgtctactctgggatgtgggcccaggggacggggaggcactgggctttga

SEQ ID NO: 556 - DNA, 2094 bp, Homo sapiens
atggcccaagttgcaatgtccaccctccccgttgaagatgaggagtcctcggagagcaggatggtggtgacattcctcatgtcagctctcgagtccatgtgtaaagaactggccaagtccaaagccgaagtggcctgcattgcagtgtatgaaacagacgtgtttgtcgtcggaactgaaagaggacgtgcttttgtcaataccagaaaggattttcaaaaagattttgtaaaatattgtgttgaagaagaagaaaaagctgcagagatgcataaaatgaaatctacaacccaggcaaatcggatgagtgtagatgctgtagaaattgaaacactcagaaaaacagttgaggactatttctgcttttgctatgggaaagctttaggcaaatccacagtggtacctgtaccatatgagaagatgctgcgagaccagtcggctgtggtagtgcaggggcttccggaaggtgttgcctttaaacaccccgagaactatgatcttgcaaccctgaaatggattttggagaacaaagcagggatttcattcatcattaagagaccttttttagagccaaagaagcatgtaggtggtcgtgtgatggtaacagatgctgacaggtcaatactatctccaggtggaagttgtggccccatcaaagtgaaaactgaacccacagaagattctggcatttccctggaaatggcagctgtgacagtaaaggaagaatcagaagatcctgattattatcaatataacattcaaggcccttctgaaactgatgatgttgatgaaaaacagcccctatcgaagcctttgcaaggaagccaccattcttcagagggcaatgaaggcacagaaatggaagtaccagcagaagacaaaggtctgagtgaggacgcgcggcccgaggagaggcccgtggaggacagccacggtgacgtgatccggcccctgcggaagcaggtggagctgctcttcaacacacgatacgccaaggccattggcatctcggagcccgtcaaggtgccgtactccaagtttctgatgcacccggaggagctgtttgtggtgggactgcctgaaggcatctccctccgcaggcccaactgcttcgggatcgccaagctccggaagattctggaggccagcaacagcatccagtttgtcatcaagaggcccgagctgctcactgagggagtcaaagagcccatcatggatagtcaagagagggattccggggaccctctggtggacgagagcctgaagagacagggctttcaagaaaattatgacgcgaggctctcacggatcgacatcgccaacacactaagggagcaggtccaggaccttttcaataagaaatacggggaagccttgggcatcaagtacccggtccaggtcccctacaagcggatcaagagtaaccccggctccgtgatcatcgaggggctgcccccaggaatcccgttccgaaagccctgtaccttcggctcccagaacctggagaggattcttgctgtggctgacaagatcaagttcacagtcaccaggcctttccaaggactcatcccaaagcctgatgaagatgacgccaacagactcggggagaaggtgatcctgcgggagcaggtgaaggaactcttcaacgagaaatacggtgaggccctgggcctgaaccggccggtgctggtcccttataaactaatccgggacagcccagacgccgtggaggtcacgggtctgcctgatgacatccccttccggaaccccaacacgtacgacatccaccggctggagaagatcctgaaggcccgagagcatgtccgcatggtcatcattaaccagctccaaccctttgcagaaatctgcaatgatgccaaggtgccagccaaagacagcagcattcccaagcgcaagagaaagcgggtctcggaaggaaattccgtctcctcttcctcctcgtcttcctcttcctcgtcctctaacccggattcagtggcatcggccaaccagatctcactcgtgcaatggccaatgtacatggtggactatgccggcctgaacgtgcagctcccgggacctcttaattactag

SEQ ID NO: 557 - DNA, 2931 bp, Homo sapiens
atggccttgctgggtaagcgctgtgacgtccccaccaacggctgcggacccgaccgctggaactccgcgttcacccgcaaagacgagatcatcaccagcctcgtgtctgccttagactccatgtgctcagcgctgtccaaactgaacgccgaggtggcctgtgtcgccgtgcacgatgagagcgcctttgtggtgggcacagagaaggggagaatgttcctgaatgcccggaaggagctacagtcagacttcctcaggttctgcctctccgcagctcagcacagggcagcgacatcccagctcgaaggccgggtggtgagacgggtgctcactgtggcctcgcgtgctctgtgtcccacaggagggcccccgtggaaggatccggaggcagagcaccccaagaaggtgcagcggggcgagggtggaggccgtagcctccctcggtcctccctggaacatggctcagatgtgtaccttctgcggaagatggtagaggaggtgtttgatgttctttatagcgaggccctgggaagggccagtgtggtgccactgccctatgagaggctgctcagggagccagggctgctggccgtgcaggggctgcccgaaggcctggccttccgaaggccagccgagtatgaccccaaggccctcatggccatcctggaacacagccaccgcatccgcttcaagctcaagaggccacttgaggatggcgggcgggactcgaaggccctggtggagctgaacggtgtctccctgattcccaaggggtcacgggactgtggcctgcatggccaggcccccaaggtgccaccccaggacctgcccccaaccgccacctcctcctccatggccagcttcctgtacagcacggcgctccccaaccacgccatccgagagctcaagcaggaagcaccttcctgcccccttgcccccagcgacctgggcctgagtcggcccatgccagagcccaaggccaccggtgcccaagacttctccgactgttgtggacagaagcccactgggcctggtgggcctctcatccagaacgtccatgcctccaagcgcattctcttctccatcgtccatgacaagtcagagaagtgggacgccttcataaaggaaaccgaggacatcaacacgctccgggagtgtgtgcagatcctgtttaacagcagatatgcggaagccctgggcctggaccacatggtccccgtgccctaccggaagattgcctgtgacccggaggctgtggagatcgtgggcatcccggacaagatccccttcaagcgcccctgcacttatggagtccccaagctgaagcggatcctggaggagcgccatagtatccacttcatcattaagaggatgtttgatgagcgaattttcacagggaacaagtttaccaaagacaccacgaagctggagccagccagcccgccagaggacacctctgcagaggtctctagggccaccgtccttgaccttgctgggaatgctcggtcagacaagggcagcatgtctgaagactgtgggccaggaacctccggggagctgggcgggctgaggccgatcaaaattgagccagaggatctggacatcattcaggtcaccgtcccagacccctcgccaacctctgaggaaatgacagactcgatgcctgggcacctgccatcggaggattctggttatgggatggagatgctgacagacaaaggtctgagtgaggacgcgcggcccgaggagaggcccgtggaggacagccacggtgacgtgatccggcccctgcggaagcaggtggagctgctcttcaacacacgatacgccaaggccattggcatctcggagcccgtcaaggtgccgtactccaagtttctgatgcacccggaggagctgtttgtggtgggactgcctgaaggcatctccctccgcaggcccaactgcttcgggatcgccaagctccggaagattctggaggccagcaacagcatccagtttgtcatcaagaggcccgagctgctcactgagggagtcaaagagcccatcatggatagtcaagagagggattccggggaccctctggtggacgagagcctgaagagacagggctttcaagaaaattatgacgcgaggctctcacggatcgacatcgccaacacactaagggagcaggtccaggaccttttcaataagaaatacggggaagccttgggcatcaagtacccggtccaggtcccctacaagcggatcaagagtaaccccggctccgtgatcatcgaggggctgcccccaggaatcccgttccgaaagccctgtaccttcggctcccagaacctggagaggattcttgctgtggctgacaagatcaagttcacagtcaccaggcctttccaaggactcatcccaaagcctgatgaagatgacgccaacagactcggggagaaggtgatcctgcgggagcaggtgaaggaactcttcaacgagaaatacggtgaggccctgggcctgaaccggccggtgctggtcccttataaactaatccgggacagcccagacgccgtggaggtcacgggtctgcctgatgacatccccttccggaaccccaacacgtacgacatccaccggctggagaagatcctgaaggcccgagagcatgtccgcatggtcatcattaaccagctccaaccctttgcagaaatctgcaatgatgccaaggtgccagccaaagacagcagcattcccaagcgcaagagaaagcgggtctcggaaggaaattccgtctcctcttcctcctcgtcttcctcttcctcgtcctctaacccggattcagtggcatcggccaaccagatctcactcgtgcaatggccaatgtacatggtggactatgccggcctgaacgtgcagctcccgggacctcttaattactag

SEQ ID NO: 558 - DNA, 2097 bp, Homo sapiens
atggcccaagttgcaatgtccaccctccccgttgaagatgaggagtcctcggagagcaggatggtggtgacattcctcatgtcagctctcgagtccatgtgtaaagaactggccaagtccaaagccgaagtggcctgcattgcagtgtatgaaacagacgtgtttgtcgtcggaactgaaagaggacgtgcttttgtcaataccagaaaggattttcaaaaagattttgtaaaatattgtgttgaagaagaagaaaaagctgcagagatgcataaaatgaaatctacaacccaggcaaatcggatgagtgtagatgctgtagaaattgaaacactcagaaaaacagttgaggactatttctgcttttgctatgggaaagctttaggcaaatccacagtggtacctgtaccatatgagaagatgctgcgagaccagtcggctgtggtagtgcaggggcttccggaaggtgttgcctttaaacaccccgagaactatgatcttgcaaccctgaaatggattttggagaacaaagcagggatttcattcatcattaagagaccttttttagagccaaagaagcatgtaggtggtcgtgtgatggtaacagatgctgacaggtcaatactatctccaggtggaagttgtggccccatcaaagtgaaaactgaacccacagaagattctggcatttccctggaaatggcagctgtgacagtaaaggaagaatcagaagatcctgattattatcaatataacattcaagcaggcccttctgaaactgatgatgttgatgaaaaacagcccctatcgaagcctttgcaaggaagccaccattcttcagagggcaatgaaggcacagaaatggaagtaccagcagaagacaaaggtctgagtgaggacgcgcggcccgaggagaggcccgtggaggacagccacggtgacgtgatccggcccctgcggaagcaggtggagctgctcttcaacacacgatacgccaaggccattggcatctcggagcccgtcaaggtgccgtactccaagtttctgatgcacccggaggagctgtttgtggtgggactgcctgaaggcatctccctccgcaggcccaactgcttcgggatcgccaagctccggaagattctggaggccagcaacagcatccagtttgtcatcaagaggcccgagctgctcactgagggagtcaaagagcccatcatggatagtcaagagagggattccggggaccctctggtggacgagagcctgaagagacagggctttcaagaaaattatgacgcgaggctctcacggatcgacatcgccaacacactaagggagcaggtccaggaccttttcaataagaaatacggggaagccttgggcatcaagtacccggtccaggtcccctacaagcggatcaagagtaaccccggctccgtgatcatcgaggggctgcccccaggaatcccgttccgaaagccctgtaccttcggctcccagaacctggagaggattcttgctgtggctgacaagatcaagttcacagtcaccaggcctttccaaggactcatcccaaagcctgatgaagatgacgccaacagactcggggagaaggtgatcctgcgggagcaggtgaaggaactcttcaacgagaaatacggtgaggccctgggcctgaaccggccggtgctggtcccttataaactaatccgggacagcccagacgccgtggaggtcacgggtctgcctgatgacatccccttccggaaccccaacacgtacgacatccaccggctggagaagatcctgaaggcccgagagcatgtccgcatggtcatcattaaccagctccaaccctttgcagaaatctgcaatgatgccaaggtgccagccaaagacagcagcattcccaagcgcaagagaaagcgggtctcggaaggaaattccgtctcctcttcctcctcgtcttcctcttcctcgtcctctaacccggattcagtggcatcggccaaccagatctcactcgtgcaatggccaatgtacatggtggactatgccggcctgaacgtgcagctcccgggacctcttaattactag

SEQ ID NO: 559 - DNA, 1989 bp, Homo sapiens
atggcccaagttgcaatgtccaccctccccgttgaagatgaggagtcctcggagagcaggatggtggtgacattcctcatgtcagctctcgagtccatgtgtaaagaactggccaagtccaaagccgaagtggcctgcattgcagtgtatgaaacagacgtgtttgtcgtcggaactgaaagaggacgtgcttttgtcaataccagaaaggattttcaaaaagattttgtaaaatattgtgttgaagaagaagaaaaagctgcagagatgcataaaatgaaatctacaacccaggcaaatcggatgagtgtagatgctgtagaaattgaaacactcagaaaaacagttgaggactatttctgcttttgctatgggaaagctttaggcaaatccacagtggtacctgtaccatatgagaagatgctgcgagaccagtcggctgtggtagtgcaggggcttccggaaggtgttgcctttaaacaccccgagaactatgatcttgcaaccctgaaatggattttggagaacaaagcagggatttcattcatcattaagagaccttttttagagccaaagaagcatgtaggtggtcgtgtgatggtaacagatgctgacaggtcaatactatctccaggtggaagttgtggccccatcaaagtgaaaactgaacccacagaagattctggcatttccctggaaatggcagctgtgacagtaaaggaagaatcagaagatcctgattattatcaatataacattcaaggaagccaccattcttcagagggcaatgaaggcacagaaatggaagtaccagcagaagacagccacggtgacgtgatccggcccctgcggaagcaggtggagctgctcttcaacacacgatacgccaaggccattggcatctcggagcccgtcaaggtgccgtactccaagtttctgatgcacccggaggagctgtttgtggtgggactgcctgaaggcatctccctccgcaggcccaactgcttcgggatcgccaagctccggaagattctggaggccagcaacagcatccagtttgtcatcaagaggcccgagctgctcactgagggagtcaaagagcccatcatggatagtcaagagagggattccggggaccctctggtggacgagagcctgaagagacagggctttcaagaaaattatgacgcgaggctctcacggatcgacatcgccaacacactaagggagcaggtccaggaccttttcaataagaaatacggggaagccttgggcatcaagtacccggtccaggtcccctacaagcggatcaagagtaaccccggctccgtgatcatcgaggggctgcccccaggaatcccgttccgaaagccctgtaccttcggctcccagaacctggagaggattcttgctgtggctgacaagatcaagttcacagtcaccaggcctttccaaggactcatcccaaagcctgatgaagatgacgccaacagactcggggagaaggtgatcctgcgggagcaggtgaaggaactcttcaacgagaaatacggtgaggccctgggcctgaaccggccggtgctggtcccttataaactaatccgggacagcccagacgccgtggaggtcacgggtctgcctgatgacatccccttccggaaccccaacacgtacgacatccaccggctggagaagatcctgaaggcccgagagcatgtccgcatggtcatcattaaccagctccaaccctttgcagaaatctgcaatgatgccaaggtgccagccaaagacagcagcattcccaagcgcaagagaaagcgggtctcggaaggaaattccgtctcctcttcctcctcgtcttcctcttcctcgtcctctaacccggattcagtggcatcggccaaccagatctcactcgtgcaatggccaatgtacatggtggactatgccggcctgaacgtgcagctcccgggacctcttaattactag

SEQ ID NO: 560 - DNA, 1551 bp, Homo sapiens
atggcccaagttgcaatgtccaccctccccgttgaagatgaggagtcctcggagagcaggatggtggtgacattcctcatgtcagctctcgagtccatgtgtaaagaactggccaagtccaaagccgaagtggcctgcattgcagtgtatgaaacagacgtgtttgtcgtcggaactgaaagaggacgtgcttttgtcaataccagaaaggattttcaaaaagattttgtaaaatattgtgttgaagaagaagaaaaagctgcagagatgcataaaatgaaatctacaacccaggcaaatcggatgagtgtagatgctgtagaaattgaaacactcagaaaaacagttgaggactatttctgcttttgctatgggaaagctttaggcaaatccacagtggtacctgtaccatatgagaagatgctgcgagaccagtcggctgtggtagtgcaggggcttccggaaggtgttgcctttaaacaccccgagaactatgatcttgcaaccctgaaatggattttggagaacaaagcagggatttcattcatcattaagagaccttttttagagccaaagaagcatgtaggtggtcgtgtgatggtaacagatgctgacaggtcaatactatctccaggtggaagttgtggccccatcaaagtgaaaactgaacccacagaagattctggcatttccctggaaatggcagctgtgacagtaaaggaagaatcagaagatcctgattattatcaatataacattcaaggcccttctgaaactgatgatgttgatgaaaaacagcccctatcgaagcctttgcaaggaagccaccattcttcagagggcaatgaaggcacagaaatggaagtaccagcagaagatgatgattattctccaccgtctaagagaccaaaggccaatgagctaccgcagccaccagtcccggaacccgccaatgctgggaagcggaaagtgagggagttcaacttcgagaaatggaatgctcgcatcactgatctacgtaaacaagttgaagaattgtttgaaaggaaatatgctcaagccataaaagccaaaggtccggtgacgatcccgtaccctcttttccagtctcatgttgaagatctttatgtagaaggacttcctgaaggaattccttttagaaggccatctacttacggaattcctcgcctggagaggatattacttgcaaaggaaaggattcgttttgtgattaagaaacatgagcttctgaattcaacacgtgaagatttacagcttgataagccagcttcaggagccaaagacagcagcattcccaagcgcaagagaaagcgggtctcggaaggaaattccgtctcctcttcctcctcgtcttcctcttcctcgtcctctaacccggattcagtggcatcggccaaccagatctcactcgtggtaaagttgcaccgatttggactccggcactcatctctgtggccctcacccctctgtctggcagggccgtctactctgggatgtgggcccaggggacggggaggcactgggctttga

SEQ ID NO: 561 - DNA, 801 bp, Homo sapiens
atggcccaagttgcaatgtccaccctccccgttgaagatgaggagtcctcggagagcaggatggtggtgacattcctcatgtcagctctcgagtccatgtgtaaagaactggccaagtccaaagccgaagtggcctgcattgcagtgtatgaaacagacgtgtttgtcgtcggaactgaaagaggacgtgcttttgtcaataccagaaaggattttcaaaaagattttgtaaaatattatgaagatgacgccaacagactcggggagaaggtgatcctgcgggagcaggtgaaggaactcttcaacgagaaatacggtgaggccctgggcctgaaccggccggtgctggtcccttataaactaatccgggacagcccagacgccgtggaggtcacgggtctgcctgatgacatccccttccggaaccccaacacgtacgacatccaccggctggagaagatcctgaaggcccgagagcatgtccgcatggtcatcattaaccagctccaaccctttgcagaaatctgcaatgatgccaaggtgccagccaaagacagcagcattcccaagcgcaagagaaagcgggtctcggaaggaaattccgtctcctcttcctcctcgtcttcctcttcctcgtcctctaacccggattcagtggcatcggccaaccagatctcactcgtggtaaagttgcaccgatttggactccggcactcatctctgtggccctcacccctctgtctggcagggccgtctactctgggatgtgggcccaggggacggggaggcactgggctttga

SEQ ID NO: 562 - DNA, 2121 bp, Homo sapiens
atggcccaagttgcaatgtccaccctccccgttgaagatgaggagtcctcggagagcaggatggtggtgacattcctcatgtcagctctcgagtccatgtgtaaagaactggccaagtccaaagccgaagtggcctgcattgcagtgtatgaaacagacgtgtttgtcgtcggaactgaaagaggacgtgcttttgtcaataccagaaaggattttcaaaaagattttgtaaaatattgtgttgaagaagaagaaaaagctgcagagatgcataaaatgaaatctacaacccaggcaaatcggatgagtgtagatgctgtagaaattgaaacactcagaaaaacagttgaggactatttctgcttttgctatgggaaagctttaggcaaatccacagtggtacctgtaccatatgagaagatgctgcgagaccagtcggctgtggtagtgcaggggcttccggaaggtgttgcctttaaacaccccgagaactatgatcttgcaaccctgaaatggattttggagaacaaagcagggatttcattcatcattaagagaccttttttagagccaaagaagcatgtagggaacaagtttaccaaagacaccacgaagctggagccagccagcccgccagaggacacctctgcagaggtctctagggccaccgtccttgaccttgctgggaatgctcggtcagacaagggcagcatgtctgaagactgtgggccaggaacctccggggagctgggcgggctgaggccgatcaaaattgagccagaggatctggacatcattcaggtcaccgtcccagacccctcgccaacctctgaggaaatgacagactcgatgcctgggcacctgccatcggaggattctggttatgggatggagatgctgacagacaaaggtctgagtgaggacgcgcggcccgaggagaggcccgtggaggacagccacggtgacgtgatccggcccctgcggaagcaggtggagctgctcttcaacacacgatacgccaaggccattggcatctcggagcccgtcaaggtgccgtactccaagtttctgatgcacccggaggagctgtttgtggtgggactgcctgaaggcatctccctccgcaggcccaactgcttcgggatcgccaagctccggaagattctggaggccagcaacagcatccagtttgtcatcaagaggcccgagctgctcactgagggagtcaaagagcccatcatggatagtcaagagagggattccggggaccctctggtggacgagagcctgaagagacagggctttcaagaaaattatgacgcgaggctctcacggatcgacatcgccaacacactaagggagcaggtccaggaccttttcaataagaaatacggggaagccttgggcatcaagtacccggtccaggtcccctacaagcggatcaagagtaaccccggctccgtgatcatcgaggggctgcccccaggaatcccgttccgaaagccctgtaccttcggctcccagaacctggagaggattcttgctgtggctgacaagatcaagttcacagtcaccaggcctttccaaggactcatcccaaagcctgatgaagatgacgccaacagactcggggagaaggtgatcctgcgggagcaggtgaaggaactcttcaacgagaaatacggtgaggccctgggcctgaaccggccggtgctggtcccttataaactaatccgggacagcccagacgccgtggaggtcacgggtctgcctgatgacatccccttccggaaccccaacacgtacgacatccaccggctggagaagatcctgaaggcccgagagcatgtccgcatggtcatcattaaccagctccaaccctttgcagaaatctgcaatgatgccaaggtgccagccaaagacagcagcattcccaagcgcaagagaaagcgggtctcggaaggaaattccgtctcctcttcctcctcgtcttcctcttcctcgtcctctaacccggattcagtggcatcggccaaccagatctcactcgtgcaatggccaatgtacatggtggactatgccggcctgaacgtgcagctcccgggacctcttaattactag

SEQ ID NO: 563 - DNA, 2883 bp, Homo sapiens
atggccttgctgggtaagcgctgtgacgtccccaccaacggctgcggacccgaccgctggaactccgcgttcacccgcaaagacgagatcatcaccagcctcgtgtctgccttagactccatgtgctcagcgctgtccaaactgaacgccgaggtggcctgtgtcgccgtgcacgatgagagcgcctttgtggtgggcacagagaaggggagaatgttcctgaatgcccggaaggagctacagtcagacttcctcaggttctgccgagggcccccgtggaaggatccggaggcagagcaccccaagaaggtgcagcggggcgagggtggaggccgtagcctccctcggtcctccctggaacatggctcagatgtgtaccttctgcggaagatggtagaggaggtgtttgatgttctttatagcgaggccctgggaagggccagtgtggtgccactgccctatgagaggctgctcagggagccagggctgctggccgtgcaggggctgcccgaaggcctggccttccgaaggccagccgagtatgaccccaaggccctcatggccatcctggaacacagccaccgcatccgcttcaagctcaagaggccacttgaggatggcgggcgggactcgaaggccctggtggagctgaacggtgtctccctgattcccaaggggtcacgggactgtggcctgcatggccaggcccccaaggtgccaccccaggacctgcccccaaccgccacctcctcctccatggccagcttcctgtacagcacggcgctccccaaccacgccatccgagagctcaagcaggaagcaccttcctgcccccttgcccccagcgacctgggcctgagtcggcccatgccagagcccaaggccaccggtgcccaagacttctccgactgttgtggacagaagcccactgggcctggtgggcctctcatccagaacgtccatgcctccaagcgcattctcttctccatcgtccatgacaagtcagagaagtgggacgccttcataaaggaaaccgaggacatcaacacgctccgggagtgtgtgcagatcctgtttaacagcagatatgcggaagccctgggcctggaccacatggtccccgtgccctaccggaagattgcctgtgacccggaggctgtggagatcgtgggcatcccggacaagatccccttcaagcgcccctgcacttatggagtccccaagctgaagcggatcctggaggagcgccatagtatccacttcatcattaagaggatgtttgatgagcgaattttcacagggaacaagtttaccaaagacaccacgaagctggagccagccagcccgccagaggacacctctgcagaggtctctagggccaccgtccttgaccttgctgggaatgctcggtcagacaagggcagcatgtctgaagactgtgggccaggaacctccggggagctgggcgggctgaggccgatcaaaattgagccagaggatctggacatcattcaggtcaccgtcccagacccctcgccaacctctgaggaaatgacagactcgatgcctgggcacctgccatcggaggattctggttatgggatggagatgctgacagacaaaggtctgagtgaggacgcgcggcccgaggagaggcccgtggaggacagccacggtgacgtgatccggcccctgcggaagcaggtggagctgctcttcaacacacgatacgccaaggccattggcatctcggagcccgtcaaggtgccgtactccaagtttctgatgcacccggaggagctgtttgtggtgggactgcctgaaggcatctccctccgcaggcccaactgcttcgggatcgccaagctccggaagattctggaggccagcaacagcatccagtttgtcatcaagaggcccgagctgctcactgagggagtcaaagagcccatcatggatagtcaagagagggattccggggaccctctggtggacgagagcctgaagagacagggctttcaagaaaattatgacgcgaggctctcacggatcgacatcgccaacacactaagggagcaggtccaggaccttttcaataagaaatacggggaagccttgggcatcaagtacccggtccaggtcccctacaagcggatcaagagtaaccccggctccgtgatcatcgaggggctgcccccaggaatcccgttccgaaagccctgtaccttcggctcccagaacctggagaggattcttgctgtggctgacaagatcaagttcacagtcaccaggcctttccaaggactcatcccaaagcctgatgaagatgacgccaacagactcggggagaaggtgatcctgcgggagcaggtgaaggaactcttcaacgagaaatacggtgaggccctgggcctgaaccggccggtgctggtcccttataaactaatccgggacagcccagacgccgtggaggtcacgggtctgcctgatgacatccccttccggaaccccaacacgtacgacatccaccggctggagaagatcctgaaggcccgagagcatgtccgcatggtcatcattaaccagctccaaccctttgcagaaatctgcaatgatgccaaggtgccagccaaagacagcagcattcccaagcgcaagagaaagcgggtctcggaaggaaattccgtctcctcttcctcctcgtcttcctcttcctcgtcctctaacccggattcagtggcatcggccaaccagatctcactcgtggtaaagttgcaccgatttggactccggcactcatctctgtggccctcacccctctgtctggcagggccgtctactctgggatgtgggcccaggggacggggaggcactgggctttga

SEQ ID NO: 564 - DNA, 1149 bp, Homo sapiens
atggcccaagttgcaatgtccaccctccccgttgaagatgaggagtcctcggagagcaggatggtggtgacattcctcatgtcagctctcgagtccatgtgtaaagaactggccaagtccaaagccgaagtggcctgcattgcagtgtatgaaacagacgtgtttgtcgtcggaactgaaagaggacgtgcttttgtcaataccagaaaggattttcaaaaagattttgtaaaatattgtgttgaagaagaagaaaaagctgcagagatgcataaaatgaaatctacaacccaggcaaatcggatgagtgtagatgctgtagaaattgaaacactcagaaaaacagttgaggactatttctgcttttgctatgggaaagctttaggcaaatccacagtggtacctgtaccatatgagaagatgctgcgagaccagtcggctgtggtagtgcaggggcttccggaaggtgttgcctttaaacaccccgagaactatgatcttgcaaccctgaaatggattttggagaacaaagcagggatttcattcatcattaagagaccttttttagagccaaagaagcatgtagatgaagatgacgccaacagactcggggagaaggtgatcctgcgggagcaggtgaaggaactcttcaacgagaaatacggtgaggccctgggcctgaaccggccggtgctggtcccttataaactaatccgggacagcccagacgccgtggaggtcacgggtctgcctgatgacatccccttccggaaccccaacacgtacgacatccaccggctggagaagatcctgaaggcccgagagcatgtccgcatggtcatcattaaccagctccaaccctttgcagaaatctgcaatgatgccaaggtgccagccaaagacagcagcattcccaagcgcaagagaaagcgggtctcggaaggaaattccgtctcctcttcctcctcgtcttcctcttcctcgtcctctaacccggattcagtggcatcggccaaccagatctcactcgtggtaaagttgcaccgatttggactccggcactcatctctgtggccctcacccctctgtctggcagggccgtctactctgggatgtgggcccaggggacggggaggcactgggctttga

SEQ ID NO: 565 - DNA, 1101 bp, Homo sapiens
atggcccaagttgcaatgtccaccctccccgttgaagatgaggagtcctcggagagcaggatggtggtgacattcctcatgtcagctctcgagtccatgtgtaaagaactggccaagtccaaagccgaagtggcctgcattgcagtgtatgaaacagacgtgtttgtcgtcggaactgaaagaggacgtgcttttgtcaataccagaaaggattttcaaaaagattttgtaaaatattgtgttgaagaagaagaaaaagctgcagagatgcataaaatgaaatctacaacccaggcaaatcggatgagtgtagatgctgtagaaattgaaacactcagaaaaacagttgaggactatttctgcttttgctatgggaaagctttaggcaaatccacagtggtacctgtaccatatgagaagatgctgcgagaccagtcggctgtggtagtgcaggggcttccggaaggtgttgcctttaaacaccccgagaactatgatcttgcaaccctgaaatggattttggagaacaaagcagggatttcattcatcattaagagaccttttttagagccaaagaagcatgtagatgaagatgacgccaacagactcggggagaaggtgatcctgcgggagcaggtgaaggaactcttcaacgagaaatacggtgaggccctgggcctgaaccggccggtgctggtcccttataaactaatccgggacagcccagacgccgtggaggtcacgggtctgcctgatgacatccccttccggaaccccaacacgtacgacatccaccggctggagaagatcctgaaggcccgagagcatgtccgcatggtcatcattaaccagctccaaccctttgcagaaatctgcaatgatgccaaggtgccagccaaagacagcagcattcccaagcgcaagagaaagcgggtctcggaaggaaattccgtctcctcttcctcctcgtcttcctcttcctcgtcctctaacccggattcagtggcatcggccaaccagatctcactcgtgcaatggccaatgtacatggtggactatgccggcctgaacgtgcagctcccgggacctcttaattactag

SEQ ID NO: 566 - DNA, 2166 bp, Homo sapiens
atggcccaagttgcaatgtccaccctccccgttgaagatgaggagtcctcggagagcaggatggtggtgacattcctcatgtcagctctcgagtccatgtgtaaagaactggccaagtccaaagccgaagtggcctgcattgcagtgtatgaaacagacgtgtttgtcgtcggaactgaaagaggacgtgcttttgtcaataccagaaaggattttcaaaaagattttgtaaaatattgtgttgaagaagaagaaaaagctgcagagatgcataaaatgaaatctacaacccaggcaaatcggatgagtgtagatgctgtagaaattgaaacactcagaaaaacagttgaggactatttctgcttttgctatgggaaagctttaggcaaatccacagtggtacctgtaccatatgagaagatgctgcgagaccagtcggctgtggtagtgcaggggcttccggaaggtgttgcctttaaacaccccgagaactatgatcttgcaaccctgaaatggattttggagaacaaagcagggatttcattcatcattaagagaccttttttagagccaaagaagcatgtagggaacaagtttaccaaagacaccacgaagctggagccagccagcccgccagaggacacctctgcagaggtctctagggccaccgtccttgaccttgctgggaatgctcggtcagacaagggcagcatgtctgaagactgtgggccaggaacctccggggagctgggcgggctgaggccgatcaaaattgagccagaggatctggacatcattcaggtcaccgtcccagacccctcgccaacctctgaggaaatgacagactcgatgcctgggcacctgccatcggaggattctggttatgggatggagatgctgacagacaaaggtctgagtgaggacgcgcggcccgaggagaggcccgtggaggacagccacggtgacgtgatccggcccctgcggaagcaggtggagctgctcttcaacacacgatacgccaaggccattggcatctcggagcccgtcaaggtgccgtactccaagtttctgatgcacccggaggagctgtttgtggtgggactgcctgaaggcatctccctccgcaggcccaactgcttcgggatcgccaagctccggaagattctggaggccagcaacagcatccagtttgtcatcaagaggcccgagctgctcactgagggagtcaaagagcccatcatggatagtcaaggaactgcctcctcacttggcttctctccccctgccctgcccccagagagggattccggggaccctctggtggacgagagcctgaagagacagggctttcaagaaaattatgacgcgaggctctcacggatcgacatcgccaacacactaagggagcaggtccaggaccttttcaataagaaatacggggaagccttgggcatcaagtacccggtccaggtcccctacaagcggatcaagagtaaccccggctccgtgatcatcgaggggctgcccccaggaatcccgttccgaaagccctgtaccttcggctcccagaacctggagaggattcttgctgtggctgacaagatcaagttcacagtcaccaggcctttccaaggactcatcccaaagcctgatgaagatgacgccaacagactcggggagaaggtgatcctgcgggagcaggtgaaggaactcttcaacgagaaatacggtgaggccctgggcctgaaccggccggtgctggtcccttataaactaatccgggacagcccagacgccgtggaggtcacgggtctgcctgatgacatccccttccggaaccccaacacgtacgacatccaccggctggagaagatcctgaaggcccgagagcatgtccgcatggtcatcattaaccagctccaaccctttgcagaaatctgcaatgatgccaaggtgccagccaaagacagcagcattcccaagcgcaagagaaagcgggtctcggaaggaaattccgtctcctcttcctcctcgtcttcctcttcctcgtcctctaacccggattcagtggcatcggccaaccagatctcactcgtgcaatggccaatgtacatggtggactatgccggcctgaacgtgcagctcccgggacctcttaattactag

SEQ ID NO: 567 - DNA, 1557 bp, Homo sapiens
atggcccaagttgcaatgtccaccctccccgttgaagatgaggagtcctcggagagcaggatggtggtgacattcctcatgtcagctctcgagtccatgtgtaaagaactggccaagtccaaagccgaagtggcctgcattgcagtgtatgaaacagacgtgtttgtcgtcggaactgaaagaggacgtgcttttgtcaataccagaaaggattttcaaaaagattttgtaaaatattgtgttgaagaagaagaaaaagctgcagagatgcataaaatgaaatctacaacccaggcaaatcggatgagtgtagatgctgtagaaattgaaacactcagaaaaacagttgaggactatttctgcttttgctatgggaaagctttaggcaaatccacagtggtacctgtaccatatgagaagatgctgcgagaccagtcggctgtggtagtgcaggggcttccggaaggtgttgcctttaaacaccccgagaactatgatcttgcaaccctgaaatggattttggagaacaaagcagggatttcattcatcattaagagaccttttttagagccaaagaagcatgtaggtggtcgtgtgatggtaacagatgctgacaggtcaatactatctccaggtggaagttgtggccccatcaaagtgaaaactgaacccacagaagattctggcatttccctggaaatggcagctgtgacagtaaaggaagaatcagaagatcctgattattatcaatataacattcaaggaagccaccattcttcagagggcaatgaaggcacagaaatggaagtaccagcagaagattctactcaacatgtcccttcagaaacaagtgaggaccctgaagttgaggtgactattgaagatgatgattattctccaccgtctaagagaccaaaggccaatgagctaccgcagccaccagtcccggaacccgccaatgctgggaagcggaaagtgagggagttcaacttcgagaaatggaatgctcgcatcactgatctacgtaaacaagttgaagaattgtttgaaaggaaatatgctcaagccataaaagccaaaggtccggtgacgatcccgtaccctcttttccagtctcatgttgaagatctttatgtagaaggacttcctgaaggaattccttttagaaggccatctacttacggaattcctcgcctggagaggatattacttgcaaaggaaaggattcgttttgtgattaagaaacatgagcttctgaattcaacacgtgaagatttacagcttgataagccagcttcaggagccaaagacagcagcattcccaagcgcaagagaaagcgggtctcggaaggaaattccgtctcctcttcctcctcgtcttcctcttcctcgtcctctaacccggattcagtggcatcggccaaccagatctcactcgtggtaaagttgcaccgatttggactccggcactcatctctgtggccctcacccctctgtctggcagggccgtctactctgggatgtgggcccaggggacggggaggcactgggctttga

SEQ ID NO: 568 - DNA, 1554 bp, Homo sapiens
atggcccaagttgcaatgtccaccctccccgttgaagatgaggagtcctcggagagcaggatggtggtgacattcctcatgtcagctctcgagtccatgtgtaaagaactggccaagtccaaagccgaagtggcctgcattgcagtgtatgaaacagacgtgtttgtcgtcggaactgaaagaggacgtgcttttgtcaataccagaaaggattttcaaaaagattttgtaaaatattgtgttgaagaagaagaaaaagctgcagagatgcataaaatgaaatctacaacccaggcaaatcggatgagtgtagatgctgtagaaattgaaacactcagaaaaacagttgaggactatttctgcttttgctatgggaaagctttaggcaaatccacagtggtacctgtaccatatgagaagatgctgcgagaccagtcggctgtggtagtgcaggggcttccggaaggtgttgcctttaaacaccccgagaactatgatcttgcaaccctgaaatggattttggagaacaaagcagggatttcattcatcattaagagaccttttttagagccaaagaagcatgtaggtggtcgtgtgatggtaacagatgctgacaggtcaatactatctccaggtggaagttgtggccccatcaaagtgaaaactgaacccacagaagattctggcatttccctggaaatggcagctgtgacagtaaaggaagaatcagaagatcctgattattatcaatataacattcaagcaggcccttctgaaactgatgatgttgatgaaaaacagcccctatcgaagcctttgcaaggaagccaccattcttcagagggcaatgaaggcacagaaatggaagtaccagcagaagatgatgattattctccaccgtctaagagaccaaaggccaatgagctaccgcagccaccagtcccggaacccgccaatgctgggaagcggaaagtgagggagttcaacttcgagaaatggaatgctcgcatcactgatctacgtaaacaagttgaagaattgtttgaaaggaaatatgctcaagccataaaagccaaaggtccggtgacgatcccgtaccctcttttccagtctcatgttgaagatctttatgtagaaggacttcctgaaggaattccttttagaaggccatctacttacggaattcctcgcctggagaggatattacttgcaaaggaaaggattcgttttgtgattaagaaacatgagcttctgaattcaacacgtgaagatttacagcttgataagccagcttcaggagccaaagacagcagcattcccaagcgcaagagaaagcgggtctcggaaggaaattccgtctcctcttcctcctcgtcttcctcttcctcgtcctctaacccggattcagtggcatcggccaaccagatctcactcgtggtaaagttgcaccgatttggactccggcactcatctctgtggccctcacccctctgtctggcagggccgtctactctgggatgtgggcccaggggacggggaggcactgggctttga

SEQ ID NO: 569 - DNA, 2139 bp, Homo sapiens
atggcccaagttgcaatgtccaccctccccgttgaagatgaggagtcctcggagagcaggatggtggtgacattcctcatgtcagctctcgagtccatgtgtaaagaactggccaagtccaaagccgaagtggcctgcattgcagtgtatgaaacagacgtgtttgtcgtcggaactgaaagaggacgtgcttttgtcaataccagaaaggattttcaaaaagattttgtaaaatattgtgttgaagaagaagaaaaagctgcagagatgcataaaatgaaatctacaacccaggcaaatcggatgagtgtagatgctgtagaaattgaaacactcagaaaaacagttgaggactatttctgcttttgctatgggaaagctttaggcaaatccacagtggtacctgtaccatatgagaagatgctgcgagaccagtcggctgtggtagtgcaggggcttccggaaggtgttgcctttaaacaccccgagaactatgatcttgcaaccctgaaatggattttggagaacaaagcagggatttcattcatcattaagagaccttttttagagccaaagaagcatgtaggtggtcgtgtgatggtaacagatgctgacaggtcaatactatctccaggtggaagttgtggccccatcaaagtgaaaactgaacccacagaagattctggcatttccctggaaatggcagctgtgacagtaaaggaagaatcagaagatcctgattattatcaatataacattcaaggcccttctgaaactgatgatgttgatgaaaaacagcccctatcgaagcctttgcaaggaagccaccattcttcagagggcaatgaaggcacagaaatggaagtaccagcagaagacaaaggtctgagtgaggacgcgcggcccgaggagaggcccgtggaggacagccacggtgacgtgatccggcccctgcggaagcaggtggagctgctcttcaacacacgatacgccaaggccattggcatctcggagcccgtcaaggtgccgtactccaagtttctgatgcacccggaggagctgtttgtggtgggactgcctgaaggcatctccctccgcaggcccaactgcttcgggatcgccaagctccggaagattctggaggccagcaacagcatccagtttgtcatcaagaggcccgagctgctcactgagggagtcaaagagcccatcatggatagtcaaggaactgcctcctcacttggcttctctccccctgccctgcccccagagagggattccggggaccctctggtggacgagagcctgaagagacagggctttcaagaaaattatgacgcgaggctctcacggatcgacatcgccaacacactaagggagcaggtccaggaccttttcaataagaaatacggggaagccttgggcatcaagtacccggtccaggtcccctacaagcggatcaagagtaaccccggctccgtgatcatcgaggggctgcccccaggaatcccgttccgaaagccctgtaccttcggctcccagaacctggagaggattcttgctgtggctgacaagatcaagttcacagtcaccaggcctttccaaggactcatcccaaagcctgatgaagatgacgccaacagactcggggagaaggtgatcctgcgggagcaggtgaaggaactcttcaacgagaaatacggtgaggccctgggcctgaaccggccggtgctggtcccttataaactaatccgggacagcccagacgccgtggaggtcacgggtctgcctgatgacatccccttccggaaccccaacacgtacgacatccaccggctggagaagatcctgaaggcccgagagcatgtccgcatggtcatcattaaccagctccaaccctttgcagaaatctgcaatgatgccaaggtgccagccaaagacagcagcattcccaagcgcaagagaaagcgggtctcggaaggaaattccgtctcctcttcctcctcgtcttcctcttcctcgtcctctaacccggattcagtggcatcggccaaccagatctcactcgtgcaatggccaatgtacatggtggactatgccggcctgaacgtgcagctcccgggacctcttaattactag

SEQ ID NO: 570 - DNA, 1113 bp, Homo sapiens
atggatgatcgagaggatctggtgtaccaggcgaagctggccgagcaggctgagcgatacgacggtgctggagaatctggtaaaagcaccattgtgaagcagatgaggatcctgcatgttaatgggtttaatggagagggcggcgaagaggacccgcaggctgcaaggagcaacagcgatggcagtgagaaggcaaccaaagtgcaggacatcaaaaacaacctgaaagaggcgattgaaaccattgtggccgccatgagcaacctggtgccccccgtggagctggccaaccccgagaaccagttcagagtggactacatcctgagtgtgatgaacgtgcctgactttgacttccctcccgaattctatgagcatgccaaggctctgtgggaggatgaaggagtgcgtgcctgctacgaacgctccaacgagtaccagctgattgactgtgcccagtacttcctggacaagatcgacgtgatcaagcaggctgactatgtgccgagcgatcaggacctgcttcgctgccgtgtcctgacttctggaatctttgagaccaagttccaggtggacaaagtcaacttccacatgtttgacgtgggtggccagcgcgatgaacgccgcaagtggatccagtgcttcaacgatgtgactgccatcatcttcgtggtggccagcagcagctacaacatggtcatccgggaggacaaccagaccaaccgcctgcaggaggctctgaacctcttcaagagcatctggaacaacagatggctgcgcaccatctctgtgatcctgttcctcaacaagcaagatctgctcgctgagaaagtccttgctgggaaatcgaagattgaggactactttccagaatttgctcgctacactactcctgaggatgctactcccgagcccggagaggacccacgcgtgacccgggccaagtacttcattcgagatgagtttctgaggatcagcactgccagtggagatgggcgtcactactgctaccctcatttcacctgcgctgtggacactgagaacatccgccgtgtgttcaacgactgccgtgacatcattcagcgcatgcaccttcgtcagtacgagctgctctaa

SEQ ID NO: 571 - DNA, 1110 bp, Homo sapiens
atggatgatcgagaggatctggtgtaccaggcgaagctggccgagcaggctgagcgatacgacggtgctggagaatctggtaaaagcaccattgtgaagcagatgaggatcctgcatgttaatgggtttaatggagagggcggcgaagaggacccgcaggctgcaaggagcaacagcgatggtgagaaggcaaccaaagtgcaggacatcaaaaacaacctgaaagaggcgattgaaaccattgtggccgccatgagcaacctggtgccccccgtggagctggccaaccccgagaaccagttcagagtggactacatcctgagtgtgatgaacgtgcctgactttgacttccctcccgaattctatgagcatgccaaggctctgtgggaggatgaaggagtgcgtgcctgctacgaacgctccaacgagtaccagctgattgactgtgcccagtacttcctggacaagatcgacgtgatcaagcaggctgactatgtgccgagcgatcaggacctgcttcgctgccgtgtcctgacttctggaatctttgagaccaagttccaggtggacaaagtcaacttccacatgtttgacgtgggtggccagcgcgatgaacgccgcaagtggatccagtgcttcaacgatgtgactgccatcatcttcgtggtggccagcagcagctacaacatggtcatccgggaggacaaccagaccaaccgcctgcaggaggctctgaacctcttcaagagcatctggaacaacagatggctgcgcaccatctctgtgatcctgttcctcaacaagcaagatctgctcgctgagaaagtccttgctgggaaatcgaagattgaggactactttccagaatttgctcgctacactactcctgaggatgctactcccgagcccggagaggacccacgcgtgacccgggccaagtacttcattcgagatgagtttctgaggatcagcactgccagtggagatgggcgtcactactgctaccctcatttcacctgcgctgtggacactgagaacatccgccgtgtgttcaacgactgccgtgacatcattcagcgcatgcaccttcgtcagtacgagctgctctaa

SEQ ID NO: 572 - DNA, 1008 bp, Homo sapiens; identical to SEQ ID NO: 389

SEQ ID NO: 573 - DNA, 1068 bp, Homo sapiens
atggatgatcgagaggatctggtgtaccaggcgaagctggccgagcaggctgagcgatacgacggtgctggagaatctggtaaaagcaccattgtgaagcagatgaggatcctgcatgttaatgggtttaatggagacagtgagaaggcaaccaaagtgcaggacatcaaaaacaacctgaaagaggcgattgaaaccattgtggccgccatgagcaacctggtgccccccgtggagctggccaaccccgagaaccagttcagagtggactacatcctgagtgtgatgaacgtgcctgactttgacttccctcccgaattctatgagcatgccaaggctctgtgggaggatgaaggagtgcgtgcctgctacgaacgctccaacgagtaccagctgattgactgtgcccagtacttcctggacaagatcgacgtgatcaagcaggctgactatgtgccgagcgatcaggacctgcttcgctgccgtgtcctgacttctggaatctttgagaccaagttccaggtggacaaagtcaacttccacatgtttgacgtgggtggccagcgcgatgaacgccgcaagtggatccagtgcttcaacgatgtgactgccatcatcttcgtggtggccagcagcagctacaacatggtcatccgggaggacaaccagaccaaccgcctgcaggaggctctgaacctcttcaagagcatctggaacaacagatggctgcgcaccatctctgtgatcctgttcctcaacaagcaagatctgctcgctgagaaagtccttgctgggaaatcgaagattgaggactactttccagaatttgctcgctacactactcctgaggatgctactcccgagcccggagaggacccacgcgtgacccgggccaagtacttcattcgagatgagtttctgaggatcagcactgccagtggagatgggcgtcactactgctaccctcatttcacctgcgctgtggacactgagaacatccgccgtgtgttcaacgactgccgtgacatcattcagcgcatgcaccttcgtcagtacgagctgctctaa

SEQ ID NO: 574 - DNA, 1065 bp, Homo sapiens
atggatgatcgagaggatctggtgtaccaggcgaagctggccgagcaggctgagcgatacgacggtgctggagaatctggtaaaagcaccattgtgaagcagatgaggatcctgcatgttaatgggtttaatggagatgagaaggcaaccaaagtgcaggacatcaaaaacaacctgaaagaggcgattgaaaccattgtggccgccatgagcaacctggtgccccccgtggagctggccaaccccgagaaccagttcagagtggactacatcctgagtgtgatgaacgtgcctgactttgacttccctcccgaattctatgagcatgccaaggctctgtgggaggatgaaggagtgcgtgcctgctacgaacgctccaacgagtaccagctgattgactgtgcccagtacttcctggacaagatcgacgtgatcaagcaggctgactatgtgccgagcgatcaggacctgcttcgctgccgtgtcctgacttctggaatctttgagaccaagttccaggtggacaaagtcaacttccacatgtttgacgtgggtggccagcgcgatgaacgccgcaagtggatccagtgcttcaacgatgtgactgccatcatcttcgtggtggccagcagcagctacaacatggtcatccgggaggacaaccagaccaaccgcctgcaggaggctctgaacctcttcaagagcatctggaacaacagatggctgcgcaccatctctgtgatcctgttcctcaacaagcaagatctgctcgctgagaaagtccttgctgggaaatcgaagattgaggactactttccagaatttgctcgctacactactcctgaggatgctactcccgagcccggagaggacccacgcgtgacccgggccaagtacttcattcgagatgagtttctgaggatcagcactgccagtggagatgggcgtcactactgctaccctcatttcacctgcgctgtggacactgagaacatccgccgtgtgttcaacgactgccgtgacatcattcagcgcatgcaccttcgtcagtacgagctgctctaa

SEQ ID NO: 575 - DNA, 6216 bp, Homo sapiens
atggatggccgagacttcgggccccagcggtccgtgcacggtcccccgccgccgctgctgtccggcctggccatggacagccaccgcgtgggcgcggccactgccggacgcttgcccgcctcgggcttgcccggcccgctgccgcccgggaagtacatggccggcctgaatctccatccgcacccgggcgaggccttcttgggcagctttgtggccagcgggatggggccctcggcctcgtcccatgggagcccagtgccactgccctctgacctgtctttccgctccccaacccctagcaacctgcccatggtgcagctgtgggccgcccacgcccatgaaggcttctcccacctgcccagtgggctgtacccatcctacctccacctgaaccacctggagccccccagcagtgggagccccctcctcagccagctgggtcagcccagcattttcgatacccagaaaggtcaggggccaggaggagacggtttctacctgcccaccgcgggggctccgggctccctgcactctcacgcgccctcggcccggacccctggcggcggccactcctcgggcgccccggccaaaggctcgtcgtcgcgggacggtccagccaaggagcgggcgggccgcggcggggagccgcctccgcttttcggcaagaaggacccgcgcgcccggggcgaggaggcctcggggccacggggcgtggtggacctgacccaggaggcgcgcgccgagggccgccaggaccgggggcccccgcgcctggctgagcgcctgtcgcccttcctggctgagtccaagaccaagaatgcggcgctgcagccgtcggtactgaccatgtgcaacggcggcgccggggacgtggggctgcccgcgctggtggccgaagcggggcgcgggggtgccaaggaggctgcccggcaggacgagggcgcgcggctgctgcggcgcacggagaccctgctccctgggccgcgcccctgcccctcaccgctgcccccgccgcccgcgccccccaaggggcctcctgcaccccccgcggccacccccgccggcgtctacaccgtcttccgcgagcagggccgtgagcaccgcgtggtggcgcccaccttcgtgccttccgtggaggccttcgacgagcgcccggggcccatccagatcgcatcccaggcgcgcgatgcccgggcccgcgagcgcgaggctggcaggccaggggtcctgcaggcgccccccggctccccgcggcctctggaccggcccgagggcctgcgcgagaagaactcggtcatccgctcgctcaagcggccgccccccgcggatgcccccacggtgcgggccacacgcgcctccccggacccccgcgcctacgtgcctgccaaggagctgctcaagcccgaggcggacccgaggccctgcgagcgtgcgccccgcggcccagccggtcctgcagcccaacaggccgccaagctcttcggcctggagcccgggcgccccccgcccaccggccctgagcataaatggaaacccttcgagctgggcaacttcgccgccacgcagatggccgtgctggccgcgcagcaccaccacagccgcgccgaagaggaggccgccgtggtcgctgcctcctcctccaagaaggcctacctggaccctggggctgtgctgccccgctcggcggccacctgcggccggccggtcgctgacatgcactctgcggcccacgggtctggagaggcctcggccatgcagagccttataaagtacagtggcagctttgcccgggacgccgtggccgtgcgccctggtggctgtggcaagaagagcccctttggaggtttgggcaccatgaaacccgagcctgcgcccacctctgcgggtgcctcccgagcccaggcccgtctcccacactccggaggccctgcagcgggcggcggccggcagctgaagcgggaccccgagaggcccgagagcgccaaagctttcgggcgcgagggctctggtgcccagggtgaggcagaagtgcgacacccgcctgtgggcattgcagtggctgtggcccggcagaaggacagtggcggcagtggccggctggggcctgggctggtagaccaggagcgctctctgtcgctgagtaacgtcaaagggcacggccgagcagatgaggactgtgtggacgaccgggccagacaccgggaggaacggctgctcggggcacggctggaccgggatcaggagaagctgctcagagagagtaaggagctggctgacctggcccgcctgcaccctaccagctgtgctcctaacggcctgaaccccaacctcatggtgacggggggcccggcgctggcgggctcaggtcgctggtctgccgaccccgcagcccatctggccacgcacccctggttgccccgctcgggcaacgcatccatgtggctcgctggacacccctacggcttgggtcccccatctctgcaccagggcatggcccctgcgttcccacctggcctggggggctccctcccgtcagcctaccagtttgtcagggacccccaatcgggccagctggtggtcattcccagtgatcaccttcctcactttgcggagctgatggagcgggccaccgtaccgcccctctggcccgccctgtacccgccgggccgcagccccctgcaccacgcccagcagctgcagctcttctcacagcagcacttcctgcggcagcaggagttcctgtacctgcagcagcaggcggcccaggccttggaactgcagaggagcgcccagctcgtgcaggagcggttgaaggcgcaggagcaccgggcggagatggaagagaaggggagcaagcggggcctggaggctgcgggcaaggctggcctggccaccgccggccccgggctgctgccgcggaagccccctggcctggccgccggccccgcgggcacctacggcaaggccgtgagcccgccaccatcaccccgcgcatcccctgtggctgccctgaaggccaaggtcatccagaagctggaggacgtgtccaagccacccgcctacgcctaccccgccacccccagctcccaccccaccagcccgccgcccgcctccccaccgcccaccccgggtatcacccgcaaggaggaggctcccgagaatgtggtcgagaagaaagacttggagttggagaaggaagcccccagccccttccaggccctgttctcagatatcccgcccaggtacccgttccaagccctgccaccgcactacgggaggccctaccctttcctgctgcagcccacggccgccgccgacgcggacggcttggcccctgatgtgccgctcccggctgatgggcccgagcgcctggcactctcacccgaagacaagcccatccgcttgtccccctccaagatcacagagccgctgcgggagggcccggaggaagaaccgctggctgagcgggaggtgaaggcagaggtggaggacatggacgagggccccacagagctgccgcctctggagtcgccgctgccactgcccgccgcggaagccatggctacccccagccctgcagggggttgtggaggtggcctgttggaggcccaggcgctgagtgccaccgggcagagctgcgcagagccctctgagtgtccagactttgtggaggggcctgaaccacgggtggattccccgggccggacagaaccctgcaccgccgccctggacctgggggtgcagctgacacccgagacactggtggaggccaaggaggagccggtggaggtgcctgtggcggtgcccgtggtggaggcagtgcccgaggaaggcctggcgcaggtggcaccgagcgagtcccagcccaccctagaaatgtcagactgtgacgtgcccgccggggagggacagtgcccgagcctggagccccaagaggccgtgcctgtactcggcagcacctgcttcctggaagaggcaagctctgaccagttcctgcccagtctggaggacccactggctggcatgaacgccctggcggcagctgcggagctgccccaggccaggcctctgccctccccgggtgctgctggagcccaggccttggagaagctggaagcagccgagagccttgtcttggagcagagcttcctgcatggcatcaccctgctaagtgagatcgcagagctggagctggagaggaggagccaagagatgggaggtgcggagcgggccctggtggcgcggccctccctggagagtctgctggcagctggcagccacatgctgagggaggtgctggatgggcccgtggtggacccactcaagaacctgcggctcccgcgggagctgaagcccaacaagaagtacagctggatgcgcaagaaggaggagcggatgtatgccatgaagtcctccctggaggacatggacgccctggagctggacttccggatgcggctggccgaggtgcagcgccagtacaaggagaagcagcgtgagctggtgaagctgcagcgccgccgggactccgaggacaggcgcgaggaaccccatagaagcttggcacgcagaggccctggcaggccgcggaaacggacccacgccccgagcgccctgtcgcccccccgcaagagagggaagagcggccacagtagcggaaagctgagcagcaagtctctgctgacatcagatgattatgagctgggagcagggataagaaagagacacaaggggtctgaggaggaacatgatgccctcatcggaatggggaaagccagggggaggaaccagacttgggatgaacatgaggcctcgtcggacttcatcagtcaggccttgtctgatgccattaaaaaatggcaggagctgtcaccagaaaccagtggaaaaaggaagaagagaaaacaaatgaaccagtattcttacattgatttcaagtttgaacaaggtgacataaaaatagaaaagaggatgttctttcttgaaaataagcgacgacattgtaggtcctatgaccgacgtgctctccttccagctgtgcaacaagagcaggagttctatgagcagaaaatcaaagagatggcagagcatgaagactttttgcttgccctacagatgaatgaagaacagtatcaaaaggatggccagctgattgagtgtcgctgctgctatggggaatttccattcgaggagctgacgcagtgcgcagatgctcacttgttctgcaaagagtgtctcatcagatatgcccaagaggcagtctttggatctggaaagttggagctcagctgcatggaaggcagctgcacgtgttcgttcccaaccagtgagctggagaaggtgctcccccagaccatcctgtataagtactatgagcgaaaagccgaggaggaggttgcggcagcctacgccgacgagcttgtcaggtgcccgtcctgtagctttccggctctgttggacagtgatgtgaagaggttcagctgtcctaatcctcactgccgaaaggaaacctgtaggaagtgtcagggactctggaaagaacataatggcctcacctgtgaagagctggctgaaaaagacgacatcaagtaccgtacctctattgaagaaaaaatgactgctgcccgcattagaaaatgccacaagtgtgggactggcctcatcaaatctgaaggctgcaaccgcatgtcttgccgctgtggtgcccagatgtgctacctctgtcgagtttctattaatggatatgaccatttctgccaacatccccgctcaccaggagccccttgccaggagtgttcaagatgctctctctggaccgatcccactgaagatgatgagaagcttattgaggaaatccagaaggaggctgaagaggaacagaaaagaaagaatggagagaacaccttcaaacgcattggacccccgctggagaagcctgtggagaaggtgcagagggtggaggccctcccgaggcccgttccgcagaacctgccacagccacagatgccaccctatgccttcgcgcacccacccttccccctgcctcccgtgcggcctgtgttcaacaacttcccactcaacatggggcctatcccagccccgtacgtgccccctctgcccaacgtgcgggtcaactatgacttcggtcccatccacatgcccctggagcacaacctgcccatgcactttggcccccagccgcggcatcgcttctga

SEQ ID NO: 576 - DNA, 549 bp, Homo sapiens
atgtggcagctctgggcctccctctgctgcctgctggtgttggccaatgcccggagcaggccctctttccatcccctgtcggatgagctggtcaactatgtcaacaaacggaataccacgtggcaggccgggcacaacttctacaacgtggacatgagctacttgaagaggctatgtggtaccttcctgggtgggcccaagccaccccagagagttatgtttaccgaggacctgaagctgcctgcaagcttcgatgcacgggaacaatggccacagtgtcccaccatcaaagagatcagagaccagggctcctgtggctcctgctggatttatcatagaatccccgactcagacccatcttctagcaaaacaaggcagatcatctccaccatccggacgcagaatcttcccaactgtcagctgatttcccgaagccactactcccccatctacctgtcgtttgtcatgcttttggctgccctgagctggcagtacctgaccactctctcccaggtaacagaagactatgttcagactggagaacactga

SEQ ID NO: 577 - DNA, 831 bp, Homo sapiens
atggacatgaacaggagagcctcctgtcttctcccggatctttgtgggcaggggtggggctggcggttattccctgcaagctgtgcttatctagggagcgtcccttggagggtttggggtctgggaggtctgctcgcaccacttgctgcagctgggggtgggtccacgagtggcctcgggcacttgggtagcacacagtggtctggagagctggtggtgcttctctcagaggttttcattagaggctgtcttttcagctgtaatggtggctatcctgctgaagcttggaacttctggacaagaaaaggcctggtttctggtggcctctatgaatcccatgtagggtgcagaccgtactccatccctccctgtgagcaccacgtcaacggctcccggcccccatgcacgggggagggagatacccccaagtgtagcaagatctgtgagcctggctacagcccgacctacaaacaggacaagcactacggatacaattcctacagcgtctccaatagcgagaaggacatcatggccgagatctacaaaaacggccccgtggagggagctttctctgtgtattcggacttcctgctctacaagtcaggagtgtaccaacacgtcaccggagagatgatgggtggccatgccatccgcatcctgggctggggagtggagaatggcacaccctactggctggttgccaactcctggaacactgactggggtgacaatggcttctttaaaatactcagaggacaggatcactgtggaatcgaatcagaagtggtggctggaattccacgcaccgatcagtactgggaaaagatctaa

SEQ ID NO: 578 - DNA, 1472 bp, Homo sapiens
atgtggcagctctgggcctccctctgctgcctgctggtgttggccaatgcccggagcaggccctctttccatcccctgtcggatgagctggccttcggggctgtggaagccatctctgaccggatctgcatccacaccaatgcgcacgtcagcgtggaggtgtcggcggaggacctgctcacatgctgtggcagcatgtgtggggacggctgtaatggtggctatcctgctgaagcttggaacttctggacaagaaaaggcctggtttctggtggcctctatgaatcccatgtagggtgcagaccgtactccatccctccctgtgagcaccacgtcaacggctcccggcccccatgcacgggggagggagatacccccaagtgtagcaagatctgtgagcctggctacagcccgacctacaaacaggacaagcactacggatacaattcctacagcgtctccaatagcgagaaggacatcatggccgagatctacaaaaacggccccgtggagggagctttctctgtgtattcggacttcctgctctacaagtcaggagtgtaccaacacgtcaccggagagatgatgggtggccatgccatccgcatcctgggctggggagtggagaatggcacaccctactggctggttgccaactcctggaacactgactggggtgacaatggcttctttaaaatactcagaggacaggatcactgtggaatcgaatcagaagtggtggctggaattccacgcaccgatcagtactgggaaaagatctaacctcagagtttgaagaccccttagttggtgaagatacagaacgtgccaactctatgggcctgtttttgcagaaaacaaacatcatccgtgactatctggaagaccagcaaggaggaagagagttctggcctcaagaggtttggagcaggtatgttaagaagttaggggattttgctaagccggagaatattgacttggccgtgcagtgcctgaatgaacttataaccaatgcactgcaccacatcccagatgtcatcacctacctttcgagactcagaaaccagagtgtgtttaacttctgtgctattccacaggtgatggccattgccactttggctgcctgttataataaccagcaggtgttcaaaggggcagtgaagattcggaaagggcaagcagtgaccctgatgatggatgccaccaatatgccagctgtcaaagccatcatatatcagtatatggaagagatttatcatagaatccccgactcagacccatcttctagcaaaacaaggcagatcatctccaccatccggacgcagaatcttcccaactgtcagctgatttcccgaagccactactcccccatctacctgtcgtttgtcatgcttttggctgccctgagctggcagtacctgaccactctctcccaggtaacagaagactatgttcagactggagaacactga

SEQ ID NO: 579 - DNA, 978 bp, Homo sapiens
atgtggcagctctgggcctccctctgctgcctgctggtgttggccaatgcccggagcaggccctctttccatcccctgtcggatgagctggtcaactatgtcaacaaacggaataccacgtggcaggccgggcacaacttctacaacgtggacatgagctacttgaagaggctatgtggtaccttcctgggtgggcccaagccaccccagagagttatgtttaccgaggacctgaagctgcctgcaagcttcgatgcacgggaacaatggccacagtgtcccaccatcaaagagatcagagaccagggctcctgtggctcctgctggatctcccttgagtttagaaatctggctgagaaataccaaacagtgattgccgacatttgccggagaatgggcattgggatggcagagtttttggataagcatgtgacctctgaacaggagtgggacaagtactgccactatgttgctgggctggtcggaattggcctttcccgtcttttctcagcctcagagtttgaagaccccttagttggtgaagatacagaacgtgccaactctatgggcctgtttttgcagaaaacaaacatcatccgtgactatctggaagaccagcaaggaggaagagagttctggcctcaagaggtttggagcaggtatgttaagaagttaggggattttgctaagccggagaatattgacttggccgtgcagtgcctgaatgaacttataaccaatgcactgcaccacatcccagatgtcatcacctacctttcgagactcagaaaccagagtgtgtttaacttctgtgctattccacaggtgatggccattgccactttggctgcctgttataataaccagcaggtgttcaaaggggcagtgaagattcggaaagggcaagcagtgaccctgatgatggatgccaccaatatgccagctgtcaaagccatcatatatcagtatatggaagag

SEQ ID NO: 580 - DNA, 1709 bp, Homo sapiens
atgtggcagctctgggcctccctctgctgcctgctggtgttggccaatgcccggagcaggccctctttccatcccctgtcggatgagctggtcaactatgtcaacaaacggaataccacgtggcaggccgggcacaacttctacaacgtggacatgagctacttgaagaggctatgtggtaccttcctgggtgggcccaagccaccccagagagttatgtttaccgaggacctgaagctgcctgcaagcttcgatgcacgggaacaatggccacagtgtcccaccatcaaagagatcagagaccagggctcctgtggctcctgctgggccttcggggctgtggaagccatctctgaccggatctgcatccacaccaatgcgcacgtcagcgtggaggtgtcggcggaggacctgctcacatgctgtggcagcatgtgtggggacggctgtaatggtggctatcctgctgaagcttggaacttctggacaagaaaaggcctggtttctggtggcctctatgaatcccatgtagggtgcagaccgtactccatccctccctgtgagcaccacgtcaacggctcccggcccccatgcacgggggagggagatacccccaagtgtagcaagatctgtgagcctggctacagcccgacctacaaacaggacaagcactacggatacaattcctacagcgtctccaatagcgagaaggacatcatggccgagatctacaaaaacggccccgtggagggagctttctctgtgtattcggacttcctgctctacaagtcaggagtgtaccaacacgtcaccggagagatgatgggtggccatgccatccgcatcctgggctggggagtggagaatggcacaccctactggctggttgccaactcctggaacactgactggggtgacaatggcttctttaaaatactcagaggacaggatcactgtggaatcgaatcagaagtggtggctggaattccacgcaccgatcagtactgggaaaagatctaacctcagagtttgaagaccccttagttggtgaagatacagaacgtgccaactctatgggcctgtttttgcagaaaacaaacatcatccgtgactatctggaagaccagcaaggaggaagagagttctggcctcaagaggtttggagcaggtatgttaagaagttaggggattttgctaagccggagaatattgacttggccgtgcagtgcctgaatgaacttataaccaatgcactgcaccacatcccagatgtcatcacctacctttcgagactcagaaaccagagtgtgtttaacttctgtgctattccacaggtgatggccattgccactttggctgcctgttataataaccagcaggtgttcaaaggggcagtgaagattcggaaagggcaagcagtgaccctgatgatggatgccaccaatatgccagctgtcaaagccatcatatatcagtatatggaagagatttatcatagaatccccgactcagacccatcttctagcaaaacaaggcagatcatctccaccatccggacgcagaatcttcccaactgtcagctgatttcccgaagccactactcccccatctacctgtcgtttgtcatgcttttggctgccctgagctggcagtacctgaccactctctcccaggtaacagaagactatgttcagactggagaacactga

SEQ ID NO: 581 - DNA, 1200 bp, Homo sapiens
atgtggcagctctgggcctccctctgctgcctgctggtgttggccaatgcccggagcaggccctctttccatcccctgtcggatgagctggtcaactatgtcaacaaacggaataccacgtggcaggccgggcacaacttctacaacgtggacatgagctacttgaagaggctatgtggtaccttcctgggtgggcccaagccaccccagagagttatgtttaccgaggacctgaagctgcctgcaagcttcgatgcacgggaacaatggccacagtgtcccaccatcaaagagatcagagaccagggctcctgtggctcctgctggatctcccttgagtttagaaatctggctgagaaataccaaacagtgattgccgacatttgccggagaatgggcattgggatggcagagtttttggataagcatgtgacctctgaacaggagtgggacaagtactgccactatgttgctgggctggtcggaattggcctttcccgtcttttctcagcctcagagtttgaagaccccttagttggtgaagatacagaacgtgccaactctatgggcctgtttttgcagaaaacaaacatcatccgtgactatctggaagaccagcaaggaggaagagagttctggcctcaagaggtttggagcaggtatgttaagaagttaggggattttgctaagccggagaatattgacttggccgtgcagtgcctgaatgaacttataaccaatgcactgcaccacatcccagatgtcatcacctacctttcgagactcagaaaccagagtgtgtttaacttctgtgctattccacaggtgatggccattgccactttggctgcctgttataataaccagcaggtgttcaaaggggcagtgaagattcggaaagggcaagcagtgaccctgatgatggatgccaccaatatgccagctgtcaaagccatcatatatcagtatatggaagagatttatcatagaatccccgactcagacccatcttctagcaaaacaaggcagatcatctccaccatccggacgcagaatcttcccaactgtcagctgatttcccgaagccactactcccccatctacctgtcgtttgtcatgcttttggctgccctgagctggcagtacctgaccactctctcccaggtaacagaagactatgttcagactggagaacactga

SEQ ID NO: 582 - DNA, 1020 bp, Homo sapiens
atgtggcagctctgggcctccctctgctgcctgctggtgttggccaatgcccggagcaggccctctttccatcccctgtcggatgagctggtcaactatgtcaacaaacggaataccacgtggcaggccgggcacaacttctacaacgtggacatgagctacttgaagaggctatgtggtaccttcctgggtgggcccaagccaccccagagagttatgtttaccgaggacctgaagctgcctgcaagcttcgatgcacgggaacaatggccacagtgtcccaccatcaaagagatcagagaccagggctcctgtggctcctgctgggccttcggggctgtggaagccatctctgaccggatctgcatccacaccaatgcgcacgtcagcgtggaggtgtcggcggaggacctgctcacatgctgtggcagcatgtgtggggacggctgtaatggtggctatcctgctgaagcttggaacttctggacaagaaaaggcctggtttctggtggcctctatgaatcccatgtagggtgcagaccgtactccatccctccctgtgagcaccacgtcaacggctcccggcccccatgcacgggggagggagatacccccaagtgtagcaagatctgtgagcctggctacagcccgacctacaaacaggacaagcactacggatacaattcctacagcgtctccaatagcgagaaggacatcatggccgagatctacaaaaacggccccgtggagggagctttctctgtgtattcggacttcctgctctacaagtcaggagtgtaccaacacgtcaccggagagatgatgggtggccatgccatccgcatcctgggctggggagtggagaatggcacaccctactggctggttgccaactcctggaacactgactggggtgacaatggcttctttaaaatactcagaggacaggatcactgtggaatcgaatcagaagtggtggctggaattccacgcaccgatcagtactgggaaaagatctaa

SEQ ID NO: 583 - DNA, 1005 bp, Homo sapiens
atgtggcagctctgggcctccctctgctgcctgctggtgttggccaatgcccggagcaggccctctttccatcccctgtcggatgagctggccttcggggctgtggaagccatctctgaccggatctgcatccacaccaatgcgcacgtcagcgtggaggtgtcggcggaggacctgctcacatgctgtggcagcatgtgtggggacggctgtaatggtggctatcctgctgaagcttggaacttctggacaagaaaaggcctggtttctggtggcctctatgaatcccatgtagggtgcagaccgtactccatccctccctgtgagcaccacgtcaacggctcccggcccccatgcacgggggagggagatacccccaagtgtagcaagatctgtgagcctggctacagcccgacctacaaacaggacaagcactacggatacaattcctacagcgtctccaatagcgagaaggacatcatggccgagatctacaaaaacggccccgtggagggagctttctctgtgtattcggacttcctgctctacaagtcaggagtgtaccaacacgtcaccggagagatgatgggtggccatgccatccgcatcctgggctggggagtggagaatggcacaccctactggctggttgccaactcctggaacactgactggggtgacaatggcttctttaaaatactcagaggacaggatcactgtggaatcgaatcagaagtggtggctggaattccacgcaccgatcagtactgggaaaagatctaaatttatcatagaatccccgactcagacccatcttctagcaaaacaaggcagatcatctccaccatccggacgcagaatcttcccaactgtcagctgatttcccgaagccactactcccccatctacctgtcgtttgtcatgcttttggctgccctgagctggcagtacctgaccactctctcccaggtaacagaagactatgttcagactggagaacactga

SEQ ID NO: 584 - DNA, 1520 bp, Homo sapiens
atggacatgaacaggagagcctcctgtcttctcccggatctttgtgggcaggggtggggctggcggttattccctgcaagctgtgcttatctagggagcgtcccttggagggtttggggtctgggaggtctgctcgcaccacttgctgcagctgggggtgggtccacgagtggcctcgggcacttgggtagcacacagtggtctggagagctggtggtgcttctctcagaggttttcattagaggctgtcttttcagctgtaatggtggctatcctgctgaagcttggaacttctggacaagaaaaggcctggtttctggtggcctctatgaatcccatgtagggtgcagaccgtactccatccctccctgtgagcaccacgtcaacggctcccggcccccatgcacgggggagggagatacccccaagtgtagcaagatctgtgagcctggctacagcccgacctacaaacaggacaagcactacggatacaattcctacagcgtctccaatagcgagaaggacatcatggccgagatctacaaaaacggccccgtggagggagctttctctgtgtattcggacttcctgctctacaagtcaggagtgtaccaacacgtcaccggagagatgatgggtggccatgccatccgcatcctgggctggggagtggagaatggcacaccctactggctggttgccaactcctggaacactgactggggtgacaatggcttctttaaaatactcagaggacaggatcactgtggaatcgaatcagaagtggtggctggaattccacgcaccgatcagtactgggaaaagatctaacctcagagtttgaagaccccttagttggtgaagatacagaacgtgccaactctatgggcctgtttttgcagaaaacaaacatcatccgtgactatctggaagaccagcaaggaggaagagagttctggcctcaagaggtttggagcaggtatgttaagaagttaggggattttgctaagccggagaatattgacttggccgtgcagtgcctgaatgaacttataaccaatgcactgcaccacatcccagatgtcatcacctacctttcgagactcagaaaccagagtgtgtttaacttctgtgctattccacaggtgatggccattgccactttggctgcctgttataataaccagcaggtgttcaaaggggcagtgaagattcggaaagggcaagcagtgaccctgatgatggatgccaccaatatgccagctgtcaaagccatcatatatcagtatatggaagagatttatcatagaatccccgactcagacccatcttctagcaaaacaaggcagatcatctccaccatccggacgcagaatcttcccaactgtcagctgatttcccgaagccactactcccccatctacctgtcgtttgtcatgcttttggctgccctgagctggcagtacctgaccactctctcccaggtaacagaagactatgttcagactggagaacactga

SEQ ID NO: 585 - DNA, 1242 bp, Homo sapiens
atgtggcagctctgggcctccctctgctgcctgctggtgttggccaatgcccggagcaggccctctttccatcccctgtcggatgagctggtcaactatgtcaacaaacggaataccacgtggcaggccgggcacaacttctacaacgtggacatgagctacttgaagaggctatgtggtaccttcctgggtgggcccaagccaccccagagagttatgtttaccgaggacctgaagctgcctgcaagcttcgatgcacgggaacaatggccacagtgtcccaccatcaaagagatcagagaccagggctcctgtggctcctgctgggccttcggggctgtggaagccatctctgaccggatctgcatccacaccaatgcgcacgtcagcgtggaggtgtcggcggaggacctgctcacatgctgtggcagcatgtgtggggacggctgtaatggtggctatcctgctgaagcttggaacttctggacaagaaaaggcctggtttctggtggcctctatgaatcccatgtagggtgcagaccgtactccatccctccctgtgagcaccacgtcaacggctcccggcccccatgcacgggggagggagatacccccaagtgtagcaagatctgtgagcctggctacagcccgacctacaaacaggacaagcactacggatacaattcctacagcgtctccaatagcgagaaggacatcatggccgagatctacaaaaacggccccgtggagggagctttctctgtgtattcggacttcctgctctacaagtcaggagtgtaccaacacgtcaccggagagatgatgggtggccatgccatccgcatcctgggctggggagtggagaatggcacaccctactggctggttgccaactcctggaacactgactggggtgacaatggcttctttaaaatactcagaggacaggatcactgtggaatcgaatcagaagtggtggctggaattccacgcaccgatcagtactgggaaaagatctaaatttatcatagaatccccgactcagacccatcttctagcaaaacaaggcagatcatctccaccatccggacgcagaatcttcccaactgtcagctgatttcccgaagccactactcccccatctacctgtcgtttgtcatgcttttggctgccctgagctggcagtacctgaccactctctcccaggtaacagaagactatgttcagactggagaacactga

SEQ ID NO: 586 - DNA, 870 bp, Homo sapiens
atgcacgggaacaatggccacagtgtcccaccatcaaagagatcagagaccagggctcctgtggctcctgctggctgtaatggtggctatcctgctgaagcttggaacttctggacaagaaaaggcctggtttctggtggcctctatgaatcccatgtagggtgcagaccgtactccatccctccctgtgagcaccacgtcaacggctcccggcccccatgcacgggggagggagatacccccaagtgtagcaagatctgtgagcctggctacagcccgacctacaaacaggacaagcactacggatacaattcctacagcgtctccaatagcgagaaggacatcatggccgagatctacaaaaacggccccgtggagggagctttctctgtgtattcggacttcctgctctacaagtcaggagtgtaccaacacgtcaccggagagatgatgggtggccatgccatccgcatcctgggctggggagtggagaatggcacaccctactggctggttgccaactcctggaacactgactggggtgacaatggcttctttaaaatactcagaggacaggatcactgtggaatcgaatcagaagtggtggctggaattccacgcaccgatcagtactgggaaaagatctaaatttatcatagaatccccgactcagacccatcttctagcaaaacaaggcagatcatctccaccatccggacgcagaatcttcccaactgtcagctgatttcccgaagccactactcccccatctacctgtcgtttgtcatgcttttggctgccctgagctggcagtacctgaccactctctcccaggtaacagaagactatgttcagactggagaacactga

SEQ ID NO: 587 - DNA, 1337 bp, Homo sapiens
atgcacgggaacaatggccacagtgtcccaccatcaaagagatcagagaccagggctcctgtggctcctgctggctgtaatggtggctatcctgctgaagcttggaacttctggacaagaaaaggcctggtttctggtggcctctatgaatcccatgtagggtgcagaccgtactccatccctccctgtgagcaccacgtcaacggctcccggcccccatgcacgggggagggagatacccccaagtgtagcaagatctgtgagcctggctacagcccgacctacaaacaggacaagcactacggatacaattcctacagcgtctccaatagcgagaaggacatcatggccgagatctacaaaaacggccccgtggagggagctttctctgtgtattcggacttcctgctctacaagtcaggagtgtaccaacacgtcaccggagagatgatgggtggccatgccatccgcatcctgggctggggagtggagaatggcacaccctactggctggttgccaactcctggaacactgactggggtgacaatggcttctttaaaatactcagaggacaggatcactgtggaatcgaatcagaagtggtggctggaattccacgcaccgatcagtactgggaaaagatctaacctcagagtttgaagaccccttagttggtgaagatacagaacgtgccaactctatgggcctgtttttgcagaaaacaaacatcatccgtgactatctggaagaccagcaaggaggaagagagttctggcctcaagaggtttggagcaggtatgttaagaagttaggggattttgctaagccggagaatattgacttggccgtgcagtgcctgaatgaacttataaccaatgcactgcaccacatcccagatgtcatcacctacctttcgagactcagaaaccagagtgtgtttaacttctgtgctattccacaggtgatggccattgccactttggctgcctgttataataaccagcaggtgttcaaaggggcagtgaagattcggaaagggcaagcagtgaccctgatgatggatgccaccaatatgccagctgtcaaagccatcatatatcagtatatggaagagatttatcatagaatccccgactcagacccatcttctagcaaaacaaggcagatcatctccaccatccggacgcagaatcttcccaactgtcagctgatttcccgaagccactactcccccatctacctgtcgtttgtcatgcttttggctgccctgagctggcagtacctgaccactctctcccaggtaacagaagactatgttcagactggagaacactga

SEQ ID NO: 588 - DNA, 783 bp, Homo sapiens
atgtggcagctctgggcctccctctgctgcctgctggtgttggccaatgcccggagcaggccctctttccatcccctgtcggatgagctggccttcggggctgtggaagccatctctgaccggatctgcatccacaccaatgcgcacgtcagcgtggaggtgtcggcggaggacctgctcacatgctgtggcagcatgtgtggggacggctgtaatggtggctatcctgctgaagcttggaacttctggacaagaaaaggcctggtttctggtggcctctatgaatcccatgtagggtgcagaccgtactccatccctccctgtgagcaccacgtcaacggctcccggcccccatgcacgggggagggagatacccccaagtgtagcaagatctgtgagcctggctacagcccgacctacaaacaggacaagcactacggatacaattcctacagcgtctccaatagcgagaaggacatcatggccgagatctacaaaaacggccccgtggagggagctttctctgtgtattcggacttcctgctctacaagtcaggagtgtaccaacacgtcaccggagagatgatgggtggccatgccatccgcatcctgggctggggagtggagaatggcacaccctactggctggttgccaactcctggaacactgactggggtgacaatggcttctttaaaatactcagaggacaggatcactgtggaatcgaatcagaagtggtggctggaattccacgcaccgatcagtactgggaaaagatctaa

SEQ ID NO: 589 - DNA, 1053 bp, Homo sapiens
atggacatgaacaggagagcctcctgtcttctcccggatctttgtgggcaggggtggggctggcggttattccctgcaagctgtgcttatctagggagcgtcccttggagggtttggggtctgggaggtctgctcgcaccacttgctgcagctgggggtgggtccacgagtggcctcgggcacttgggtagcacacagtggtctggagagctggtggtgcttctctcagaggttttcattagaggctgtcttttcagctgtaatggtggctatcctgctgaagcttggaacttctggacaagaaaaggcctggtttctggtggcctctatgaatcccatgtagggtgcagaccgtactccatccctccctgtgagcaccacgtcaacggctcccggcccccatgcacgggggagggagatacccccaagtgtagcaagatctgtgagcctggctacagcccgacctacaaacaggacaagcactacggatacaattcctacagcgtctccaatagcgagaaggacatcatggccgagatctacaaaaacggccccgtggagggagctttctctgtgtattcggacttcctgctctacaagtcaggagtgtaccaacacgtcaccggagagatgatgggtggccatgccatccgcatcctgggctggggagtggagaatggcacaccctactggctggttgccaactcctggaacactgactggggtgacaatggcttctttaaaatactcagaggacaggatcactgtggaatcgaatcagaagtggtggctggaattccacgcaccgatcagtactgggaaaagatctaaatttatcatagaatccccgactcagacccatcttctagcaaaacaaggcagatcatctccaccatccggacgcagaatcttcccaactgtcagctgatttcccgaagccactactcccccatctacctgtcgtttgtcatgcttttggctgccctgagctggcagtacctgaccactctctcccaggtaacagaagactatgttcagactggagaacactga

SEQ ID NO: 590 - DNA, 648 bp, Homo sapiens
atgcacgggaacaatggccacagtgtcccaccatcaaagagatcagagaccagggctcctgtggctcctgctggctgtaatggtggctatcctgctgaagcttggaacttctggacaagaaaaggcctggtttctggtggcctctatgaatcccatgtagggtgcagaccgtactccatccctccctgtgagcaccacgtcaacggctcccggcccccatgcacgggggagggagatacccccaagtgtagcaagatctgtgagcctggctacagcccgacctacaaacaggacaagcactacggatacaattcctacagcgtctccaatagcgagaaggacatcatggccgagatctacaaaaacggccccgtggagggagctttctctgtgtattcggacttcctgctctacaagtcaggagtgtaccaacacgtcaccggagagatgatgggtggccatgccatccgcatcctgggctggggagtggagaatggcacaccctactggctggttgccaactcctggaacactgactggggtgacaatggcttctttaaaatactcagaggacaggatcactgtggaatcgaatcagaagtggtggctggaattccacgcaccgatcagtactgggaaaagatctaa

SEQ ID NO: 591 - DNA, 1248 bp, Homo sapiens
atggcggtgacggaagcgagcctgttgcgccagtgccccctgcttctgccccagaaccggtcgaaaaccgtgtatgagggattcatctcggctcagggaagagacttccaccttaggatagtgttgcctgaagatttacaactgaagaatgcaagattattatgtagttggcagctgagaacaatacttagtggataccatcgaatagtacaacagagaatgcagcactctcctgatctaatgagctttatgatggagttgaagatgcttttggaagttgccttaaagaatagacaagagctgtatgcactacctcctcctccccagttctactcaagccttattgaagagataggaactcttggttgggataaacttgtgtatgcggatacctgcttcagtaccatcaagttaaaagcagaagatgcttctggtagagagcatttaatcactctcaagttgaaggcaaagtatcctgcagaatcaccagattattttgtggattttcctgttccattttgtgcctcctggacacctcagagctccttaataagcatttatagtcagtttttggcagcaatagaatcactaaaggcattctgggatgttatggatgaaatcgatgagaagacctgggtacttgagccagaaaaacctccacggagtgcaacagcacgcagaattgcattaggtaataatgtttccataaatatagaggtagaccccaggcatcctactatgcttcctgagtgcttctttcttggagctgaccatgtggtaaaacccctgggaattaagctgagcaggaacatacatttgtgggatccagaaaatagtgtgttacaaaatttgaaagatgttttagaaattgattttccagctcgtgctatcctggaaaaatctgaaagcacaaggagaagacagaaatatcaagagtctcaagaacctttgaatgaagtaaacagtttcccacaaaaaatcagctatacacaattcccaaactcattttatgagcctcatcaagattttaccagtccagatatattcaagaagtcaagatctccatcttggtataaatacacttccacagtcagcacggggatcacagacttagaaagttcaactggactttggcctacaatttcccagtttactcttagtgaagagacaaacgcagatgtttattattatcgcatcatcatacctgtccttttgatgttagtatttcttgctttattttttctctga

SEQ ID NO: 592 - DNA, 549 bp, Homo sapiens
atggcggtgacggaagcgagcctgttgcgccagtgccccctgcttctgccccagaaccggtcgaaaaccgtgtatgagggattcatctcggctcagggaagagacttccaccttaggatagtgttgcctgaagatttacaactgaagaatgcaagattattatgtagttggcagctgagaacaatacttagtggataccatcgaatagtacaacagagaatgcagcactctcctgatctaatgagctttatgatggagttgaagatgcttttggaagttgccttaaagaatagacaagagctgtatgcactacctcctcctccccagttctactcaagccttattgaagagataggaactcttggttgggataaacttgtgtatgcggatacctgcttcagtaccatcaagttaaaagcagaagatgcttctggtagagagcatttaatcactctcaagttgaaggcaaagtatcctgcagaatcaccagattattttgtggattttcctgttccattttgtgcctcctggacacctcagtttaggtag

SEQ ID NO: 593 - DNA, 1047 bp, Homo sapiens
atggcggtgacggaagcgagcctgttgcgccagtgccccctgcttctgccccagaaccggtcgaaaaccgtgtatgagggattcatctcggctcaggaagttgccttaaagaatagacaagagctgtatgcactacctcctcctccccagttctactcaagccttattgaagagataggaactcttggttgggataattacagatttatggtaatggaaagactaggaatagatttacagaagatctcaggccagaatggtacctttaaaaagtcaactgtcctgcaattaggtatccgaatgttggatgtactggaatatatacatgaaaatgaatatgttcatggtgatataaaagcagcaaatctacttttgggttacaaaaatccagaccaggtttatcttgcagattatggactttcctacagatattgtcccaatgggaaccacaaacagtatcaggaaaatcctagaaaaggccataatgggacaatagagtttaccagcttggatgcccacaagggagtagccttgtccagacgaagtgacgttgagatcctcggctactgcatgctgcggtggttgtgtgggaaacttccctgggaacagaacctgaaggaccctgtggctgtgcagactgctaaaacaaatctgttggacgagctcccccagtcagtgcttaaatgggctccttctggaagcagttgctgtgaaatagcccaatttttggtatgtgctcatagtttagcatatgatgaaaagccaaactatcaagccctcaagaaaattttgaaccctcatggaatacctttaggaccactggacttttccacaaaaggacagagtataaatgtccatactccaaacagtcaaaaagttgattcacaaaaggctgcaacaaagcaagtcaacaaggcacacaataggttaatcgaaaaaaaagtccacagtgagagaagcgctgagtcctgtgcaacatggaaagtgcagaaagaggagaaactgattggattgatgaacaatgaagcagctcaggtagaagcttag

SEQ ID NO: 594 - DNA, 1524 bp, Homo sapiens
atggcggtgacggaagcgagcctgttgcgccagtgccccctgcttctgccccagaaccggtcgaaaaccgtgtatgagggattcatctcggctcagggaagagacttccaccttaggatagtgttgcctgaagatttacaactgaagaatgcaagattattatgtagttggcagctgagaacaatacttagtggataccatcgaatagtacaacagagaatgcagcactctcctgatctaatgagctttatgatggagttgaagatgcttttggaagttgccttaaagaatagacaagagctgtatgcactacctcctcctccccagttctactcaagccttattgaagagataggaactcttggttgggataaacttgtgtatgcggatacctgcttcagtaccatcaagttaaaagcagaagatgcttctggtagagagcatttaatcactctcaagttgaaggcaaagtatcctgcagaatcaccagattattttgtggattttcctgttccattttgtgcctcctggacacctcaggtttatcttgcagattatggactttcctacagatattgtcccaatgggaaccacaaacagtatcaggaaaatcctagaaaaggccataatgggacaatagagtttaccagcttggatgcccacaagggagtagccttgtccagacgaagtgacgttgagatcctcggctactgcatgctgcggtggttgtgtgggaaacttccctgggaacagaacctgaaggaccctgtggctgtgcagactgctaaaacaaatctgttggacgagctcccccagtcagtgcttaaatgggctccttctggaagcagttgctgtgaaatagcccaatttttggtatgtgctcatagtttagcatatgatgaaaagccaaactatcaagccctcaagaaaattttgaaccctcatggaatacctttaggaccactggacttttccacaaaaggacagagtataaatgtccatactccaaacagtcaaaaagttgattcacaaaaggctgcaacaaagcaagtcaacaaggcacacaataggttaatcgaaaaaaaagtccacagtgagagaagcgctgagtcctgtgcaacatggaaagtgcagaaagaggagaaactgattggattgatgaacaatgaagcagctcaggaaagcacaaggagaagacagaaatatcaagagtctcaagaacctttgaatgaagtaaacagtttcccacaaaaaatcagctatacacaattcccaaactcattttatgagcctcatcaagattttaccagtccagatatattcaagaagtcaagatctccatcttggtataaatacacttccacagtcagcacggggatcacagacttagaaagttcaactggactttggcctacaatttcccagtttactcttagtgaagagacaaacgcagatgtttattattatcgcatcatcatacctgtccttttgatgttagtatttcttgctttattttttctctga

SEQ ID NO: 595 - DNA, 1080 bp, Homo sapiens
atggcggtgacggaagcgagcctgttgcgccagtgccccctgcttctgccccagaaccggtcgaaaaccgtgtatgagggattcatctcggctcaggtttatcttgcagattatggactttcctacagatattgtcccaatgggaaccacaaacagtatcaggaaaatcctagaaaaggccataatgggacaatagagtttaccagcttggatgcccacaagggagtagccttgtccagacgaagtgacgttgagatcctcggctactgcatgctgcggtggttgtgtgggaaacttccctgggaacagaacctgaaggaccctgtggctgtgcagactgctaaaacaaatctgttggacgagctcccccagtcagtgcttaaatgggctccttctggaagcagttgctgtgaaatagcccaatttttggtatgtgctcatagtttagcatatgatgaaaagccaaactatcaagccctcaagaaaattttgaaccctcatggaatacctttaggaccactggacttttccacaaaaggacagagtataaatgtccatactccaaacagtcaaaaagttgattcacaaaaggctgcaacaaagcaagtcaacaaggcacacaataggttaatcgaaaaaaaagtccacagtgagagaagcgctgagtcctgtgcaacatggaaagtgcagaaagaggagaaactgattggattgatgaacaatgaagcagctcaggaaagcacaaggagaagacagaaatatcaagagtctcaagaacctttgaatgaagtaaacagtttcccacaaaaaatcagctatacacaattcccaaactcattttatgagcctcatcaagattttaccagtccagatatattcaagaagtcaagatctccatcttggtataaatacacttccacagtcagcacggggatcacagacttagaaagttcaactggactttggcctacaatttcccagtttactcttagtgaagagacaaacgcagatgtttattattatcgcatcatcatacctgtccttttgatgttagtatttcttgctttattttttctctga

SEQ ID NO: 596 - DNA, 1641 bp, Homo sapiens
atggcggtgacggaagcgagcctgttgcgccagtgccccctgcttctgccccagaaccggtcgaaaaccgtgtatgagggattcatctcggctcagggaagagacttccaccttaggatagtgttgcctgaagatttacaactgaagaatgcaagattattatgtagttggcagctgagaacaatacttagtggataccatcgaatagtacaacagagaatgcagcactctcctgatctaatgagctttatgatggagttgaagatgcttttggaagttgccttaaagaatagacaagagctgtatgcactacctcctcctccccagttctactcaagccttattgaagagataggaactcttggttgggataaacttgtgtatgcggatacctgcttcagtaccatcaagttaaaagcagaagatgcttctggtagagagcatttaatcactctcaagttgaaggcaaagtatcctgcagaatcaccagattattttgtggattttcctgttccattttgtgcctcctggacacctcaggtaaattctcctcagagctccttaataagcatttatagtcagtttttggcagcaatagaatcactaaaggcattctgggatgttatggatgaaatcgatgagaagacctgggtacttgagccagaaaaacctccacggagtgcaacagcacgcagaattgcattaggtaataatgtttccataaatatagaggtagaccccaggcatcctactatgcttcctgagtgcttctttcttggagctgaccatgccttgtccagacgaagtgacgttgagatcctcggctactgcatgctgcggtggttgtgtgggaaacttccctgggaacagaacctgaaggaccctgtggctgtgcagactgctaaaacaaatctgttggacgagctcccccagtcagtgcttaaatgggctccttctggaagcagttgctgtgaaatagcccaatttttggtatgtgctcatagtttagcatatgatgaaaagccaaactatcaagccctcaagaaaattttgaaccctcatggaatacctttaggaccactggacttttccacaaaaggacagagtataaatgtccatactccaaacagtcaaaaagttgattcacaaaaggctgcaacaaagcaagtcaacaaggcacacaataggttaatcgaaaaaaaagtccacagtgagagaagcgctgagtcctgtgcaacatggaaagtgcagaaagaggagaaactgattggattgatgaacaatgaagcagctcaggaaagcacaaggagaagacagaaatatcaagagtctcaagaacctttgaatgaagtaaacagtttcccacaaaaaatcagctatacacaattcccaaactcattttatgagcctcatcaagattttaccagtccagatatattcaagaagtcaagatctccatcttggtataaatacacttccacagtcagcacggggatcacagacttagaaagttcaactggactttggcctacaatttcccagtttactcttagtgaagagacaaacgcagatgtttattattatcgcatcatcatacctgtccttttgatgttagtatttcttgctttattttttctctga

SEQ ID NO: 597 - DNA, 708 bp, Homo sapiens
atggcggtgacggaagcgagcctgttgcgccagtgccccctgcttctgccccagaaccggtcgaaaaccgtgtatgagggattcatctcggctcaggaagttgccttaaagaatagacaagagctgtatgcactacctcctcctccccagttctactcaagccttattgaagagataggaactcttggttgggataaacttgtgtatgcggatacctgcttcagtaccatcaagttaaaagcagaagatgcttctggtagagagcatttaatcactctcaagttgaaggcaaagtatcctgcagaatcaccagattattttgtggattttcctgttccattttgtgcctcctggacacctcaggaaagcacaaggagaagacagaaatatcaagagtctcaagaacctttgaatgaagtaaacagtttcccacaaaaaatcagctatacacaattcccaaactcattttatgagcctcatcaagattttaccagtccagatatattcaagaagtcaagatctccatcttggtataaatacacttccacagtcagcacggggatcacagacttagaaagttcaactggactttggcctacaatttcccagtttactcttagtgaagagacaaacgcagatgtttattattatcgcatcatcatacctgtccttttgatgttagtatttcttgctttattttttctctga

SEQ ID NO: 598 - DNA, 1113 bp, Homo sapiens
atggcggtgacggaagcgagcctgttgcgccagtgccccctgcttctgccccagaaccggtcgaaaaccgtgtatgagggattcatctcggctcaggaagttgccttaaagaatagacaagagctgtatgcactacctcctcctccccagttctactcaagccttattgaagagataggaactcttggttgggataaacttgtgtatgcggatacctgcttcagtaccatcaagttaaaagcagaagatgcttctggtagagagcatttaatcactctcaagttgaaggcaaagtatcctgcagaatcaccagattattttgtggattttcctgttccattttgtgcctcctggacacctcagagctccttaataagcatttatagtcagtttttggcagcaatagaatcactaaaggcattctgggatgttatggatgaaatcgatgagaagacctgggtacttgagccagaaaaacctccacggagtgcaacagcacgcagaattgcattaggtaataatgtttccataaatatagaggtagaccccaggcatcctactatgcttcctgagtgcttctttcttggagctgaccatgccttgtccagacgaagtgacgttgagatcctcggctactgcatgctgcggtggttgtgtgggaaacttccctgggaacagaacctgaaggaccctgtggctgtgcagactgctaaaacaaatctgttggacgagctcccccagtcagtgcttaaatgggctccttctggaagcagttgctgtgaaatagcccaatttttggtatgtgctcatagtttagcatatgatgaaaagccaaactatcaagccctcaagaaaattttgaaccctcatggaatacctttaggaccactggacttttccacaaaaggacagagtataaatgtccatactccaaacagtcaaaaagttgattcacaaaaggctgcaacaaagcaagtcaacaaggcacacaataggttaatcgaaaaaaaagtccacagtgagagaagcgctgagtcctgtgcaacatggaaagtgcagaaagaggagaaactgattggattgatgaacaatgaagcagctcagtttaggtag

SEQ ID NO: 599 - DNA, 1293 bp, Homo sapiens
atggcggtgacggaagcgagcctgttgcgccagtgccccctgcttctgccccagaaccggtcgaaaaccgtgtatgagggattcatctcggctcagggaagagacttccaccttaggatagtgttgcctgaagatttacaactgaagaatgcaagattattatgtagttggcagctgagaacaatacttagtggataccatcgaatagtacaacagagaatgcagcactctcctgatctaatgagctttatgatggagttgaagatgcttttggaagttgccttaaagaatagacaagagctgtatgcactacctcctcctccccagttctactcaagccttattgaagagataggaactcttggttgggataaacttgtgtatgcggatacctgcttcagtaccatcaagttaaaagcagaagatgcttctggtagagagcatttaatcactctcaagttgaaggcaaagtatcctgcagaatcaccagattattttgtggattttcctgttccattttgtgcctcctggacacctcagagctccttaataagcatttatagtcagtttttggcagcaatagaatcactaaaggcattctgggatgttatggatgaaatcgatgagaagacctgggtacttgagccagaaaaacctccacggagtgcaacagcacgcagaattgcattaggtaataatgtttccataaatatagaggtagaccccaggcatcctactatgcttcctgagtgcttctttcttggagctgaccatgccttgtccagacgaagtgacgttgagatcctcggctactgcatgctgcggtggttgtgtgggaaacttccctgggaacagaacctgaaggaccctgtggctgtgcagactgctaaaacaaatctgttggacgagctcccccagtcagtgcttaaatgggctccttctggaagcagttgctgtgaaatagcccaatttttggtatgtgctcatagtttagcatatgatgaaaagccaaactatcaagccctcaagaaaattttgaaccctcatggaatacctttaggaccactggacttttccacaaaaggacagagtataaatgtccatactccaaacagtcaaaaagttgattcacaaaaggctgcaacaaagcaagtcaacaaggcacacaataggttaatcgaaaaaaaagtccacagtgagagaagcgctgagtcctgtgcaacatggaaagtgcagaaagaggagaaactgattggattgatgaacaatgaagcagctcaggtagaagcttag

SEQ ID NO: 600 - DNA, 1221 bp, Homo sapiens
atggcggtgacggaagcgagcctgttgcgccagtgccccctgcttctgccccagaaccggtcgaaaaccgtgtatgagggattcatctcggctcagggaagagacttccaccttaggatagtgttgcctgaagatttacaactgaagaatgcaagattattatgtagttggcagctgagaacaatacttagtggataccatcgaatagtacaacagagaatgcagcactctcctgatctaatgagctttatgatggagttgaagatgcttttggaagttgccttaaagaatagacaagagctgtatgcactacctcctcctccccagttctactcaagccttattgaagagataggaactcttggttgggataattacagatttatggtaatggaaagactaggaatagatttacagaagatctcaggccagaatggtacctttaaaaagtcaactgtcctgcaattaggtatccgaatgttggatgtactggaatatatacatgaaaatgaatatgttcatggtgatataaaagcagcaaatctacttttgggttacaaaaatccagaccaggtttatcttgcagattatggactttcctacagatattgtcccaatgggaaccacaaacagtatcaggaaaatcctagaaaaggccataatgggacaatagagtttaccagcttggatgcccacaagggagtagccttgtccagacgaagtgacgttgagatcctcggctactgcatgctgcggtggttgtgtgggaaacttccctgggaacagaacctgaaggaccctgtggctgtgcagactgctaaaacaaatctgttggacgagctcccccagtcagtgcttaaatgggctccttctggaagcagttgctgtgaaatagcccaatttttggtatgtgctcatagtttagcatatgatgaaaagccaaactatcaagccctcaagaaaattttgaaccctcatggaatacctttaggaccactggacttttccacaaaaggacagagtataaatgtccatactccaaacagtcaaaaagttgattcacaaaaggctgcaacaaagcaagtcaacaaggcacacaataggttaatcgaaaaaaaagtccacagtgagagaagcgctgagtcctgtgcaacatggaaagtgcagaaagaggagaaactgattggattgatgaacaatgaagcagctcagtttaggtag

SEQ ID NO: 601 - DNA, 1347 bp, Homo sapiens
atggcggtgacggaagcgagcctgttgcgccagtgccccctgcttctgccccagaaccggtcgaaaaccgtgtatgagggattcatctcggctcaggaagttgccttaaagaatagacaagagctgtatgcactacctcctcctccccagttctactcaagccttattgaagagataggaactcttggttgggataaacttgtgtatgcggatacctgcttcagtaccatcaagttaaaagcagaagatgcttctggtagagagcatttaatcactctcaagttgaaggcaaagtatcctgcagaatcaccagattattttgtggattttcctgttccattttgtgcctcctggacacctcaggtttatcttgcagattatggactttcctacagatattgtcccaatgggaaccacaaacagtatcaggaaaatcctagaaaaggccataatgggacaatagagtttaccagcttggatgcccacaagggagtagccttgtccagacgaagtgacgttgagatcctcggctactgcatgctgcggtggttgtgtgggaaacttccctgggaacagaacctgaaggaccctgtggctgtgcagactgctaaaacaaatctgttggacgagctcccccagtcagtgcttaaatgggctccttctggaagcagttgctgtgaaatagcccaatttttggtatgtgctcatagtttagcatatgatgaaaagccaaactatcaagccctcaagaaaattttgaaccctcatggaatacctttaggaccactggacttttccacaaaaggacagagtataaatgtccatactccaaacagtcaaaaagttgattcacaaaaggctgcaacaaagcaagtcaacaaggcacacaataggttaatcgaaaaaaaagtccacagtgagagaagcgctgagtcctgtgcaacatggaaagtgcagaaagaggagaaactgattggattgatgaacaatgaagcagctcaggaaagcacaaggagaagacagaaatatcaagagtctcaagaacctttgaatgaagtaaacagtttcccacaaaaaatcagctatacacaattcccaaactcattttatgagcctcatcaagattttaccagtccagatatattcaagaagtcaagatctccatcttggtataaatacacttccacagtcagcacggggatcacagacttagaaagttcaactggactttggcctacaatttcccagtttactcttagtgaagagacaaacgcagatgtttattattatcgcatcatcatacctgtccttttgatgttagtatttcttgctttattttttctctga

SEQ ID NO: 602 - DNA, 885 bp, Homo sapiens
atggcggtgacggaagcgagcctgttgcgccagtgccccctgcttctgccccagaaccggtcgaaaaccgtgtatgagggattcatctcggctcagggaagagacttccaccttaggatagtgttgcctgaagatttacaactgaagaatgcaagattattatgtagttggcagctgagaacaatacttagtggataccatcgaatagtacaacagagaatgcagcactctcctgatctaatgagctttatgatggagttgaagatgcttttggaagttgccttaaagaatagacaagagctgtatgcactacctcctcctccccagttctactcaagccttattgaagagataggaactcttggttgggataaacttgtgtatgcggatacctgcttcagtaccatcaagttaaaagcagaagatgcttctggtagagagcatttaatcactctcaagttgaaggcaaagtatcctgcagaatcaccagattattttgtggattttcctgttccattttgtgcctcctggacacctcaggaaagcacaaggagaagacagaaatatcaagagtctcaagaacctttgaatgaagtaaacagtttcccacaaaaaatcagctatacacaattcccaaactcattttatgagcctcatcaagattttaccagtccagatatattcaagaagtcaagatctccatcttggtataaatacacttccacagtcagcacggggatcacagacttagaaagttcaactggactttggcctacaatttcccagtttactcttagtgaagagacaaacgcagatgtttattattatcgcatcatcatacctgtccttttgatgttagtatttcttgctttattttttctctga

SEQ ID NO: 603 - DNA, 1188 bp, Homo sapiens
atggcggtgacggaagcgagcctgttgcgccagtgccccctgcttctgccccagaaccggtcgaaaaccgtgtatgagggattcatctcggctcagggaagagacttccaccttaggatagtgttgcctgaagatttacaactgaagaatgcaagattattatgtagttggcagctgagaacaatacttagtggataccatcgaatagtacaacagagaatgcagcactctcctgatctaatgagctttatgatggagttgaagatgcttttggaagttgccttaaagaatagacaagagctgtatgcactacctcctcctccccagttctactcaagccttattgaagagataggaactcttggttgggataaacttgtgtatgcggatacctgcttcagtaccatcaagttaaaagcagaagatgcttctggtagagagcatttaatcactctcaagttgaaggcaaagtatcctgcagaatcaccagattattttgtggattttcctgttccattttgtgcctcctggacacctcaggtttatcttgcagattatggactttcctacagatattgtcccaatgggaaccacaaacagtatcaggaaaatcctagaaaaggccataatgggacaatagagtttaccagcttggatgcccacaagggagtagccttgtccagacgaagtgacgttgagatcctcggctactgcatgctgcggtggttgtgtgggaaacttccctgggaacagaacctgaaggaccctgtggctgtgcagactgctaaaacaaatctgttggacgagctcccccagtcagtgcttaaatgggctccttctggaagcagttgctgtgaaatagcccaatttttggtatgtgctcatagtttagcatatgatgaaaagccaaactatcaagccctcaagaaaattttgaaccctcatggaatacctttaggaccactggacttttccacaaaaggacagagtataaatgtccatactccaaacagtcaaaaagttgattcacaaaaggctgcaacaaagcaagtcaacaaggcacacaataggttaatcgaaaaaaaagtccacagtgagagaagcgctgagtcctgtgcaacatggaaagtgcagaaagaggagaaactgattggattgatgaacaatgaagcagctcagtttaggtag

SEQ ID NO: 604 - DNA, 1224 bp, Homo sapiens
atggcggtgacggaagcgagcctgttgcgccagtgccccctgcttctgccccagaaccggtcgaaaaccgtgtatgagggattcatctcggctcagggaagagacttccaccttaggatagtgttgcctgaagatttacaactgaagaatgcaagattattatgtagttggcagctgagaacaatacttagtggataccatcgaatagtacaacagagaatgcagcactctcctgatctaatgagctttatgatggagttgaagatgcttttggaagttgccttaaagaatagacaagagctgtatgcactacctcctcctccccagttctactcaagccttattgaagagataggaactcttggttgggataattacagatttatggtaatggaaagactaggaatagatttacagaagatctcaggccagaatggtacctttaaaaagtcaactgtcctgcaattaggtatccgaatgttggatgtactggaatatatacatgaaaatgaatatgttcatggtgatataaaagcagcaaatctacttttgggttacaaaaatccagaccaggtttatcttgcagattatggactttcctacagatattgtcccaatgggaaccacaaacagtatcaggaaaatcctagaaaaggccataatgggacaatagagtttaccagcttggatgcccacaagggagtagccttgtccagacgaagtgacgttgagatcctcggctactgcatgctgcggtggttgtgtgggaaacttccctgggaacagaacctgaaggaccctgtggctgtgcagactgctaaaacaaatctgttggacgagctcccccagtcagtgcttaaatgggctccttctggaagcagttgctgtgaaatagcccaatttttggtatgtgctcatagtttagcatatgatgaaaagccaaactatcaagccctcaagaaaattttgaaccctcatggaatacctttaggaccactggacttttccacaaaaggacagagtataaatgtccatactccaaacagtcaaaaagttgattcacaaaaggctgcaacaaagcaagtcaacaaggcacacaataggttaatcgaaaaaaaagtccacagtgagagaagcgctgagtcctgtgcaacatggaaagtgcagaaagaggagaaactgattggattgatgaacaatgaagcagctcaggtagaagcttag

SEQ ID NO: 605 - DNA, 534 bp, Homo sapiens
atggcggtgacggaagcgagcctgttgcgccagtgccccctgcttctgccccagaaccggtcgaaaaccgtgtatgagggattcatctcggctcaggaagttgccttaaagaatagacaagagctgtatgcactacctcctcctccccagttctactcaagccttattgaagagataggaactcttggttgggataaacttgtgtatgcggatacctgcttcagtaccatcaagttaaaagcagaagatgcttctggtagagagcatttaatcactctcaagttgaaggcaaagtatcctgcagaatcaccagattattttgtggattttcctgttccattttgtgcctcctggacacctcaggttgattcacaaaaggctgcaacaaagcaagtcaacaaggcacacaataggttaatcgaaaaaaaagtccacagtgagagaagcgctgagtcctgtgcaacatggaaagtgcagaaagaggagaaactgattggattgatgaacaatgaagcagctcaggtagaagcttag

SEQ ID NO: 606 - DNA, 531 bp, Homo sapiens
atggcggtgacggaagcgagcctgttgcgccagtgccccctgcttctgccccagaaccggtcgaaaaccgtgtatgagggattcatctcggctcaggaagttgccttaaagaatagacaagagctgtatgcactacctcctcctccccagttctactcaagccttattgaagagataggaactcttggttgggataaacttgtgtatgcggatacctgcttcagtaccatcaagttaaaagcagaagatgcttctggtagagagcatttaatcactctcaagttgaaggcaaagtatcctgcagaatcaccagattattttgtggattttcctgttccattttgtgcctcctggacacctcaggttgattcacaaaaggctgcaacaaagcaagtcaacaaggcacacaataggttaatcgaaaaaaaagtccacagtgagagaagcgctgagtcctgtgcaacatggaaagtgcagaaagaggagaaactgattggattgatgaacaatgaagcagctcagtttaggtag

SEQ ID NO: 607 - DNA, 744 bp, Homo sapiens
atggcggtgacggaagcgagcctgttgcgccagtgccccctgcttctgccccagaaccggtcgaaaaccgtgtatgagggattcatctcggctcaggtttatcttgcagattatggactttcctacagatattgtcccaatgggaaccacaaacagtatcaggaaaatcctagaaaaggccataatgggacaatagagtttaccagcttggatgcccacaagggagtagccttgtccagacgaagtgacgttgagatcctcggctactgcatgctgcggtggttgtgtgggaaacttccctgggaacagaacctgaaggaccctgtggctgtgcagactgctaaaacaaatctgttggacgagctcccccagtcagtgcttaaatgggctccttctggaagcagttgctgtgaaatagcccaatttttggtatgtgctcatagtttagcatatgatgaaaagccaaactatcaagccctcaagaaaattttgaaccctcatggaatacctttaggaccactggacttttccacaaaaggacagagtataaatgtccatactccaaacagtcaaaaagttgattcacaaaaggctgcaacaaagcaagtcaacaaggcacacaataggttaatcgaaaaaaaagtccacagtgagagaagcgctgagtcctgtgcaacatggaaagtgcagaaagaggagaaactgattggattgatgaacaatgaagcagctcagtttaggtag

SEQ ID NO: 608 - DNA, 1011 bp, Homo sapiens
atggcggtgacggaagcgagcctgttgcgccagtgccccctgcttctgccccagaaccggtcgaaaaccgtgtatgagggattcatctcggctcaggaagttgccttaaagaatagacaagagctgtatgcactacctcctcctccccagttctactcaagccttattgaagagataggaactcttggttgggataaacttgtgtatgcggatacctgcttcagtaccatcaagttaaaagcagaagatgcttctggtagagagcatttaatcactctcaagttgaaggcaaagtatcctgcagaatcaccagattattttgtggattttcctgttccattttgtgcctcctggacacctcaggtttatcttgcagattatggactttcctacagatattgtcccaatgggaaccacaaacagtatcaggaaaatcctagaaaaggccataatgggacaatagagtttaccagcttggatgcccacaagggagtagccttgtccagacgaagtgacgttgagatcctcggctactgcatgctgcggtggttgtgtgggaaacttccctgggaacagaacctgaaggaccctgtggctgtgcagactgctaaaacaaatctgttggacgagctcccccagtcagtgcttaaatgggctccttctggaagcagttgctgtgaaatagcccaatttttggtatgtgctcatagtttagcatatgatgaaaagccaaactatcaagccctcaagaaaattttgaaccctcatggaatacctttaggaccactggacttttccacaaaaggacagagtataaatgtccatactccaaacagtcaaaaagttgattcacaaaaggctgcaacaaagcaagtcaacaaggcacacaataggttaatcgaaaaaaaagtccacagtgagagaagcgctgagtcctgtgcaacatggaaagtgcagaaagaggagaaactgattggattgatgaacaatgaagcagctcagtttaggtag

SEQ ID NO: 609 - DNA, 1014 bp, Homo sapiens
atggcggtgacggaagcgagcctgttgcgccagtgccccctgcttctgccccagaaccggtcgaaaaccgtgtatgagggattcatctcggctcaggaagttgccttaaagaatagacaagagctgtatgcactacctcctcctccccagttctactcaagccttattgaagagataggaactcttggttgggataaacttgtgtatgcggatacctgcttcagtaccatcaagttaaaagcagaagatgcttctggtagagagcatttaatcactctcaagttgaaggcaaagtatcctgcagaatcaccagattattttgtggattttcctgttccattttgtgcctcctggacacctcaggtttatcttgcagattatggactttcctacagatattgtcccaatgggaaccacaaacagtatcaggaaaatcctagaaaaggccataatgggacaatagagtttaccagcttggatgcccacaagggagtagccttgtccagacgaagtgacgttgagatcctcggctactgcatgctgcggtggttgtgtgggaaacttccctgggaacagaacctgaaggaccctgtggctgtgcagactgctaaaacaaatctgttggacgagctcccccagtcagtgcttaaatgggctccttctggaagcagttgctgtgaaatagcccaatttttggtatgtgctcatagtttagcatatgatgaaaagccaaactatcaagccctcaagaaaattttgaaccctcatggaatacctttaggaccactggacttttccacaaaaggacagagtataaatgtccatactccaaacagtcaaaaagttgattcacaaaaggctgcaacaaagcaagtcaacaaggcacacaataggttaatcgaaaaaaaagtccacagtgagagaagcgctgagtcctgtgcaacatggaaagtgcagaaagaggagaaactgattggattgatgaacaatgaagcagctcaggtagaagcttag

SEQ ID NO: 610 - DNA, 1044 bp, Homo sapiens
atggcggtgacggaagcgagcctgttgcgccagtgccccctgcttctgccccagaaccggtcgaaaaccgtgtatgagggattcatctcggctcaggaagttgccttaaagaatagacaagagctgtatgcactacctcctcctccccagttctactcaagccttattgaagagataggaactcttggttgggataattacagatttatggtaatggaaagactaggaatagatttacagaagatctcaggccagaatggtacctttaaaaagtcaactgtcctgcaattaggtatccgaatgttggatgtactggaatatatacatgaaaatgaatatgttcatggtgatataaaagcagcaaatctacttttgggttacaaaaatccagaccaggtttatcttgcagattatggactttcctacagatattgtcccaatgggaaccacaaacagtatcaggaaaatcctagaaaaggccataatgggacaatagagtttaccagcttggatgcccacaagggagtagccttgtccagacgaagtgacgttgagatcctcggctactgcatgctgcggtggttgtgtgggaaacttccctgggaacagaacctgaaggaccctgtggctgtgcagactgctaaaacaaatctgttggacgagctcccccagtcagtgcttaaatgggctccttctggaagcagttgctgtgaaatagcccaatttttggtatgtgctcatagtttagcatatgatgaaaagccaaactatcaagccctcaagaaaattttgaaccctcatggaatacctttaggaccactggacttttccacaaaaggacagagtataaatgtccatactccaaacagtcaaaaagttgattcacaaaaggctgcaacaaagcaagtcaacaaggcacacaataggttaatcgaaaaaaaagtccacagtgagagaagcgctgagtcctgtgcaacatggaaagtgcagaaagaggagaaactgattggattgatgaacaatgaagcagctcagtttaggtag

SEQ ID NO: 611 - DNA, 1164 bp, Homo sapiens
atggcggtgacggaagcgagcctgttgcgccagtgccccctgcttctgccccagaaccggtcgaaaaccgtgtatgagggattcatctcggctcagggaagagacttccaccttaggatagtgttgcctgaagatttacaactgaagaatgcaagattattatgtagttggcagctgagaacaatacttagtggataccatcgaatagtacaacagagaatgcagcactctcctgatctaatgagctttatgatggagttgaagatgcttttggaagttgccttaaagaatagacaagagctgtatgcactacctcctcctccccagttctactcaagccttattgaagagataggaactcttggttgggataaacttgtgtatgcggatacctgcttcagtaccatcaagttaaaagcagaagatgcttctggtagagagcatttaatcactctcaagttgaaggcaaagtatcctgcagaatcaccagattattttgtggattttcctgttccattttgtgcctcctggacacctcagagctccttaataagcatttatagtcagtttttggcagcaatagaatcactaaaggcattctgggatgttatggatgaaatcgatgagaagacctgggtacttgagccagaaaaacctccacggagtgcaacagcacgcagaattgcattagtggtaaaacccctgggaattaagctgagcaggaacatacatttgtgggatccagaaaatagtgtgttacaaaatttgaaagatgttttagaaattgattttccagctcgtgctatcctggaaaaatctgaaagcacaaggagaagacagaaatatcaagagtctcaagaacctttgaatgaagtaaacagtttcccacaaaaaatcagctatacacaattcccaaactcattttatgagcctcatcaagattttaccagtccagatatattcaagaagtcaagatctccatcttggtataaatacacttccacagtcagcacggggatcacagacttagaaagttcaactggactttggcctacaatttcccagtttactcttagtgaagagacaaacgcagatgtttattattatcgcatcatcatacctgtccttttgatgttagtatttcttgctttattttttctctga

SEQ ID NO: 612 - DNA, 1263 bp, Homo sapiens
atggcggtgacggaagcgagcctgttgcgccagtgccccctgcttctgccccagaaccggtcgaaaaccgtgtatgagggattcatctcggctcagggaagagacttccaccttaggatagtgttgcctgaagatttacaactgaagaatgcaagattattatgtagttggcagctgagaacaatacttagtggataccatcgaatagtacaacagagaatgcagcactctcctgatctaatgagctttatgatggagttgaagatgcttttggaagttgccttaaagaatagacaagagctgtatgcactacctcctcctccccagttctactcaagccttattgaagagataggaactcttggttgggataaacttgtgtatgcggatacctgcttcagtaccatcaagttaaaagcagaagatgcttctggtagagagcatttaatcactctcaagttgaaggcaaagtatcctgcagaatcaccagattattttgtggattttcctgttccattttgtgcctcctggacacctcaggtaaattctcctcagagctccttaataagcatttatagtcagtttttggcagcaatagaatcactaaaggcattctgggatgttatggatgaaatcgatgagaagacctgggtacttgagccagaaaaacctccacggagtgcaacagcacgcagaattgcattaggtaataatgtttccataaatatagaggtagaccccaggcatcctactatgcttcctgagtgcttctttcttggagctgaccatgtggtaaaacccctgggaattaagctgagcaggaacatacatttgtgggatccagaaaatagtgtgttacaaaatttgaaagatgttttagaaattgattttccagctcgtgctatcctggaaaaatctgaaagcacaaggagaagacagaaatatcaagagtctcaagaacctttgaatgaagtaaacagtttcccacaaaaaatcagctatacacaattcccaaactcattttatgagcctcatcaagattttaccagtccagatatattcaagaagtcaagatctccatcttggtataaatacacttccacagtcagcacggggatcacagacttagaaagttcaactggactttggcctacaatttcccagtttactcttagtgaagagacaaacgcagatgtttattattatcgcatcatcatacctgtccttttgatgttagtatttcttgctttattttttctctga

SEQ ID NO: 613 - DNA, 1308 bp, Homo sapiens
atggcggtgacggaagcgagcctgttgcgccagtgccccctgcttctgccccagaaccggtcgaaaaccgtgtatgagggattcatctcggctcagggaagagacttccaccttaggatagtgttgcctgaagatttacaactgaagaatgcaagattattatgtagttggcagctgagaacaatacttagtggataccatcgaatagtacaacagagaatgcagcactctcctgatctaatgagctttatgatggagttgaagatgcttttggaagttgccttaaagaatagacaagagctgtatgcactacctcctcctccccagttctactcaagccttattgaagagataggaactcttggttgggataaacttgtgtatgcggatacctgcttcagtaccatcaagttaaaagcagaagatgcttctggtagagagcatttaatcactctcaagttgaaggcaaagtatcctgcagaatcaccagattattttgtggattttcctgttccattttgtgcctcctggacacctcaggtaaattctcctcagagctccttaataagcatttatagtcagtttttggcagcaatagaatcactaaaggcattctgggatgttatggatgaaatcgatgagaagacctgggtacttgagccagaaaaacctccacggagtgcaacagcacgcagaattgcattaggtaataatgtttccataaatatagaggtagaccccaggcatcctactatgcttcctgagtgcttctttcttggagctgaccatgccttgtccagacgaagtgacgttgagatcctcggctactgcatgctgcggtggttgtgtgggaaacttccctgggaacagaacctgaaggaccctgtggctgtgcagactgctaaaacaaatctgttggacgagctcccccagtcagtgcttaaatgggctccttctggaagcagttgctgtgaaatagcccaatttttggtatgtgctcatagtttagcatatgatgaaaagccaaactatcaagccctcaagaaaattttgaaccctcatggaatacctttaggaccactggacttttccacaaaaggacagagtataaatgtccatactccaaacagtcaaaaagttgattcacaaaaggctgcaacaaagcaagtcaacaaggcacacaataggttaatcgaaaaaaaagtccacagtgagagaagcgctgagtcctgtgcaacatggaaagtgcagaaagaggagaaactgattggattgatgaacaatgaagcagctcaggtagaagcttag

SEQ ID NO: 614 - DNA, 1290 bp, Homo sapiens
atggcggtgacggaagcgagcctgttgcgccagtgccccctgcttctgccccagaaccggtcgaaaaccgtgtatgagggattcatctcggctcagggaagagacttccaccttaggatagtgttgcctgaagatttacaactgaagaatgcaagattattatgtagttggcagctgagaacaatacttagtggataccatcgaatagtacaacagagaatgcagcactctcctgatctaatgagctttatgatggagttgaagatgcttttggaagttgccttaaagaatagacaagagctgtatgcactacctcctcctccccagttctactcaagccttattgaagagataggaactcttggttgggataaacttgtgtatgcggatacctgcttcagtaccatcaagttaaaagcagaagatgcttctggtagagagcatttaatcactctcaagttgaaggcaaagtatcctgcagaatcaccagattattttgtggattttcctgttccattttgtgcctcctggacacctcagagctccttaataagcatttatagtcagtttttggcagcaatagaatcactaaaggcattctgggatgttatggatgaaatcgatgagaagacctgggtacttgagccagaaaaacctccacggagtgcaacagcacgcagaattgcattaggtaataatgtttccataaatatagaggtagaccccaggcatcctactatgcttcctgagtgcttctttcttggagctgaccatgccttgtccagacgaagtgacgttgagatcctcggctactgcatgctgcggtggttgtgtgggaaacttccctgggaacagaacctgaaggaccctgtggctgtgcagactgctaaaacaaatctgttggacgagctcccccagtcagtgcttaaatgggctccttctggaagcagttgctgtgaaatagcccaatttttggtatgtgctcatagtttagcatatgatgaaaagccaaactatcaagccctcaagaaaattttgaaccctcatggaatacctttaggaccactggacttttccacaaaaggacagagtataaatgtccatactccaaacagtcaaaaagttgattcacaaaaggctgcaacaaagcaagtcaacaaggcacacaataggttaatcgaaaaaaaagtccacagtgagagaagcgctgagtcctgtgcaacatggaaagtgcagaaagaggagaaactgattggattgatgaacaatgaagcagctcagtttaggtag

SEQ ID NO: 615 - DNA, 441 bp, Homo sapiens
atggcggtgacggaagcgagcctgttgcgccagtgccccctgcttctgccccagaaccggtcgaaaaccgtgtatgagggattcatctcggctcaggaaagcacaaggagaagacagaaatatcaagagtctcaagaacctttgaatgaagtaaacagtttcccacaaaaaatcagctatacacaattcccaaactcattttatgagcctcatcaagattttaccagtccagatatattcaagaagtcaagatctccatcttggtataaatacacttccacagtcagcacggggatcacagacttagaaagttcaactggactttggcctacaatttcccagtttactcttagtgaagagacaaacgcagatgtttattattatcgcatcatcatacctgtccttttgatgttagtatttcttgctttattttttctctga

SEQ ID NO: 616 - DNA, 1380 bp, Homo sapiens
atggcggtgacggaagcgagcctgttgcgccagtgccccctgcttctgccccagaaccggtcgaaaaccgtgtatgagggattcatctcggctcaggaagttgccttaaagaatagacaagagctgtatgcactacctcctcctccccagttctactcaagccttattgaagagataggaactcttggttgggataattacagatttatggtaatggaaagactaggaatagatttacagaagatctcaggccagaatggtacctttaaaaagtcaactgtcctgcaattaggtatccgaatgttggatgtactggaatatatacatgaaaatgaatatgttcatggtgatataaaagcagcaaatctacttttgggttacaaaaatccagaccaggtttatcttgcagattatggactttcctacagatattgtcccaatgggaaccacaaacagtatcaggaaaatcctagaaaaggccataatgggacaatagagtttaccagcttggatgcccacaagggagtagccttgtccagacgaagtgacgttgagatcctcggctactgcatgctgcggtggttgtgtgggaaacttccctgggaacagaacctgaaggaccctgtggctgtgcagactgctaaaacaaatctgttggacgagctcccccagtcagtgcttaaatgggctccttctggaagcagttgctgtgaaatagcccaatttttggtatgtgctcatagtttagcatatgatgaaaagccaaactatcaagccctcaagaaaattttgaaccctcatggaatacctttaggaccactggacttttccacaaaaggacagagtataaatgtccatactccaaacagtcaaaaagttgattcacaaaaggctgcaacaaagcaagtcaacaaggcacacaataggttaatcgaaaaaaaagtccacagtgagagaagcgctgagtcctgtgcaacatggaaagtgcagaaagaggagaaactgattggattgatgaacaatgaagcagctcaggaaagcacaaggagaagacagaaatatcaagagtctcaagaacctttgaatgaagtaaacagtttcccacaaaaaatcagctatacacaattcccaaactcattttatgagcctcatcaagattttaccagtccagatatattcaagaagtcaagatctccatcttggtataaatacacttccacagtcagcacggggatcacagacttagaaagttcaactggactttggcctacaatttcccagtttactcttagtgaagagacaaacgcagatgtttattattatcgcatcatcatacctgtccttttgatgttagtatttcttgctttattttttctctga

SEQ ID NO: 617 - DNA, 900 bp, Homo sapiens
atggcggtgacggaagcgagcctgttgcgccagtgccccctgcttctgccccagaaccggtcgaaaaccgtgtatgagggattcatctcggctcagggaagagacttccaccttaggatagtgttgcctgaagatttacaactgaagaatgcaagattattatgtagttggcagctgagaacaatacttagtggataccatcgaatagtacaacagagaatgcagcactctcctgatctaatgagctttatgatggagttgaagatgcttttggaagttgccttaaagaatagacaagagctgtatgcactacctcctcctccccagttctactcaagccttattgaagagataggaactcttggttgggataaacttgtgtatgcggatacctgcttcagtaccatcaagttaaaagcagaagatgcttctggtagagagcatttaatcactctcaagttgaaggcaaagtatcctgcagaatcaccagattattttgtggattttcctgttccattttgtgcctcctggacacctcaggtaaattctcctcaggaaagcacaaggagaagacagaaatatcaagagtctcaagaacctttgaatgaagtaaacagtttcccacaaaaaatcagctatacacaattcccaaactcattttatgagcctcatcaagattttaccagtccagatatattcaagaagtcaagatctccatcttggtataaatacacttccacagtcagcacggggatcacagacttagaaagttcaactggactttggcctacaatttcccagtttactcttagtgaagagacaaacgcagatgtttattattatcgcatcatcatacctgtccttttgatgttagtatttcttgctttattttttctctga

SEQ ID NO: 618 - DNA, 867 bp, Homo sapiens
atggcggtgacggaagcgagcctgttgcgccagtgccccctgcttctgccccagaaccggtcgaaaaccgtgtatgagggattcatctcggctcaggaagttgccttaaagaatagacaagagctgtatgcactacctcctcctccccagttctactcaagccttattgaagagataggaactcttggttgggataaacttgtgtatgcggatacctgcttcagtaccatcaagttaaaagcagaagatgcttctggtagagagcatttaatcactctcaagttgaaggcaaagtatcctgcagaatcaccagattattttgtggattttcctgttccattttgtgcctcctggacacctcaggttgattcacaaaaggctgcaacaaagcaagtcaacaaggcacacaataggttaatcgaaaaaaaagtccacagtgagagaagcgctgagtcctgtgcaacatggaaagtgcagaaagaggagaaactgattggattgatgaacaatgaagcagctcaggaaagcacaaggagaagacagaaatatcaagagtctcaagaacctttgaatgaagtaaacagtttcccacaaaaaatcagctatacacaattcccaaactcattttatgagcctcatcaagattttaccagtccagatatattcaagaagtcaagatctccatcttggtataaatacacttccacagtcagcacggggatcacagacttagaaagttcaactggactttggcctacaatttcccagtttactcttagtgaagagacaaacgcagatgtttattattatcgcatcatcatacctgtccttttgatgttagtatttcttgctttattttttctctga

SEQ ID NO: 619 - DNA, 1071 bp, Homo sapiens
atggcggtgacggaagcgagcctgttgcgccagtgccccctgcttctgccccagaaccggtcgaaaaccgtgtatgagggattcatctcggctcaggaagttgccttaaagaatagacaagagctgtatgcactacctcctcctccccagttctactcaagccttattgaagagataggaactcttggttgggataaacttgtgtatgcggatacctgcttcagtaccatcaagttaaaagcagaagatgcttctggtagagagcatttaatcactctcaagttgaaggcaaagtatcctgcagaatcaccagattattttgtggattttcctgttccattttgtgcctcctggacacctcagagctccttaataagcatttatagtcagtttttggcagcaatagaatcactaaaggcattctgggatgttatggatgaaatcgatgagaagacctgggtacttgagccagaaaaacctccacggagtgcaacagcacgcagaattgcattaggtaataatgtttccataaatatagaggtagaccccaggcatcctactatgcttcctgagtgcttctttcttggagctgaccatgtggtaaaacccctgggaattaagctgagcaggaacatacatttgtgggatccagaaaatagtgtgttacaaaatttgaaagatgttttagaaattgattttccagctcgtgctatcctggaaaaatctgaaagcacaaggagaagacagaaatatcaagagtctcaagaacctttgaatgaagtaaacagtttcccacaaaaaatcagctatacacaattcccaaactcattttatgagcctcatcaagattttaccagtccagatatattcaagaagtcaagatctccatcttggtataaatacacttccacagtcagcacggggatcacagacttagaaagttcaactggactttggcctacaatttcccagtttactcttagtgaagagacaaacgcagatgtttattattatcgcatcatcatacctgtccttttgatgttagtatttcttgctttattttttctctga

SEQ ID NO: 620 - DNA, 747 bp, Homo sapiens
atggcggtgacggaagcgagcctgttgcgccagtgccccctgcttctgccccagaaccggtcgaaaaccgtgtatgagggattcatctcggctcaggtttatcttgcagattatggactttcctacagatattgtcccaatgggaaccacaaacagtatcaggaaaatcctagaaaaggccataatgggacaatagagtttaccagcttggatgcccacaagggagtagccttgtccagacgaagtgacgttgagatcctcggctactgcatgctgcggtggttgtgtgggaaacttccctgggaacagaacctgaaggaccctgtggctgtgcagactgctaaaacaaatctgttggacgagctcccccagtcagtgcttaaatgggctccttctggaagcagttgctgtgaaatagcccaatttttggtatgtgctcatagtttagcatatgatgaaaagccaaactatcaagccctcaagaaaattttgaaccctcatggaatacctttaggaccactggacttttccacaaaaggacagagtataaatgtccatactccaaacagtcaaaaagttgattcacaaaaggctgcaacaaagcaagtcaacaaggcacacaataggttaatcgaaaaaaaagtccacagtgagagaagcgctgagtcctgtgcaacatggaaagtgcagaaagaggagaaactgattggattgatgaacaatgaagcagctcaggtagaagcttag

SEQ ID NO: 621 - DNA, 564 bp, Homo sapiens
atggcggtgacggaagcgagcctgttgcgccagtgccccctgcttctgccccagaaccggtcgaaaaccgtgtatgagggattcatctcggctcagggaagagacttccaccttaggatagtgttgcctgaagatttacaactgaagaatgcaagattattatgtagttggcagctgagaacaatacttagtggataccatcgaatagtacaacagagaatgcagcactctcctgatctaatgagctttatgatggagttgaagatgcttttggaagttgccttaaagaatagacaagagctgtatgcactacctcctcctccccagttctactcaagccttattgaagagataggaactcttggttgggataaacttgtgtatgcggatacctgcttcagtaccatcaagttaaaagcagaagatgcttctggtagagagcatttaatcactctcaagttgaaggcaaagtatcctgcagaatcaccagattattttgtggattttcctgttccattttgtgcctcctggacacctcaggtaaattctcctcagtttaggtag

SEQ ID NO: 622 - DNA, 1305 bp, Homo sapiens
atggcggtgacggaagcgagcctgttgcgccagtgccccctgcttctgccccagaaccggtcgaaaaccgtgtatgagggattcatctcggctcagggaagagacttccaccttaggatagtgttgcctgaagatttacaactgaagaatgcaagattattatgtagttggcagctgagaacaatacttagtggataccatcgaatagtacaacagagaatgcagcactctcctgatctaatgagctttatgatggagttgaagatgcttttggaagttgccttaaagaatagacaagagctgtatgcactacctcctcctccccagttctactcaagccttattgaagagataggaactcttggttgggataaacttgtgtatgcggatacctgcttcagtaccatcaagttaaaagcagaagatgcttctggtagagagcatttaatcactctcaagttgaaggcaaagtatcctgcagaatcaccagattattttgtggattttcctgttccattttgtgcctcctggacacctcaggtaaattctcctcagagctccttaataagcatttatagtcagtttttggcagcaatagaatcactaaaggcattctgggatgttatggatgaaatcgatgagaagacctgggtacttgagccagaaaaacctccacggagtgcaacagcacgcagaattgcattaggtaataatgtttccataaatatagaggtagaccccaggcatcctactatgcttcctgagtgcttctttcttggagctgaccatgccttgtccagacgaagtgacgttgagatcctcggctactgcatgctgcggtggttgtgtgggaaacttccctgggaacagaacctgaaggaccctgtggctgtgcagactgctaaaacaaatctgttggacgagctcccccagtcagtgcttaaatgggctccttctggaagcagttgctgtgaaatagcccaatttttggtatgtgctcatagtttagcatatgatgaaaagccaaactatcaagccctcaagaaaattttgaaccctcatggaatacctttaggaccactggacttttccacaaaaggacagagtataaatgtccatactccaaacagtcaaaaagttgattcacaaaaggctgcaacaaagcaagtcaacaaggcacacaataggttaatcgaaaaaaaagtccacagtgagagaagcgctgagtcctgtgcaacatggaaagtgcagaaagaggagaaactgattggattgatgaacaatgaagcagctcagtttaggtag

SEQ ID NO: 623 - DNA, 1557 bp, Homo sapiens
atggcggtgacggaagcgagcctgttgcgccagtgccccctgcttctgccccagaaccggtcgaaaaccgtgtatgagggattcatctcggctcagggaagagacttccaccttaggatagtgttgcctgaagatttacaactgaagaatgcaagattattatgtagttggcagctgagaacaatacttagtggataccatcgaatagtacaacagagaatgcagcactctcctgatctaatgagctttatgatggagttgaagatgcttttggaagttgccttaaagaatagacaagagctgtatgcactacctcctcctccccagttctactcaagccttattgaagagataggaactcttggttgggataattacagatttatggtaatggaaagactaggaatagatttacagaagatctcaggccagaatggtacctttaaaaagtcaactgtcctgcaattaggtatccgaatgttggatgtactggaatatatacatgaaaatgaatatgttcatggtgatataaaagcagcaaatctacttttgggttacaaaaatccagaccaggtttatcttgcagattatggactttcctacagatattgtcccaatgggaaccacaaacagtatcaggaaaatcctagaaaaggccataatgggacaatagagtttaccagcttggatgcccacaagggagtagccttgtccagacgaagtgacgttgagatcctcggctactgcatgctgcggtggttgtgtgggaaacttccctgggaacagaacctgaaggaccctgtggctgtgcagactgctaaaacaaatctgttggacgagctcccccagtcagtgcttaaatgggctccttctggaagcagttgctgtgaaatagcccaatttttggtatgtgctcatagtttagcatatgatgaaaagccaaactatcaagccctcaagaaaattttgaaccctcatggaatacctttaggaccactggacttttccacaaaaggacagagtataaatgtccatactccaaacagtcaaaaagttgattcacaaaaggctgcaacaaagcaagtcaacaaggcacacaataggttaatcgaaaaaaaagtccacagtgagagaagcgctgagtcctgtgcaacatggaaagtgcagaaagaggagaaactgattggattgatgaacaatgaagcagctcaggaaagcacaaggagaagacagaaatatcaagagtctcaagaacctttgaatgaagtaaacagtttcccacaaaaaatcagctatacacaattcccaaactcattttatgagcctcatcaagattttaccagtccagatatattcaagaagtcaagatctccatcttggtataaatacacttccacagtcagcacggggatcacagacttagaaagttcaactggactttggcctacaatttcccagtttactcttagtgaagagacaaacgcagatgtttattattatcgcatcatcatacctgtccttttgatgttagtatttcttgctttattttttctctga

SEQ ID NO: 624 - DNA, 417 bp, Homo sapiens
atggcggtgacggaagcgagcctgttgcgccagtgccccctgcttctgccccagaaccggtcgaaaaccgtgtatgagggattcatctcggctcaggtttatcttgcagattatggactttcctacagatattgtcccaatgggaaccacaaacagtatcaggaaaatcctagaaaaggccataatgggacaatagagtttaccagcttggatgcccacaagggagtagccttgtccagacgaagtgacgttgagatcctcggctactgcatgctgcggtggttgtgtgggaaacttccctgggaacagaacctgaaggaccctgtggctgtgcagactgctaaaacaaagtacaaattttcaagtatttcatcatgtactgcaccaggtctgaagggatacattaaagggagctaa

SEQ ID NO: 625 - DNA, 684 bp, Homo sapiens
atggcggtgacggaagcgagcctgttgcgccagtgccccctgcttctgccccagaaccggtcgaaaaccgtgtatgagggattcatctcggctcaggaagttgccttaaagaatagacaagagctgtatgcactacctcctcctccccagttctactcaagccttattgaagagataggaactcttggttgggataaacttgtgtatgcggatacctgcttcagtaccatcaagttaaaagcagaagatgcttctggtagagagcatttaatcactctcaagttgaaggcaaagtatcctgcagaatcaccagattattttgtggattttcctgttccattttgtgcctcctggacacctcaggtttatcttgcagattatggactttcctacagatattgtcccaatgggaaccacaaacagtatcaggaaaatcctagaaaaggccataatgggacaatagagtttaccagcttggatgcccacaagggagtagccttgtccagacgaagtgacgttgagatcctcggctactgcatgctgcggtggttgtgtgggaaacttccctgggaacagaacctgaaggaccctgtggctgtgcagactgctaaaacaaagtacaaattttcaagtatttcatcatgtactgcaccaggtctgaagggatacattaaagggagctaa

SEQ ID NO: 626 - DNA, 1626 bp, Homo sapiens
atggcggtgacggaagcgagcctgttgcgccagtgccccctgcttctgccccagaaccggtcgaaaaccgtgtatgagggattcatctcggctcagggaagagacttccaccttaggatagtgttgcctgaagatttacaactgaagaatgcaagattattatgtagttggcagctgagaacaatacttagtggataccatcgaatagtacaacagagaatgcagcactctcctgatctaatgagctttatgatggagttgaagatgcttttggaagttgccttaaagaatagacaagagctgtatgcactacctcctcctccccagttctactcaagccttattgaagagataggaactcttggttgggataaacttgtgtatgcggatacctgcttcagtaccatcaagttaaaagcagaagatgcttctggtagagagcatttaatcactctcaagttgaaggcaaagtatcctgcagaatcaccagattattttgtggattttcctgttccattttgtgcctcctggacacctcagagctccttaataagcatttatagtcagtttttggcagcaatagaatcactaaaggcattctgggatgttatggatgaaatcgatgagaagacctgggtacttgagccagaaaaacctccacggagtgcaacagcacgcagaattgcattaggtaataatgtttccataaatatagaggtagaccccaggcatcctactatgcttcctgagtgcttctttcttggagctgaccatgccttgtccagacgaagtgacgttgagatcctcggctactgcatgctgcggtggttgtgtgggaaacttccctgggaacagaacctgaaggaccctgtggctgtgcagactgctaaaacaaatctgttggacgagctcccccagtcagtgcttaaatgggctccttctggaagcagttgctgtgaaatagcccaatttttggtatgtgctcatagtttagcatatgatgaaaagccaaactatcaagccctcaagaaaattttgaaccctcatggaatacctttaggaccactggacttttccacaaaaggacagagtataaatgtccatactccaaacagtcaaaaagttgattcacaaaaggctgcaacaaagcaagtcaacaaggcacacaataggttaatcgaaaaaaaagtccacagtgagagaagcgctgagtcctgtgcaacatggaaagtgcagaaagaggagaaactgattggattgatgaacaatgaagcagctcaggaaagcacaaggagaagacagaaatatcaagagtctcaagaacctttgaatgaagtaaacagtttcccacaaaaaatcagctatacacaattcccaaactcattttatgagcctcatcaagattttaccagtccagatatattcaagaagtcaagatctccatcttggtataaatacacttccacagtcagcacggggatcacagacttagaaagttcaactggactttggcctacaatttcccagtttactcttagtgaagagacaaacgcagatgtttattattatcgcatcatcatacctgtccttttgatgttagtatttcttgctttattttttctctga

SEQ ID NO: 627 - DNA, 1449 bp, Homo sapiens
atggcggtgacggaagcgagcctgttgcgccagtgccccctgcttctgccccagaaccggtcgaaaaccgtgtatgagggattcatctcggctcaggaagttgccttaaagaatagacaagagctgtatgcactacctcctcctccccagttctactcaagccttattgaagagataggaactcttggttgggataaacttgtgtatgcggatacctgcttcagtaccatcaagttaaaagcagaagatgcttctggtagagagcatttaatcactctcaagttgaaggcaaagtatcctgcagaatcaccagattattttgtggattttcctgttccattttgtgcctcctggacacctcagagctccttaataagcatttatagtcagtttttggcagcaatagaatcactaaaggcattctgggatgttatggatgaaatcgatgagaagacctgggtacttgagccagaaaaacctccacggagtgcaacagcacgcagaattgcattaggtaataatgtttccataaatatagaggtagaccccaggcatcctactatgcttcctgagtgcttctttcttggagctgaccatgccttgtccagacgaagtgacgttgagatcctcggctactgcatgctgcggtggttgtgtgggaaacttccctgggaacagaacctgaaggaccctgtggctgtgcagactgctaaaacaaatctgttggacgagctcccccagtcagtgcttaaatgggctccttctggaagcagttgctgtgaaatagcccaatttttggtatgtgctcatagtttagcatatgatgaaaagccaaactatcaagccctcaagaaaattttgaaccctcatggaatacctttaggaccactggacttttccacaaaaggacagagtataaatgtccatactccaaacagtcaaaaagttgattcacaaaaggctgcaacaaagcaagtcaacaaggcacacaataggttaatcgaaaaaaaagtccacagtgagagaagcgctgagtcctgtgcaacatggaaagtgcagaaagaggagaaactgattggattgatgaacaatgaagcagctcaggaaagcacaaggagaagacagaaatatcaagagtctcaagaacctttgaatgaagtaaacagtttcccacaaaaaatcagctatacacaattcccaaactcattttatgagcctcatcaagattttaccagtccagatatattcaagaagtcaagatctccatcttggtataaatacacttccacagtcagcacggggatcacagacttagaaagttcaactggactttggcctacaatttcccagtttactcttagtgaagagacaaacgcagatgtttattattatcgcatcatcatacctgtccttttgatgttagtatttcttgctttattttttctctga

SEQ ID NO: 628 - DNA, 1191 bp, Homo sapiens
atggcggtgacggaagcgagcctgttgcgccagtgccccctgcttctgccccagaaccggtcgaaaaccgtgtatgagggattcatctcggctcagggaagagacttccaccttaggatagtgttgcctgaagatttacaactgaagaatgcaagattattatgtagttggcagctgagaacaatacttagtggataccatcgaatagtacaacagagaatgcagcactctcctgatctaatgagctttatgatggagttgaagatgcttttggaagttgccttaaagaatagacaagagctgtatgcactacctcctcctccccagttctactcaagccttattgaagagataggaactcttggttgggataaacttgtgtatgcggatacctgcttcagtaccatcaagttaaaagcagaagatgcttctggtagagagcatttaatcactctcaagttgaaggcaaagtatcctgcagaatcaccagattattttgtggattttcctgttccattttgtgcctcctggacacctcaggtttatcttgcagattatggactttcctacagatattgtcccaatgggaaccacaaacagtatcaggaaaatcctagaaaaggccataatgggacaatagagtttaccagcttggatgcccacaagggagtagccttgtccagacgaagtgacgttgagatcctcggctactgcatgctgcggtggttgtgtgggaaacttccctgggaacagaacctgaaggaccctgtggctgtgcagactgctaaaacaaatctgttggacgagctcccccagtcagtgcttaaatgggctccttctggaagcagttgctgtgaaatagcccaatttttggtatgtgctcatagtttagcatatgatgaaaagccaaactatcaagccctcaagaaaattttgaaccctcatggaatacctttaggaccactggacttttccacaaaaggacagagtataaatgtccatactccaaacagtcaaaaagttgattcacaaaaggctgcaacaaagcaagtcaacaaggcacacaataggttaatcgaaaaaaaagtccacagtgagagaagcgctgagtcctgtgcaacatggaaagtgcagaaagaggagaaactgattggattgatgaacaatgaagcagctcaggtagaagcttag

SEQ ID NO: 629 - DNA, 861 bp, Homo sapiens
atggcggtgacggaagcgagcctgttgcgccagtgccccctgcttctgccccagaaccggtcgaaaaccgtgtatgagggattcatctcggctcagggaagagacttccaccttaggatagtgttgcctgaagatttacaactgaagaatgcaagattattatgtagttggcagctgagaacaatacttagtggataccatcgaatagtacaacagagaatgcagcactctcctgatctaatgagctttatgatggagttgaagatgcttttggaagttgccttaaagaatagacaagagctgtatgcactacctcctcctccccagttctactcaagccttattgaagagataggaactcttggttgggataaacttgtgtatgcggatacctgcttcagtaccatcaagttaaaagcagaagatgcttctggtagagagcatttaatcactctcaagttgaaggcaaagtatcctgcagaatcaccagattattttgtggattttcctgttccattttgtgcctcctggacacctcaggtttatcttgcagattatggactttcctacagatattgtcccaatgggaaccacaaacagtatcaggaaaatcctagaaaaggccataatgggacaatagagtttaccagcttggatgcccacaagggagtagccttgtccagacgaagtgacgttgagatcctcggctactgcatgctgcggtggttgtgtgggaaacttccctgggaacagaacctgaaggaccctgtggctgtgcagactgctaaaacaaagtacaaattttcaagtatttcatcatgtactgcaccaggtctgaagggatacattaaagggagctaa

SEQ ID NO: 630 - DNA, 711 bp, Homo sapiens
atggcggtgacggaagcgagcctgttgcgccagtgccccctgcttctgccccagaaccggtcgaaaaccgtgtatgagggattcatctcggctcagggaagagacttccaccttaggatagtgttgcctgaagatttacaactgaagaatgcaagattattatgtagttggcagctgagaacaatacttagtggataccatcgaatagtacaacagagaatgcagcactctcctgatctaatgagctttatgatggagttgaagatgcttttggaagttgccttaaagaatagacaagagctgtatgcactacctcctcctccccagttctactcaagccttattgaagagataggaactcttggttgggataaacttgtgtatgcggatacctgcttcagtaccatcaagttaaaagcagaagatgcttctggtagagagcatttaatcactctcaagttgaaggcaaagtatcctgcagaatcaccagattattttgtggattttcctgttccattttgtgcctcctggacacctcaggttgattcacaaaaggctgcaacaaagcaagtcaacaaggcacacaataggttaatcgaaaaaaaagtccacagtgagagaagcgctgagtcctgtgcaacatggaaagtgcagaaagaggagaaactgattggattgatgaacaatgaagcagctcaggtagaagcttag

SEQ ID NO: 631 - DNA, 372 bp, Homo sapiens
atggcggtgacggaagcgagcctgttgcgccagtgccccctgcttctgccccagaaccggtcgaaaaccgtgtatgagggattcatctcggctcaggaagttgccttaaagaatagacaagagctgtatgcactacctcctcctccccagttctactcaagccttattgaagagataggaactcttggttgggataaacttgtgtatgcggatacctgcttcagtaccatcaagttaaaagcagaagatgcttctggtagagagcatttaatcactctcaagttgaaggcaaagtatcctgcagaatcaccagattattttgtggattttcctgttccattttgtgcctcctggacacctcagtttaggtag

SEQ ID NO: 632 - DNA, 1116 bp, Homo sapiens
atggcggtgacggaagcgagcctgttgcgccagtgccccctgcttctgccccagaaccggtcgaaaaccgtgtatgagggattcatctcggctcaggaagttgccttaaagaatagacaagagctgtatgcactacctcctcctccccagttctactcaagccttattgaagagataggaactcttggttgggataaacttgtgtatgcggatacctgcttcagtaccatcaagttaaaagcagaagatgcttctggtagagagcatttaatcactctcaagttgaaggcaaagtatcctgcagaatcaccagattattttgtggattttcctgttccattttgtgcctcctggacacctcagagctccttaataagcatttatagtcagtttttggcagcaatagaatcactaaaggcattctgggatgttatggatgaaatcgatgagaagacctgggtacttgagccagaaaaacctccacggagtgcaacagcacgcagaattgcattaggtaataatgtttccataaatatagaggtagaccccaggcatcctactatgcttcctgagtgcttctttcttggagctgaccatgccttgtccagacgaagtgacgttgagatcctcggctactgcatgctgcggtggttgtgtgggaaacttccctgggaacagaacctgaaggaccctgtggctgtgcagactgctaaaacaaatctgttggacgagctcccccagtcagtgcttaaatgggctccttctggaagcagttgctgtgaaatagcccaatttttggtatgtgctcatagtttagcatatgatgaaaagccaaactatcaagccctcaagaaaattttgaaccctcatggaatacctttaggaccactggacttttccacaaaaggacagagtataaatgtccatactccaaacagtcaaaaagttgattcacaaaaggctgcaacaaagcaagtcaacaaggcacacaataggttaatcgaaaaaaaagtccacagtgagagaagcgctgagtcctgtgcaacatggaaagtgcagaaagaggagaaactgattggattgatgaacaatgaagcagctcaggtagaagcttag

SEQ ID NO: 633 - DNA, 1439 bp, Homo sapiens
atggggattgataggcagcatattcctgatacatatctatgtgaacgttgtcagcctaggaatttggataaagagagggcagtgctactacaacgccggaaaagggaaaatatgtcagatggtgataccagtgcaactgagagtggtgatgaggttcctgtggaattatatactgcatttcagcatactccaacatcaattactttaactgcttcaagagtttccaaagttaatgataaaagaaggaaaaaaagcggggagaaagaacaacacatttcaaaatgtaaaaaggcatttcgtgaaggatctaggaagtcatcaagagttaagggttcagctccagagattgatccttcatctgatggttcaaattttggatgggagacaaagatcaaagcatggatggatcgatatgaagaagcaaataacaaccagtacagtgagggtgttcagagggaggcacaaagaatagctctgagattaggcaatggaaatgacaaaaaagagatgaataaatccgatttgaataccaacaatttgctcttcaaacctcctgtagagagccatatacaaaagaataagaaaattcttaaatctgcaaaagatttgcctcctgatgcacttatcattgaatacagagggaagtttatgctgagagaacagtttgaagcaaatgggtatttctttaaaagaccatacccttttgtgttattctactctaaatttcatgggctagaaatgtgtgttgatgcaaggacttttgggaatgaggctcgattcatcaggcggtcttgtacacccaatgcagaggtgaggcatgaaattcaagatggaaccatacatctttatatttattctatacacagtattccaaagggaactgaaattactattgcctttgattttgactatggaaattgtaagtacaaggtggactgtgcatgcctcaaagaaaacccagagtgccctgttctaaaacgtagttctgaatccatggaaaatatcaatagtggttatgagaccagacggaaaaaaggaaaaaaagacaaagatatttcaaaagaaaaagatacacaaaatcagaatattactttggattgtgaaggaacgaccaacaaaatgaagagcccagaaactaaacaaagaaagctttctccactgagactatcagtatcaaataatcagctgcctgccttgtgcttggctgtatgattttccctgatggctgggactcagatgaagtaaaacggatgtgtggagaaaagacagacaagtacactcttggggcttgctcagtccgctgggcatacatcctggctattattggaattttggatgccctgatcctctcatttctagcatttgtgcttggtaatcgacaagacagcttgatggcagaggaactgaaggcagaaaacaaagatgatggaaatgcttaa

SEQ ID NO: 634 - DNA, 677 bp, Homo sapiens
atgctgagagaacagtttgaagcaaatgggtatttctttaaaagaccatacccttttgtgttattctactctaaatttcatgggctagaaatgtgtgttgatgcaaggacttttgggaatgaggctcgattcatcaggcggtcttgtacacccaatgcagaggtgaggcatgaaattcaagatggaaccatacatctttatatttattctatacacagtattccaaagggaactgaaattactattgcctttgattttgactatggaaattgtctcactctgtcacccaggctggaatgcagtggcacaatcttggctcactgcaacttctgcctcctgggttcaggcaattctcctgccttagcctatcgcgtagccaggattacaggtgcctgccaccatggccagtaactgcctgccttgtgcttggctgtatgattttccctgatggctgggactcagatgaagtaaaacggatgtgtggagaaaagacagacaagtacactcttggggcttgctcagtccgctgggcatacatcctggctattattggaattttggatgccctgatcctctcatttctagcatttgtgcttggtaatcgacaagacagcttgatggcagaggaactgaaggcagaaaacaaagttctgctaagccaatattctctagaatga

SEQ ID NO: 635 - DNA, 1889 bp, Homo sapiens
atgagcatagtgatcccattgggggttgatacagcagagacgtcatacttggaaatggctgcaggttcagaaccagaatccgtagaagctagccctgtggtagttgagaaatccaacagttatccccaccagttatataccagcagctcacatcattcacacagttacattggtttgccctatgcggaccataattatggtgctcgtcctcctccgacacctccggcttcccctcctccatcagtccttattagcaaaaatgaagtaggcatatttaccactcctaattttgatgaaacttccagtgctactacaatcagcacatctgaggatggaagttatggtactgatgtaaccaggtgcatatgtggttttacacatgatgatggatacatgatctgttgtgacaaatgcagcgtttggcaacatattgactgcatggggattgataggcagcatattcctgatacatatctatgtgaacgttgtcagcctaggaatttggataaagagagggcagtgctactacaacgccggaaaagggaaaatatgtcagatggtgataccagtgcaactgagagtggtgatgaggttcctgtggaattatatactgcatttcagcatactccaacatcaattactttaactgcttcaagagtttccaaagttaatgataaaagaaggaaaaaaagcggggagaaagaacaacacatttcaaaatgtaaaaaggcatttcgtgaaggatctaggaagtcatcaagagttaagggttcagctccagagattgatccttcatctgatggttcaaattttggatgggagacaaagatcaaagcatggatggatcgatatgaagaagcaaataacaaccagtacagtgagggtgttcagagggaggcacaaagaatagctctgagattaggcaatggaaatgacaaaaaagagatgaataaatccgatttgaataccaacaatttgctcttcaaacctcctgtagagagccatatacaaaagaataagaaaattcttaaatctgcaaaagatttgcctcctgatgcacttatcattgaatacagagggaagtttatgctgagagaacagtttgaagcaaatgggtatttctttaaaagaccatacccttttgtgttattctactctaaatttcatgggctagaaatgtgtgttgatgcaaggacttttgggaatgaggctcgattcatcaggcggtcttgtacacccaatgcagaggtgaggcatgaaattcaagatggaaccatacatctttatatttattctatacacagtattccaaagggaactgaaattactattgcctttgattttgactatggaaattgtaagtacaaggtggactgtgcatgcctcaaagaaaacccagagtgccctgttctaaaacgtagttctgaatccatggaaaatatcaatagtggttatgagaccagacggaaaaaaggaaaaaaagacaaagatatttcaaaagaaaaagatacacaaaatcagaatattactttggattgtgaaggaacgaccaacaaaatgaagagcccagaaactaaacaaagaaagctttctccactgagactatcagtatcaaataatcagctgcctgccttgtgcttggctgtatgattttccctgatggctgggactcagatgaagtaaaacggatgtgtggagaaaagacagacaagtacactcttggggcttgctcagtccgctgggcatacatcctggctattattggaattttggatgccctgatcctctcatttctagcatttgtgcttggtaatcgacaagacagcttgatggcagaggaactgaaggcagaaaacaaagttctgctaagccaatattctctagaatga

SEQ ID NO: 636 - DNA, 1451 bp, Homo sapiens
atggggattgataggcagcatattcctgatacatatctatgtgaacgttgtcagcctaggaatttggataaagagagggcagtgctactacaacgccggaaaagggaaaatatgtcagatggtgataccagtgcaactgagagtggtgatgaggttcctgtggaattatatactgcatttcagcatactccaacatcaattactttaactgcttcaagagtttccaaagttaatgataaaagaaggaaaaaaagcggggagaaagaacaacacatttcaaaatgtaaaaaggcatttcgtgaaggatctaggaagtcatcaagagttaagggttcagctccagagattgatccttcatctgatggttcaaattttggatgggagacaaagatcaaagcatggatggatcgatatgaagaagcaaataacaaccagtacagtgagggtgttcagagggaggcacaaagaatagctctgagattaggcaatggaaatgacaaaaaagagatgaataaatccgatttgaataccaacaatttgctcttcaaacctcctgtagagagccatatacaaaagaataagaaaattcttaaatctgcaaaagatttgcctcctgatgcacttatcattgaatacagagggaagtttatgctgagagaacagtttgaagcaaatgggtatttctttaaaagaccatacccttttgtgttattctactctaaatttcatgggctagaaatgtgtgttgatgcaaggacttttgggaatgaggctcgattcatcaggcggtcttgtacacccaatgcagaggtgaggcatgaaattcaagatggaaccatacatctttatatttattctatacacagtattccaaagggaactgaaattactattgcctttgattttgactatggaaattgtaagtacaaggtggactgtgcatgcctcaaagaaaacccagagtgccctgttctaaaacgtagttctgaatccatggaaaatatcaatagtggttatgagaccagacggaaaaaaggaaaaaaagacaaagatatttcaaaagaaaaagatacacaaaatcagaatattactttggattgtgaaggaacgaccaacaaaatgaagagcccagaaactaaacaaagaaagctttctccactgagactatcagtatcaaataatcagctgcctgccttgtgcttggctgtatgattttccctgatggctgggactcagatgaagtaaaacggatgtgtggagaaaagacagacaagtacactcttggggcttgctcagtccgctgggcatacatcctggctattattggaattttggatgccctgatcctctcatttctagcatttgtgcttggtaatcgacaagacagcttgatggcagaggaactgaaggcagaaaacaaagttctgctaagccaatattctctagaatga

SEQ ID NO: 637 - DNA, 665 bp, Homo sapiens
atgctgagagaacagtttgaagcaaatgggtatttctttaaaagaccatacccttttgtgttattctactctaaatttcatgggctagaaatgtgtgttgatgcaaggacttttgggaatgaggctcgattcatcaggcggtcttgtacacccaatgcagaggtgaggcatgaaattcaagatggaaccatacatctttatatttattctatacacagtattccaaagggaactgaaattactattgcctttgattttgactatggaaattgtctcactctgtcacccaggctggaatgcagtggcacaatcttggctcactgcaacttctgcctcctgggttcaggcaattctcctgccttagcctatcgcgtagccaggattacaggtgcctgccaccatggccagtaactgcctgccttgtgcttggctgtatgattttccctgatggctgggactcagatgaagtaaaacggatgtgtggagaaaagacagacaagtacactcttggggcttgctcagtccgctgggcatacatcctggctattattggaattttggatgccctgatcctctcatttctagcatttgtgcttggtaatcgacaagacagcttgatggcagaggaactgaaggcagaaaacaaagatgatggaaatgcttaa

SEQ ID NO: 638 - DNA, 1877 bp, Homo sapiens
atgagcatagtgatcccattgggggttgatacagcagagacgtcatacttggaaatggctgcaggttcagaaccagaatccgtagaagctagccctgtggtagttgagaaatccaacagttatccccaccagttatataccagcagctcacatcattcacacagttacattggtttgccctatgcggaccataattatggtgctcgtcctcctccgacacctccggcttcccctcctccatcagtccttattagcaaaaatgaagtaggcatatttaccactcctaattttgatgaaacttccagtgctactacaatcagcacatctgaggatggaagttatggtactgatgtaaccaggtgcatatgtggttttacacatgatgatggatacatgatctgttgtgacaaatgcagcgtttggcaacatattgactgcatggggattgataggcagcatattcctgatacatatctatgtgaacgttgtcagcctaggaatttggataaagagagggcagtgctactacaacgccggaaaagggaaaatatgtcagatggtgataccagtgcaactgagagtggtgatgaggttcctgtggaattatatactgcatttcagcatactccaacatcaattactttaactgcttcaagagtttccaaagttaatgataaaagaaggaaaaaaagcggggagaaagaacaacacatttcaaaatgtaaaaaggcatttcgtgaaggatctaggaagtcatcaagagttaagggttcagctccagagattgatccttcatctgatggttcaaattttggatgggagacaaagatcaaagcatggatggatcgatatgaagaagcaaataacaaccagtacagtgagggtgttcagagggaggcacaaagaatagctctgagattaggcaatggaaatgacaaaaaagagatgaataaatccgatttgaataccaacaatttgctcttcaaacctcctgtagagagccatatacaaaagaataagaaaattcttaaatctgcaaaagatttgcctcctgatgcacttatcattgaatacagagggaagtttatgctgagagaacagtttgaagcaaatgggtatttctttaaaagaccatacccttttgtgttattctactctaaatttcatgggctagaaatgtgtgttgatgcaaggacttttgggaatgaggctcgattcatcaggcggtcttgtacacccaatgcagaggtgaggcatgaaattcaagatggaaccatacatctttatatttattctatacacagtattccaaagggaactgaaattactattgcctttgattttgactatggaaattgtaagtacaaggtggactgtgcatgcctcaaagaaaacccagagtgccctgttctaaaacgtagttctgaatccatggaaaatatcaatagtggttatgagaccagacggaaaaaaggaaaaaaagacaaagatatttcaaaagaaaaagatacacaaaatcagaatattactttggattgtgaaggaacgaccaacaaaatgaagagcccagaaactaaacaaagaaagctttctccactgagactatcagtatcaaataatcagctgcctgccttgtgcttggctgtatgattttccctgatggctgggactcagatgaagtaaaacggatgtgtggagaaaagacagacaagtacactcttggggcttgctcagtccgctgggcatacatcctggctattattggaattttggatgccctgatcctctcatttctagcatttgtgcttggtaatcgacaagacagcttgatggcagaggaactgaaggcagaaaacaaagatgatggaaatgcttaa

SEQ ID NO: 639 - DNA, 528 bp, Homo sapiens
atgaactctcagttggttaccacagagaagcgcttcctcaaagacagtttgtacaatgaaggaatcctaattgtatgggacccatctgtataccactcagatatcccaaagtggtaccagaatccggattataatttctttaacaactacaagacttatcgtaagctgcaccccaatcagcccttttacatcctcaagccccagatgccttgggagctatgggacattcttcaagaaatctccccagaagagattcagccaaaccccccatcctctgggatgcttggtatcatcatcatgatgacgctgtgtgaccaggtggatatttatgagttcctcccatccaagcgcaagactgacgtgtgctactactaccagaagttcttcgatagtgcctgcacgatgggtgcctaccacccgctgctctatgagaagaatttggtgaagcatctcaaccagggcacagatgaggacatctacctgcttggaaaagccacactgcctggcttccggaccattcactgctaa

SEQ ID NO: 640 - DNA, 1221 bp, Homo sapiens
atgattcacaccaacctgaagaaaaagttcagctgctgcgtcctggtctttcttctgtttgcagtcatctgtgtgtggaaggaaaagaagaaagggagttactatgattcctttaaattgcaaaccaaggaattccaggtgttaaagagtctggggaaattggccatggggtctgattcccagtctgtatcctcaagcagcacccaggacccccacaggggccgccagaccctcggcagtctcagaggcctagccaaggccaaaccagaggcctccttccaggtgtggaacaaggacagctcttccaaaaaccttatccctaggctgcaaaagatctggaagaattacctaagcatgaacaagtacaaagtgtcctacaaggggccaggaccaggcatcaagttcagtgcagaggccctgcgctgccacctccgggaccatgtgaatgtatccatggtagaggtcacagattttcccttcaatacctctgaatgggagggttatctgcccaaggagagcattaggaccaaggctgggccttggggcaggtgtgctgttgtgtcgtcagcgggatctctgaagtcctcccaactaggcagagaaatcgatgatcatgacgcagtcctgaggtttaatggggcacccacagccaacttccaacaagatgtgggcacaaaaactaccattcgcctgatgaactctcagttggttaccacagagaagcgcttcctcaaagacagtttgtacaatgaaggaatcctaattgtatgggacccatctgtataccactcagatatcccaaagtggtaccagaatccggattataatttctttaacaactacaagacttatcgtaagctgcaccccaatcagcccttttacatcctcaagccccagatgccttgggagctatgggacattcttcaagaaatctccccagaagagattcagccaaaccccccatcctctgggatgcttggtatcatcatcatgatgacgctgtgtgaccaggtggatatttatgagttcctcccatccaagcgcaagactgacgtgtgctactactaccagaagttcttcgatagtgcctgcacgatgggtgcctaccacccgctgctctatgagaagaatttggtgaagcatctcaaccagggcacagatgaggacatctacctgcttggaaaagccacactgcctggcttccggaccattcactgctaa

SEQ ID NO: 641 - DNA, 984 bp, Homo sapiens
atggtaaaacttgcaaacccactttatacagagtggattcttgaagctatacagaaaataaaaaagcaaaagcaaaggccctctgaagagagaatctgccatgcggtcagtacttcccatgggttggataagaagacagtctctgaacagctggaactcagtgttcaggatggctcagttctcaaagtcaccaacaaaggccttgcctcctataaggacccagacaaccctgggcgcttttcatcagttaaaccaggcacttttcctaagtcagccaaggggtctagaggatcatgtaatgatctccgcaatgtggattggaataaacttttaaggagagcaattgaaggacttgaggagccgaatggctcctccctgaagaacatagagaagtatctcagaagtcaaagtgatctcacaagcaccaccaacaacccagcctttcagcagcggctgcgactgggggccaaacgcgctgtgaataatgggaggttactgaaagacggaccgcagtacagggtcaattatgggagcttagatggcaaaggggcacctcagtatcccagtgcattcccatcctcgctcccacctgtcagccttctaccccatgagaaagaccaggaagctgccacttttgctagagagcaaggctttgagactaaagacattaaagagatagccaaaaagacacaagccctgccaaagatgaactcaaagaggcagcgaatcgtgatcttcacccaagggagagatgacactataatggctacagaaagtgaagtcactgcttttgctgtcttggatcaagaccagaaagaaattattgataccaatggagctggagatgcatttgttggaggttttctgtctcaactggtctctgacaagcctctgactgaatgtatccgtgctggccactatgcagcaagcatcataattagacggactggctgcacctttcctgagaagccagacttccactga

SEQ ID NO: 642 - DNA, 1155 bp, Homo sapiens
atggtaaaacttgcaaacccactttatacagagtggattcttgaagctatacagaaaataaaaaagcaaaagcaaaggccctctgaagagagaatctgccatgcggtcagtacttcccatgggttggataagaagacagtctctgaacagctggaactcagtgttcaggatggctcagttctcaaagtcaccaacaaaggccttgcctcctataaggacccagacaaccctgggcgcttttcatcagttaaaccaggcacttttcctaagtcagccaaggggtctagaggatcatgtaatgatctccgcaatgtggattggaataaacttttaaggagagcaattgaaggacttgaggagccgaatggctcctccctgaagaacatagagaagtatctcagaagtcaaagtgatctcacaagcaccaccaacaacccagcctttcagcagcggctgcgactgggggccaaacgcgctgtgaataatgggaggttactgaaagacggaccgcagtacagggtcaattatgggagcttagatggcaaaggggcacctcagtatcccagtgcattcccatcctcgctcccacctgtcagccttctaccccatgagaaagaccagggcttttttcttacagtttccccagagtcagtattaaaggtggctcaccatgcttctgaaaacaacaggattttcactttgaatctatctgcaccgtttattagccagttctacaaggaatcattgatgaaagttatgccttatgttgatatactttttggaaatgagacagaagctgccacttttgctagagagcaaggctttgagactaaagacattaaagagatagccaaaaagacacaagccctgccaaagatgaactcaaagaggcagcgaatcgtgatcttcacccaagggagagatgacactataatggctacagaaagtgaagtcactgcttttgctgtcttggatcaagaccagaaagaaattattgataccaatggagctggagatgcatttgttggaggttttctgtctcaactggtctctgacaagcctctgactgaatgtatccgtgctggccactatgcagcaagcatcataattagacggactggctgcacctttcctgagaagccagacttccactga

SEQ ID NO: 643 - DNA, 942 bp, Homo sapiens
atggccggggtcagctacgcggcgccctggtgggtgagcctcctgcaccggctgccccacttcgacctgagctgggaggccactagcagccagttccggcccgaggacaccgactaccagcaggagcgggacggtatgcgggccatcctggggtcctacgacagcgagctgaccccggccgagtactcaccccagctgacgcggcgcatgcgggaggctgaggatatggtgcagaaggtgcacagccacagcgccgagatggaggctcagctgtcgcaggccctggaggagctgggaggccagaaacaaagagcagacatgctggagatggagctgaagatgctgaagtctcagtccagctctgccgaacagagcttcctgttctccagggaggaggcggacacgctcaggttgaaggtcgaggagctggaaggcgagcggagtcggctggaggaggaaaagaggatgctggaggcacagctggagcggcgagctctgcagggtgactatgaccagagcaggaccaaagtgctgcacatgagcctgaaccccaccagtgtggccaggcagcgcctgcgcgaggaccacagccagctgcaggcggagtgcgagcgactgcgcgggctcctgcgcgccatggagagaggaggcaccgtcccagccgaccttgaggctgccgccgcgagtctgccatcgtccaaggaggtggcagagctgaagaagcaggtggagagtgccgagctgaagaaccagcggctcaaggaggttttccagaccaagatccaggagttccgcaaggcctgctacacgctcaccggctaccagatcgacatcaccacggagaaccagtaccggctgacctcgctgtacgccgagcacccaggcgactgcctcatcttcaaggaagccgcactcagccacaagctgtgcggaaagctatag

SEQ ID NO: 644 - DNA, 282 bp, Homo sapiens
atggccggggtcagctacgcggcgccctggtgggtgagcctcctgcaccggctgccccacttcgacctgagctgggaggccactagcagccagttccggcccgaggacaccgactaccagcaggccaccagcccctcgggttccaagatgcagctactggagacagagttctcacacaccgtgggcgagctcatcgaggtgcacctgcggcgccaggacagcatccctgccttcctcagctcgctcaccctcgagctcttcagccgccagaccgtggcgtag

SEQ ID NO: 645 - DNA, 777 bp, Homo sapiens
atggccggggtcagctacgcggcgccctggtgggtgagcctcctgcaccggctgccccacttcgacctgagctgggaggccactagcagccagttccggcccgaggacaccgactaccagcagctggagatggagctgaagatgctgaagtctcagtccagctctgccgaacagagcttcctgttctccagggaggaggcggacacgctcaggttgaaggtcgaggagctggaaggcgagcggagtcggctggaggaggaaaagaggatgctggaggcacagctggagcggcgagctctgcagggtgactatgaccagagcaggaccaaagtgctgcacatgagcctgaaccccaccagtgtggccaggcagcgcctgcgcgaggaccacagccagctgcaggcggagtgcgagcgactgcgcgggctcctgcgcgccatggagagaggaggcaccgtcccagccgaccttgaggctgccgccgcgagtctgccatcgtccaaggaggtggcagagctgaagaagcaggtggagagtgccgagctgaagaaccagcggctcaaggaggttttccagaccaagatccaggagttccgcaaggcctgctacacgctcaccggctaccagatcgacatcaccacggagaaccagtaccggctgacctcgctgtacgccgagcacccaggcgactgcctcatcttcaaggtgggtcctgcgtgtgacggctctccggctgtctcgctctctgtctcctcctgtggggagatccgaccgtag

SEQ ID NO: 646 - DNA, 801 bp, Homo sapiens
atggccggggtcagctacgcggcgccctggtgggtgagcctcctgcaccggctgccccacttcgacctgagctgggaggccactagcagccagttccggcccgaggacaccgactaccagcaggctcagctgtcgcaggccctggaggagctgggaggccagaaacaaagagcagacatgctggagatggagctgaagatgctgaagtctcagtccagctctgccgaacagagcttcctgttctccagggaggaggcggacacgctcaggttgaaggtcgaggagctggaaggcgagcggagtcggctggaggaggaaaagaggatgctggaggcacagctggagcggcgagctctgcagggtgactatgaccagagcaggaccaaagtgctgcacatgagcctgaaccccaccagtgtggccaggcagcgcctgcgcgaggaccacagccagctgcaggcggagtgcgagcgactgcgcgggctcctgcgcgccatggagagaggaggcaccgtcccagccgaccttgaggctgccgccgcgagtctgccatcgtccaaggaggtggcagagctgaagaagcaggtggagagtgccgagctgaagaaccagcggctcaaggaggttttccagaccaagatccaggagttccgcaaggcctgctacacgctcaccggctaccagatcgacatcaccacggagaaccagtaccggctgacctcgctgtacgccgagcacccaggcgactgcctcatcttcaaggaagccgcactcagccacaagctgtgcggaaagctatag

SEQ ID NO: 647 - DNA, 864 bp, Homo sapiens
atggccggggtcagctacgcggcgccctggtgggtgagcctcctgcaccggctgccccacttcgacctgagctgggaggccactagcagccagttccggcccgaggacaccgactaccagcagctggagatggagctgaagatgctgaagtctcagtccagctctgccgaacagagcttcctgttctccagggaggaggcggacacgctcaggttgaaggtcgaggagctggaaggcgagcggagtcggctggaggaggaaaagaggatgctggaggcacagctggagcggcgagctctgcagggtgactatgaccagagcaggaccaaagtgctgcacatgagcctgaaccccaccagtgtggccaggcagcgcctgcgcgaggaccacagccagctgcaggcggagtgcgagcgactgcgcgggctcctgcgcgccatggagagaggaggcaccgtcccagccgaccttgaggctgccgccgcgagtctgccatcgtccaaggaggtggcagagctgaagaagcaggtggagagtgccgagctgaagaaccagcggctcaaggaggttttccagaccaagatccaggagttccgcaaggcctgctacacgctcaccggctaccagatcgacatcaccacggagaaccagtaccggctgacctcgctgtacgccgagcacccaggcgactgcctcatcttcaaggccaccagcccctcgggttccaagatgcagctactggagacagagttctcacacaccgtgggcgagctcatcgaggtgcacctgcggcgccaggacagcatccctgccttcctcagctcgctcaccctcgagctcttcagccgccagaccgtggcgtag

SEQ ID NO: 648 - DNA, 921 bp, Homo sapiens
atggccggggtcagctacgcggcgccctggtgggtgagcctcctgcaccggctgccccacttcgacctgagctgggaggccactagcagccagttccggcccgaggacaccgactaccagcaggctcagctgtcgcaggccctggaggagctgggaggccagaaacaaagagcagacatgctggagatggagctgaagatgctgaagtctcagtccagctctgccgaacagagcttcctgttctccagggaggaggcggacacgctcaggttgaaggtcgaggagctggaaggcgagcggagtcggctggaggaggaaaagaggatgctggaggcacagctggagcggcgagctctgcagggtgactatgaccagagcaggaccaaagtgctgcacatgagcctgaaccccaccagtgtggccaggcagcgcctgcgcgaggaccacagccagctgcaggcggagtgcgagcgactgcgcgggctcctgcgcgccatggagagaggaggcaccgtcccagccgaccttgaggctgccgccgcgagtctgccatcgtccaaggaggtggcagagctgaagaagcaggtggagagtgccgagctgaagaaccagcggctcaaggaggttttccagaccaagatccaggagttccgcaaggcctgctacacgctcaccggctaccagatcgacatcaccacggagaaccagtaccggctgacctcgctgtacgccgagcacccaggcgactgcctcatcttcaaggccaccagcccctcgggttccaagatgcagctactggagacagagttctcacacaccgtgggcgagctcatcgaggtgcacctgcggcgccaggacagcatccctgccttcctcagctcgctcaccctcgagctcttcagccgccagaccgtggcgtag

SEQ ID NO: 649 - DNA, 564 bp, Homo sapiens
atggccggggtcagctacgcggcgccctggtgggtgagcctcctgcaccggctgccccacttcgacctgagctgggaggccactagcagccagttccggcccgaggacaccgactaccagcagggtgactatgaccagagcaggaccaaagtgctgcacatgagcctgaaccccaccagtgtggccaggcagcgcctgcgcgaggaccacagccagctgcaggcggagtgcgagcgactgcgcgggctcctgcgcgccatggagagaggaggcaccgtcccagccgaccttgaggctgccgccgcgagtctgccatcgtccaaggaggtggcagagctgaagaagcaggtggagagtgccgagctgaagaaccagcggctcaaggaggttttccagaccaagatccaggagttccgcaaggcctgctacacgctcaccggctaccagatcgacatcaccacggagaaccagtaccggctgacctcgctgtacgccgagcacccaggcgactgcctcatcttcaaggaagccgcactcagccacaagctgtgcggaaagctatag

SEQ ID NO: 650 - DNA, 966 bp, Homo sapiens
atggccggggtcagctacgcggcgccctggtgggtgagcctcctgcaccggctgccccacttcgacctgagctgggaggccactagcagccagttccggcccgaggacaccgactaccagcaggccctgctgctcctgggggccgccgccctggcctgcctcgccctggacctcctcttcctgctcttctactccttctggctgtgctgccggcggcgcaagagcgaggagcacctggacgccgactgctgctgcacggcctggtgtgtcatcatcgccacgctggtgtgcagcgccggcatcgcagtgggattctacggcaacggggagaccagtgatggcatccatagggccacctactcgctccgccacgccaaccgcacggtggccggggtccaggaccgcggtgactatgaccagagcaggaccaaagtgctgcacatgagcctgaaccccaccagtgtggccaggcagcgcctgcgcgaggaccacagccagctgcaggcggagtgcgagcgactgcgcgggctcctgcgcgccatggagagaggaggcaccgtcccagccgaccttgaggctgccgccgcgagtctgccatcgtccaaggaggtggcagagctgaagaagcaggtggagagtgccgagctgaagaaccagcggctcaaggaggttttccagaccaagatccaggagttccgcaaggcctgctacacgctcaccggctaccagatcgacatcaccacggagaaccagtaccggctgacctcgctgtacgccgagcacccaggcgactgcctcatcttcaaggccaccagcccctcgggttccaagatgcagctactggagacagagttctcacacaccgtgggcgagctcatcgaggtgcacctgcggcgccaggacagcatccctgccttcctcagctcgctcaccctcgagctcttcagccgccagaccgtggcgtag

SEQ ID NO: 651 - DNA, 597 bp, Homo sapiens
atggccggggtcagctacgcggcgccctggtgggtgagcctcctgcaccggctgccccacttcgacctgagctgggaggccactagcagccagttccggcccgaggacaccgactaccagcagggtgactatgaccagagcaggaccaaagtgctgcacatgagcctgaaccccaccagtgtggccaggcagcgcctgcgcgaggaccacagccagctgcaggcggagtgcgagcgactgcgcgggctcctgcgcgccatggagagaggaggcaccgtcccagccgaccttgaggctgccgccgcgagtctgccatcgtccaaggaggtggcagagctgaagaagcaggtggagagtgccgagctgaagaaccagcggctcaaggaggttttccagaccaagatccaggagttccgcaaggcctgctacacgctcaccggctaccagatcgacatcaccacggagaaccagtaccggctgacctcgctgtacgccgagcacccaggcgactgcctcatcttcaaggtgggtcctgcgtgtgacggctctccggctgtctcgctctctgtctcctcctgtggggagatccgaccgtag

SEQ ID NO: 652 - DNA, 684 bp, Homo sapiens
atggccggggtcagctacgcggcgccctggtgggtgagcctcctgcaccggctgccccacttcgacctgagctgggaggccactagcagccagttccggcccgaggacaccgactaccagcagggtgactatgaccagagcaggaccaaagtgctgcacatgagcctgaaccccaccagtgtggccaggcagcgcctgcgcgaggaccacagccagctgcaggcggagtgcgagcgactgcgcgggctcctgcgcgccatggagagaggaggcaccgtcccagccgaccttgaggctgccgccgcgagtctgccatcgtccaaggaggtggcagagctgaagaagcaggtggagagtgccgagctgaagaaccagcggctcaaggaggttttccagaccaagatccaggagttccgcaaggcctgctacacgctcaccggctaccagatcgacatcaccacggagaaccagtaccggctgacctcgctgtacgccgagcacccaggcgactgcctcatcttcaaggccaccagcccctcgggttccaagatgcagctactggagacagagttctcacacaccgtgggcgagctcatcgaggtgcacctgcggcgccaggacagcatccctgccttcctcagctcgctcaccctcgagctcttcagccgccagaccgtggcgtag

SEQ ID NO: 653 - DNA, 744 bp, Homo sapiens
atggccggggtcagctacgcggcgccctggtgggtgagcctcctgcaccggctgccccacttcgacctgagctgggaggccactagcagccagttccggcccgaggacaccgactaccagcagctggagatggagctgaagatgctgaagtctcagtccagctctgccgaacagagcttcctgttctccagggaggaggcggacacgctcaggttgaaggtcgaggagctggaaggcgagcggagtcggctggaggaggaaaagaggatgctggaggcacagctggagcggcgagctctgcagggtgactatgaccagagcaggaccaaagtgctgcacatgagcctgaaccccaccagtgtggccaggcagcgcctgcgcgaggaccacagccagctgcaggcggagtgcgagcgactgcgcgggctcctgcgcgccatggagagaggaggcaccgtcccagccgaccttgaggctgccgccgcgagtctgccatcgtccaaggaggtggcagagctgaagaagcaggtggagagtgccgagctgaagaaccagcggctcaaggaggttttccagaccaagatccaggagttccgcaaggcctgctacacgctcaccggctaccagatcgacatcaccacggagaaccagtaccggctgacctcgctgtacgccgagcacccaggcgactgcctcatcttcaaggaagccgcactcagccacaagctgtgcggaaagctatag

SEQ ID NO: 654 - DNA, 1062 bp, Homo sapiens
atggccggggtcagctacgcggcgccctggtgggtgagcctcctgcaccggctgccccacttcgacctgagctgggaggccactagcagccagttccggcccgaggacaccgactaccagcaggagcgggacggtatgcgggccatcctggggtcctacgacagcgagctgaccccggccgagtactcaccccagctgacgcggcgcatgcgggaggctgaggatatggtgcagaaggtgcacagccacagcgccgagatggaggctcagctgtcgcaggccctggaggagctgggaggccagaaacaaagagcagacatgctggagatggagctgaagatgctgaagtctcagtccagctctgccgaacagagcttcctgttctccagggaggaggcggacacgctcaggttgaaggtcgaggagctggaaggcgagcggagtcggctggaggaggaaaagaggatgctggaggcacagctggagcggcgagctctgcagggtgactatgaccagagcaggaccaaagtgctgcacatgagcctgaaccccaccagtgtggccaggcagcgcctgcgcgaggaccacagccagctgcaggcggagtgcgagcgactgcgcgggctcctgcgcgccatggagagaggaggcaccgtcccagccgaccttgaggctgccgccgcgagtctgccatcgtccaaggaggtggcagagctgaagaagcaggtggagagtgccgagctgaagaaccagcggctcaaggaggttttccagaccaagatccaggagttccgcaaggcctgctacacgctcaccggctaccagatcgacatcaccacggagaaccagtaccggctgacctcgctgtacgccgagcacccaggcgactgcctcatcttcaaggccaccagcccctcgggttccaagatgcagctactggagacagagttctcacacaccgtgggcgagctcatcgaggtgcacctgcggcgccaggacagcatccctgccttcctcagctcgctcaccctcgagctcttcagccgccagaccgtggcgtag

SEQ ID NO: 655 - DNA, 879 bp, Homo sapiens
atggccggggtcagctacgcggcgccctggtgggtgagcctcctgcaccggctgccccacttcgacctgagctgggaggccactagcagccagttccggcccgaggacaccgactaccagcaggccctgctgctcctgggggccgccgccctggcctgcctcgccctggacctcctcttcctgctcttctactccttctggctgtgctgccggcggcgcaagagcgaggagcacctggacgccgactgctgctgcacggcctggtgtgtcatcatcgccacgctggtgtgcagcgccggcatcgcagtgggattctacggcaacggggagaccagtgatggcatccatagggccacctactcgctccgccacgccaaccgcacggtggccggggtccaggaccgcggtgactatgaccagagcaggaccaaagtgctgcacatgagcctgaaccccaccagtgtggccaggcagcgcctgcgcgaggaccacagccagctgcaggcggagtgcgagcgactgcgcgggctcctgcgcgccatggagagaggaggcaccgtcccagccgaccttgaggctgccgccgcgagtctgccatcgtccaaggaggtggcagagctgaagaagcaggtggagagtgccgagctgaagaaccagcggctcaaggaggttttccagaccaagatccaggagttccgcaaggcctgctacacgctcaccggctaccagatcgacatcaccacggagaaccagtaccggctgacctcgctgtacgccgagcacccaggcgactgcctcatcttcaaggtgggtcctgcgtgtgacggctctccggctgtctcgctctctgtctcctcctgtggggagatccgaccgtag

SEQ ID NO: 656 - DNA, 834 bp, Homo sapiens
atggccggggtcagctacgcggcgccctggtgggtgagcctcctgcaccggctgccccacttcgacctgagctgggaggccactagcagccagttccggcccgaggacaccgactaccagcaggctcagctgtcgcaggccctggaggagctgggaggccagaaacaaagagcagacatgctggagatggagctgaagatgctgaagtctcagtccagctctgccgaacagagcttcctgttctccagggaggaggcggacacgctcaggttgaaggtcgaggagctggaaggcgagcggagtcggctggaggaggaaaagaggatgctggaggcacagctggagcggcgagctctgcagggtgactatgaccagagcaggaccaaagtgctgcacatgagcctgaaccccaccagtgtggccaggcagcgcctgcgcgaggaccacagccagctgcaggcggagtgcgagcgactgcgcgggctcctgcgcgccatggagagaggaggcaccgtcccagccgaccttgaggctgccgccgcgagtctgccatcgtccaaggaggtggcagagctgaagaagcaggtggagagtgccgagctgaagaaccagcggctcaaggaggttttccagaccaagatccaggagttccgcaaggcctgctacacgctcaccggctaccagatcgacatcaccacggagaaccagtaccggctgacctcgctgtacgccgagcacccaggcgactgcctcatcttcaaggtgggtcctgcgtgtgacggctctccggctgtctcgctctctgtctcctcctgtggggagatccgaccgtag

SEQ ID NO: 657 - DNA, 975 bp, Homo sapiens
atggccggggtcagctacgcggcgccctggtgggtgagcctcctgcaccggctgccccacttcgacctgagctgggaggccactagcagccagttccggcccgaggacaccgactaccagcaggagcgggacggtatgcgggccatcctggggtcctacgacagcgagctgaccccggccgagtactcaccccagctgacgcggcgcatgcgggaggctgaggatatggtgcagaaggtgcacagccacagcgccgagatggaggctcagctgtcgcaggccctggaggagctgggaggccagaaacaaagagcagacatgctggagatggagctgaagatgctgaagtctcagtccagctctgccgaacagagcttcctgttctccagggaggaggcggacacgctcaggttgaaggtcgaggagctggaaggcgagcggagtcggctggaggaggaaaagaggatgctggaggcacagctggagcggcgagctctgcagggtgactatgaccagagcaggaccaaagtgctgcacatgagcctgaaccccaccagtgtggccaggcagcgcctgcgcgaggaccacagccagctgcaggcggagtgcgagcgactgcgcgggctcctgcgcgccatggagagaggaggcaccgtcccagccgaccttgaggctgccgccgcgagtctgccatcgtccaaggaggtggcagagctgaagaagcaggtggagagtgccgagctgaagaaccagcggctcaaggaggttttccagaccaagatccaggagttccgcaaggcctgctacacgctcaccggctaccagatcgacatcaccacggagaaccagtaccggctgacctcgctgtacgccgagcacccaggcgactgcctcatcttcaaggtgggtcctgcgtgtgacggctctccggctgtctcgctctctgtctcctcctgtggggagatccgaccgtag

SEQ ID NO: 658 - DNA, 846 bp, Homo sapiens
atggccggggtcagctacgcggcgccctggtgggtgagcctcctgcaccggctgccccacttcgacctgagctgggaggccactagcagccagttccggcccgaggacaccgactaccagcaggccctgctgctcctgggggccgccgccctggcctgcctcgccctggacctcctcttcctgctcttctactccttctggctgtgctgccggcggcgcaagagcgaggagcacctggacgccgactgctgctgcacggcctggtgtgtcatcatcgccacgctggtgtgcagcgccggcatcgcagtgggattctacggcaacggggagaccagtgatggcatccatagggccacctactcgctccgccacgccaaccgcacggtggccggggtccaggaccgcggtgactatgaccagagcaggaccaaagtgctgcacatgagcctgaaccccaccagtgtggccaggcagcgcctgcgcgaggaccacagccagctgcaggcggagtgcgagcgactgcgcgggctcctgcgcgccatggagagaggaggcaccgtcccagccgaccttgaggctgccgccgcgagtctgccatcgtccaaggaggtggcagagctgaagaagcaggtggagagtgccgagctgaagaaccagcggctcaaggaggttttccagaccaagatccaggagttccgcaaggcctgctacacgctcaccggctaccagatcgacatcaccacggagaaccagtaccggctgacctcgctgtacgccgagcacccaggcgactgcctcatcttcaaggaagccgcactcagccacaagctgtgcggaaagctatag

SEQ ID NO: 659 - DNA, 2379 bp, Homo sapiens
atgccgcccaaaaccccccgaaaaacggccgccaccgccgccgctgccgccgcggaacccccggcaccgccgccgccgccccctcctgaggaggacccagagcaggacagcggcccggaggacctgcctctcgtcaggcttgagtttgaagaaacagaagaacctgattttactgcattatgtcagaaattaaagataccagatcatgtcagagagagagcttggttaacttgggagaaagtttcatctgtggatggagtattgggaggttatattcaaaagaaaaaggaactgtggggaatctgtatctttattgcagcagttgacctagatgagatgtcgttcacttttactgagctacagaaaaacatagaaatcagtgtccataaattctttaacttactaaaagaaattgataccagtaccaaagttgataatgctatgtcaagactgttgaagaagtatgatgtattgtttgcactcttcagcaaattggaaaggacatgtgaacttatatatttgacacaacccagcagttcgatatctactgaaataaattctgcattggtgctaaaagtttcttggatcacatttttattagctaaaggggaagtattacaaatggaagatgatctggtgatttcatttcagttaatgctatgtgtccttgactattttattaaactctcacctcccatgttgctcaaagaaccatataaaacagctgttatacccattaatggttcacctcgaacacccaggcgaggtcagaacaggagtgcacggatagcaaaacaactagaaaatgatacaagaattattgaagttctctgtaaagaacatgaatgtaatatagatgaggtgaaaaatgtttatttcaaaaattttataccttttatgaattctcttggacttgtaacatctaatggacttccagaggttgaaaatctttctaaacgatacgaagaaatttatcttaaaaataaagatctagatgcaagattatttttggatcatgataaaactcttcagactgattctatagacagttttgaaacacagagaacaccacgaaaaagtaaccttgatgaagaggtgaatgtaattcctccacacactccagttaggactgttatgaacactatccaacaattaatgatgattttaaattcagcaagtgatcaaccttcagaaaatctgatttcctattttaacaactgcacagtgaatccaaaagaaagtatactgaaaagagtgaaggatataggatacatctttaaagagaaatttgctaaagctgtgggacagggttgtgtcgaaattggatcacagcgatacaaacttggagttcgcttgtattaccgagtaatggaatccatgcttaaatcagaagaagaacgattatccattcaaaattttagcaaacttctgaatgacaacatttttcatatgtctttattggcgtgcgctcttgaggttgtaatggccacatatagcagaagtacatctcagaatcttgattctggaacagatttgtctttcccatggattctgaatgtgcttaatttaaaagcctttgatttttacaaagtgatcgaaagttttatcaaagcagaaggcaacttgacaagagaaatgataaaacatttagaacgatgtgaacatcgaatcatggaatcccttgcatggctctcagacccagatgatgtggtaccagttggccaaagaagagcctggtgttggtgcatgtgctttggactagcatttatgcttgcaggtgttattctaggaggagcatacttgtacaaatattttgcacttcaaccagatgacgtgtactactgtggaataaagtacatcaaagatgatgtcatcttaaatgagccctctgcagatgccccagctgctctctaccagacaattgaagaaaatattaaaatctttgaagaagaagaagttgaatttatcagtgtgcctgtcccagagtttgcagatagtgatcctgccaacattgttcatgactttaacaagaaacttacagcctatttagatcttaacctggataagtgctatgtgatccctctgaacacttccattgttatgccacccagaaacctactggagttacttattaacatcaaggctggaacctatttgcctcagtcctatctgattcatgagcacatggttattactgatcgcattgaaaacattgatcacctgggtttctttatttatcgactgtgtcatgacaaggaaacttacaaactgcaacgcagagaaactattaaaggtattcagaaacgtgaagccagcaattgtttcgcaattcggcattttgaaaacaaatttgccgtggaaactttaatttgttcttga

SEQ ID NO: 660 - DNA, 948 bp, Homo sapiens
atgccgcccaaaaccccccgaaaaacggccgccaccgccgccgctgccgccgcggaacccccggcaccgccgccgccgccccctcctgaggaggacccagagcaggacagcggcccggaggacctgcctctcgtcaggcttgagtttgaagaaacagaagaacctgattttactgcattatgtcagaaattaaagataccagatcatgtcagagagagagcttggttaacttgggagaaagtttcatctgtggatggagtattggacccagatgatgtggtaccagttggccaaagaagagcctggtgttggtgcatgtgctttggactagcatttatgcttgcaggtgttattctaggaggagcatacttgtacaaatattttgcacttcaaccagatgacgtgtactactgtggaataaagtacatcaaagatgatgtcatcttaaatgagccctctgcagatgccccagctgctctctaccagacaattgaagaaaatattaaaatctttgaagaagaagaagttgaatttatcagtgtgcctgtcccagagtttgcagatagtgatcctgccaacattgttcatgactttaacaagaaacttacagcctatttagatcttaacctggataagtgctatgtgatccctctgaacacttccattgttatgccacccagaaacctactggagttacttattaacatcaaggctggaacctatttgcctcagtcctatctgattcatgagcacatggttattactgatcgcattgaaaacattgatcacctgggtttctttatttatcgactgtgtcatgacaaggaaacttacaaactgcaacgcagagaaactattaaaggtattcagaaacgtgaagccagcaattgtttcgcaattcggcattttgaaaacaaatttgccgtggaaactttaatttgttcttga

SEQ ID NO: 661 - DNA, 1188 bp, Homo sapiens
atgcggccaacggctctgtccccttggagcctcatgccaggctcagcatggccagtgctccctgcggccaggcaggactgcacctgcgggacagggctgacggcacacctgggggcagggcctgagcctacagggaggcacagggcaggtgggctagccatgaacagaagaggaagctggagtgctttgggggttcatgcatgtaggctgggatttggggctcacacctcaacctgcatgcccagttccatgcccctcccctcttgtgaaagcacctgtctacttgggctgaggatgtgggggcacaggtggcaggtgaggctgccctcaggaggggcccaggcccagcttgtaccccacctccaccagtacctgaagaagtggggctctcaccctacctgcctctgccattggaatggcctggtttgcacagatgggaaacccgtttgcggggtgggtgtctgggtgggcacgtggggcgaggacctgcctgcgggaccctgccctggaactgacagtgcaagctcggcgtcctgcccatctgggcagaaggctggtttctcccatcaacgaagccctcccaggaccttcctgcaagccctcgtcccacacgcagctctgccgtcccttggtgtccctcccggcctcaggtcctccatgctgggtacctctgggcacctcgtttggctgagccaggggttcagcctggcagggcgccctggcagcagtccttggcctgtggatgctgtcctggcccgtggatggtgtcccggcctccacgtacccctctcagcccctcctcttggactccagccatgggcctgcgcgcgagccggaactgctccaggacagagaacgccgtgtgtggctgcagcccaggccacttctgcatcgtccaggacggggaccactgcgccgcgtgccgcgcttacgccacctccagcccgggccagagggtgcagaagggaggcaccgagagtcaggacaccctgtgtcagaactgccccccggggaccttctctcccaatgggaccctggaggaatgtcagcaccagaccaaccgagcttggaaaagtcagacagacctctgaggtctcatcctggagctgccaccagcccagcctccctgggacctgtcttcactgcctggggccctgggagccagggaggctccctgaggctgagtga

SEQ ID NO: 662 - DNA, 420 bp, Homo sapiens
atggcagaggtggaggagacactgaagcgactgcagagccagaagggagtgcagggaatcatcgtcgtgaacacagaaggcattcccatcaagagcaccatggacaaccccaccaccacccagtatgccagcctcatgcacagcttcatcctgaaggcacggagcaccgtgcgtgacatcgacccccagaacgatctcaccttccttcgaattcgctccaagaaaaatgaaattatggttgcaccagggagcaatggaccacagaaattctgcattgaaaaagttgggaaagaaaattggctacccagaagtcatacctgttttaatcgcctggacctgccaccatacaagagctatgagcaactgaaggaaaagctgttgtttgccatagaagaaacagaaggatttggacaagagtaa

SEQ ID NO: 663 - DNA, 849 bp, Homo sapiens
atggaagggctggaggaggcagaggccaactgctccgtggcgttcgctgaggctcagagatgggtggaggcagtaacagagaagaattttgaaacaaaagattttcgagcctctctagaaaatggtgttctgctgtgtgatttgattaataagcttaaacctggcgtcattaagaagatcaatagactgtctacaccaatagcaggattgtttcttaaacaattaggtctacatcctaactggcaattcgttgatgtatatggaatggatcctgaactccttagcatggtaccaagaccagtctgtgcagtcttacttctctttcctattacagaaaagtatgaagtattcagaacagaagaggaagaaaaaataaaatctcagggacaagatgttacatcatcagtatatttcatgaagcaaacaatcagcaatgcctgtggaacaattggactgattcatgctattgcaaacaataaagacaagatgcactttgaatctggatcaaccttgaaaaaattcctggaggaatctgtgtcaatgagccctgaagaacgagccagatacctggagaactatgatgccatccgagttactcatgagaccagtgcccatgaaggtcagactgaggcaccaagtatagatgagaaagtagatcttcattttattgcattagttcatgtagatgggcatctctatgaattagatgggcggaagccatttccaattaaccatggtgaaactagtgatgaaactttattagaggatgccatagaagtttgcaagaagtttatggagcgcgaccctgatgaactaagatttaatgcgattgctctttctgcagcatag

SEQ ID NO: 664 - DNA, 1101 bp, Homo sapiens
atggaagggctggaggaggcagaggccaactgctccgtggcgttcgctgaggctcagagatgggtggaggcagtaacagagaagaattttgaaacaaaagattttcgagcctctctagaaaatggtgttctgctgtgtgatttgattaataagcttaaacctggcgtcattaagaagatcaatagactgtctacaccaatagcaggattggataatataaacgttttcttgaaagcttgtgaacagattggattgaaagaagcccagcttttccatcctggagatctacaggatttatcaaatcgagtcactgtcaagcaagaagagactgacaggagagtgaaaaatgttttgataacattgtactggctgggaagaaaagcacaaagcaacccgtactataatggtccccatcttaatttgaaagcgtttgagaatcttttaggacaagcactgacgaagtttcttaaacaattaggtctacatcctaactggcaattcgttgatgtatatggaatggatcctgaactccttagcatggtaccaagaccagtctgtgcagtcttacttctctttcctattacagaaaagtatgaagtattcagaacagaagaggaagaaaaaataaaatctcagggacaagatgttacatcatcagtatatttcatgaagcaaacaatcagcaatgcctgtggaacaattggactgattcatgctattgcaaacaataaagacaagatgcactttgaatctggatcaaccttgaaaaaattcctggaggaatctgtgtcaatgagccctgaagaacgagccagatacctggagaactatgatgccatccgagttactcatgagaccagtgcccatgaaggtcagactgaggcaccaagtatagatgagaaagtagatcttcattttattgcattagttcatgtagatgggcatctctatgaattagatgggcggaagccatttccaattaaccatggtgaaactagtgatgaaactttattagaggatgccatagaagtttgcaagaagtttatggagcgcgaccctgatgaactaagatttaatgcgattgctctttctgcagcatag

SEQ ID NO: 665 - DNA, 1005 bp, Homo sapiens
atgaagaaaattaggatatgccatattttcacgttttacagttggatgtcctatgatgttctcttccagagaacagagctcggagctctggaaatttggaggcaactgatatgtgctcatgtctgcatctgtgtgggttggctgtatctcagggacagagtctgcagcaaaaaagatataattttgaggactgaacaaaattcaggaaggactattctcattaaggcagtaacagagaagaattttgaaacaaaagattttcgagcctctctagaaaatggtgttctgctgtgtgatttgattaataagcttaaacctggcgtcattaagaagatcaatagactgtctacaccaatagcaggattgtttcttaaacaattaggtctacatcctaactggcaattcgttgatgtatatggaatggatcctgaactccttagcatggtaccaagaccagtctgtgcagtcttacttctctttcctattacagaaaagtatgaagtattcagaacagaagaggaagaaaaaataaaatctcagggacaagatgttacatcatcagtatatttcatgaagcaaacaatcagcaatgcctgtggaacaattggactgattcatgctattgcaaacaataaagacaagatgcactttgaatctggatcaaccttgaaaaaattcctggaggaatctgtgtcaatgagccctgaagaacgagccagatacctggagaactatgatgccatccgagttactcatgagaccagtgcccatgaaggtcagactgaggcaccaagtatagatgagaaagtagatcttcattttattgcattagttcatgtagatgggcatctctatgaattagatgggcggaagccatttccaattaaccatggtgaaactagtgatgaaactttattagaggatgccatagaagtttgcaagaagtttatggagcgcgaccctgatgaactaagatttaatgcgattgctctttctgcagcatag

SEQ ID NO: 666 - DNA, 288 bp, Homo sapiens
atggaagggctggaggaggcagaggccaactgctccgtggcgttcgctgaggctcagagatgggtggaggcaccaagtatagatgagaaagtagatcttcattttattgcattagttcatgtagatgggcatctctatgaattagatgggcggaagccatttccaattaaccatggtgaaactagtgatgaaactttattagaggatgccatagaagtttgcaagaagtttatggagcgcgaccctgatgaactaagatttaatgcgattgctctttctgcagcatag

SEQ ID NO: 667 - DNA, 864 bp, Homo sapiens
atgaagaaaattaggatatgccatattttcacgttttacagttggatgtcctatgatgttctcttccagagaacagagctcggagctctggaaatttggaggcaactgatatgtgctcatgtctgcatctgtgtgggttggctgtatctcagggacagagtctgcagcaaaaaagatataattttgaggactgaacaaaattcaggaaggactattctcattaagtttcttaaacaattaggtctacatcctaactggcaattcgttgatgtatatggaatggatcctgaactccttagcatggtaccaagaccagtctgtgcagtcttacttctctttcctattacagaaaagtatgaagtattcagaacagaagaggaagaaaaaataaaatctcagggacaagatgttacatcatcagtatatttcatgaagcaaacaatcagcaatgcctgtggaacaattggactgattcatgctattgcaaacaataaagacaagatgcactttgaatctggatcaaccttgaaaaaattcctggaggaatctgtgtcaatgagccctgaagaacgagccagatacctggagaactatgatgccatccgagttactcatgagaccagtgcccatgaaggtcagactgaggcaccaagtatagatgagaaagtagatcttcattttattgcattagttcatgtagatgggcatctctatgaattagatgggcggaagccatttccaattaaccatggtgaaactagtgatgaaactttattagaggatgccatagaagtttgcaagaagtttatggagcgcgaccctgatgaactaagatttaatgcgattgctctttctgcagcatag

SEQ ID NO: 668 - DNA, 984 bp, Homo sapiens
atgctctggaggactgaaaggctgtacaagccctatgtattttttttcaaatatacatatgcatgggtcttgctgctgcctcttttgctgactgataatataaacgttttcttgaaagcttgtgaacagattggattgaaagaagcccagcttttccatcctggagatctacaggatttatcaaatcgagtcactgtcaagcaagaagagactgacaggagagtgaaaaatgttttgataacattgtactggctgggaagaaaagcacaaagcaacccgtactataatggtccccatcttaatttgaaagcgtttgagaatcttttaggacaagcactgacgaagtttcttaaacaattaggtctacatcctaactggcaattcgttgatgtatatggaatggatcctgaactccttagcatggtaccaagaccagtctgtgcagtcttacttctctttcctattacagaaaagtatgaagtattcagaacagaagaggaagaaaaaataaaatctcagggacaagatgttacatcatcagtatatttcatgaagcaaacaatcagcaatgcctgtggaacaattggactgattcatgctattgcaaacaataaagacaagatgcactttgaatctggatcaaccttgaaaaaattcctggaggaatctgtgtcaatgagccctgaagaacgagccagatacctggagaactatgatgccatccgagttactcatgagaccagtgcccatgaaggtcagactgaggcaccaagtatagatgagaaagtagatcttcattttattgcattagttcatgtagatgggcatctctatgaattagatgggcggaagccatttccaattaaccatggtgaaactagtgatgaaactttattagaggatgccatagaagtttgcaagaagtttatggagcgcgaccctgatgaactaagatttaatgcgattgctctttctgcagcatag

SEQ ID NO: 669 - DNA, 1257 bp, Homo sapiens
atgaagaaaattaggatatgccatattttcacgttttacagttggatgtcctatgatgttctcttccagagaacagagctcggagctctggaaatttggaggcaactgatatgtgctcatgtctgcatctgtgtgggttggctgtatctcagggacagagtctgcagcaaaaaagatataattttgaggactgaacaaaattcaggaaggactattctcattaaggcagtaacagagaagaattttgaaacaaaagattttcgagcctctctagaaaatggtgttctgctgtgtgatttgattaataagcttaaacctggcgtcattaagaagatcaatagactgtctacaccaatagcaggattggataatataaacgttttcttgaaagcttgtgaacagattggattgaaagaagcccagcttttccatcctggagatctacaggatttatcaaatcgagtcactgtcaagcaagaagagactgacaggagagtgaaaaatgttttgataacattgtactggctgggaagaaaagcacaaagcaacccgtactataatggtccccatcttaatttgaaagcgtttgagaatcttttaggacaagcactgacgaagtttcttaaacaattaggtctacatcctaactggcaattcgttgatgtatatggaatggatcctgaactccttagcatggtaccaagaccagtctgtgcagtcttacttctctttcctattacagaaaagtatgaagtattcagaacagaagaggaagaaaaaataaaatctcagggacaagatgttacatcatcagtatatttcatgaagcaaacaatcagcaatgcctgtggaacaattggactgattcatgctattgcaaacaataaagacaagatgcactttgaatctggatcaaccttgaaaaaattcctggaggaatctgtgtcaatgagccctgaagaacgagccagatacctggagaactatgatgccatccgagttactcatgagaccagtgcccatgaaggtcagactgaggcaccaagtatagatgagaaagtagatcttcattttattgcattagttcatgtagatgggcatctctatgaattagatgggcggaagccatttccaattaaccatggtgaaactagtgatgaaactttattagaggatgccatagaagtttgcaagaagtttatggagcgcgaccctgatgaactaagatttaatgcgattgctctttctgcagcatag

SEQ ID NO: 670 - DNA, 708 bp, Homo sapiens
atggaagggctggaggaggcagaggccaactgctccgtggcgttcgctgaggctcagagatgggtggagtttcttaaacaattaggtctacatcctaactggcaattcgttgatgtatatggaatggatcctgaactccttagcatggtaccaagaccagtctgtgcagtcttacttctctttcctattacagaaaagtatgaagtattcagaacagaagaggaagaaaaaataaaatctcagggacaagatgttacatcatcagtatatttcatgaagcaaacaatcagcaatgcctgtggaacaattggactgattcatgctattgcaaacaataaagacaagatgcactttgaatctggatcaaccttgaaaaaattcctggaggaatctgtgtcaatgagccctgaagaacgagccagatacctggagaactatgatgccatccgagttactcatgagaccagtgcccatgaaggtcagactgaggcaccaagtatagatgagaaagtagatcttcattttattgcattagttcatgtagatgggcatctctatgaattagatgggcggaagccatttccaattaaccatggtgaaactagtgatgaaactttattagaggatgccatagaagtttgcaagaagtttatggagcgcgaccctgatgaactaagatttaatgcgattgctctttctgcagcatag

SEQ ID NO: 671 - DNA, 333 bp, Homo sapiens
atggcggatctggaggagcagttgtctgatgaagagaaggttttcccaaatagtgcaccccttgaaggagggacaaggctgaccatatgtggctgggactttggatttcggaggaataataaatttgatttaaagaaaactagagttctccttggaaatgagagctgcaccttgactttaagtgagagcacgatgaatacattgaaatgcacagttggtcctgccatgaataagcatttcaatatgtccataattatttcaaatggccacgggacaacacaatacagtacattctcctatgtggtaaggaagattctatcctatcatgtttga

SEQ ID NO: 672 - DNA, 204 bp, Homo sapiens
atggcggatctggaggagcagttgtctgatgaagagaaggttttcccaaatagtgcaccccttgaaggagggacaaggctgaccatatgtggctgggactttggatttcggaggaataataaatttgatttaaagaaaactagagttctccttggaaatgagagctgcaccttgactttaagtgagagcacgatgaatacgtaa

SEQ ID NO: 673 - DNA, 1248 bp, Homo sapiens
atggcggatctggaggagcagttgtctgatgaagagaaggtgcgtatagcagcaaaattcatcattcatgcccctcctggagaatttaatgaggttttcaatgatcagtttcctaattcatctcagaacggttcatgccgacaagtgcagtatcctctgacagacatgtcccccatcctaactagtggggactctgatatatccagtccattactgcaaaatactgtccacattgacctcagtgctctaaatccagagctggtccaggcagtgcagcatgtagtgattgggcccagtagcctgattgtgcatttcaatgaagtcataggaagagggcattttggttgtgtatatcatgggactttgttggacaatgatggcaagaaaattcactgtgctgtgaaatccttgaacagaatcactgacataggagaagtttcccaatttctgaccgagggaatcatcatgaaagattttagtcatcccaatgtcctctcgctcctgggaatctgcctgcgaagtgaagggtctccgctggtggtcctaccatacatgaaacatggagatcttcgaaatttcattcgaaatgagactcataatccaactgtaaaagatcttattggctttggtcttcaagtagccaaaggcatgaaatatcttgcaagcaaaaagtttgtccacagagacttggctgcaagaaactgtatgctggatgaaaaattcacagtcaaggttgctgattttggtcttgccagagacatgtatgataaagaatactatagtgtacacaacaaaacaggtgcaaagctgccagtgaagtggatggctttggaaagtctgcaaactcaaaagtttaccaccaagtcagatgtgtggtcctttggcgtgctcctctgggagctgatgacaagaggagccccaccttatcctgacgtaaacacctttgatataactgtttacttgttgcaagggagaagactcctacaacccgaatactgcccagaccccttatatgaagtaatgctaaaatgctggcaccctaaagccgaaatgcgcccatccttttctgaactggtgtcccggatatcagcgatcttctctactttcattggggagcactatgtccatgtgaacgctacttatgtgaacgtaaaatgtgtcgctccgtatccttctctgttgtcatcagaagataacgctgatgatgaggtggacacacgaccagcctccttctgggagacatcatag

SEQ ID NO: 674 - DNA, 261 bp, Homo sapiens
atggcggatctggaggagcagttgtctgatgaagagaagggaaatgatattgaccctgaagcagttaaaggtgaagtgttaaaagttggaaataagagctgtgagaatatacacttacattctgaagccgttttatgcacggtccccaatgacctgctgaaattgaacagcgagctaaatatagaggtgggattcctgcattcctctcatgatgtaaataaggaagccagtgtaattatgttattctcaggcttaaaataa

SEQ ID NO: 675 - DNA, 2511 bp, Homo sapiens
atggcggatctggaggagcagttgtctgatgaagagaaggttttcccaaatagtgcaccccttgaaggagggacaaggctgaccatatgtggctgggactttggatttcggaggaataataaatttgatttaaagaaaactagagttctccttggaaatgagagctgcaccttgactttaagtgagagcacgatgaatacattgaaatgcacagttggtcctgccatgaataagcatttcaatatgtccataattatttcaaatggccacgggacaacacaatacagtacattctcctatgtggatcctgtaataacaagtatttcgccgaaatacggtcctatggctggtggcactttacttactttaactggaaattacctaaacagtgggaattctagacacatttcaattggtggaaaaacatgtactttaaaaagtgtgtcaaacagtattcttgaatgttataccccagcccaaaccatttcaactgagtttgctgttaaattgaaaattgacttagccaaccgagagacaagcatcttcagttaccgtgaagatcccattgtctatgaaattcatccaaccaaatcttttattagtggtgggagcacaataacaggtgttgggaaaaacctgaattcagttagtgtcccgagaatggtcataaatgtgcatgaagcaggaaggaactttacagtggcatgtcaacatcgctctaattcagagataatctgttgtaccactccttccctgcaacagctgaatctgcaactccccctgaaaaccaaagcctttttcatgttagatgggatcctttccaaatactttgatctcatttatgtacataatcctgtgtttaagccttttgaaaagccagtgatgatctcaatgggcaatgaaaatgtactggaaattaagggaaatgatattgaccctgaagcagttaaaggtgaagtgttaaaagttggaaataagagctgtgagaatatacacttacattctgaagccgttttatgcacggtccccaatgacctgctgaaattgaacagcgagctaaatatagagtggaagcaagcaatttcttcaaccgtccttggaaaagtaatagttcaaccagatcagaatttcacaggattgattgctggtgttgtctcaatatcaacagcactgttattactacttgggtttttcctgtggctgaaaaagagaaagcaaattaaagatctgggcagtgaattagttcgctacgatgcaagagtacacactcctcatttggataggcttgtaagtgcccgaagtgtaagcccaactacagaaatggtttcaaatgaatctgtagactaccgagctacttttccagaagatcagtttcctaattcatctcagaacggttcatgccgacaagtgcagtatcctctgacagacatgtcccccatcctaactagtggggactctgatatatccagtccattactgcaaaatactgtccacattgacctcagtgctctaaatccagagctggtccaggcagtgcagcatgtagtgattgggcccagtagcctgattgtgcatttcaatgaagtcataggaagagggcattttggttgtgtatatcatgggactttgttggacaatgatggcaagaaaattcactgtgctgtgaaatccttgaacagaatcactgacataggagaagtttcccaatttctgaccgagggaatcatcatgaaagattttagtcatcccaatgtcctctcgctcctgggaatctgcctgcgaagtgaagggtctccgctggtggtcctaccatacatgaaacatggagatcttcgaaatttcattcgaaatgagactcataatccaactgtaaaagatcttattggctttggtcttcaagtagccaaaggcatgaaatatcttgcaagcaaaaagtttgtccacagagacttggctgcaagaaactgtatgctggatgaaaaattcacagtcaaggttgctgattttggtcttgccagagacatgtatgataaagaatactatagtgtacacaacaaaacaggtgcaaagctgccagtgaagtggatggctttggaaagtctgcaaactcaaaagtttaccaccaagtcagatgtgtggtcctttggcgtgctcctctgggagctgatgacaagaggagccccaccttatcctgacgtaaacacctttgatataactgtttacttgttgcaagggagaagactcctacaacccgaatactgcccagaccccttatatgaagtaatgctaaaatgctggcaccctaaagccgaaatgcgcccatccttttctgaactggtgtcccggatatcagcgatcttctctactttcattggggagcactatgtccatgtgaacgctacttatgtgaacgtaaaatgtgtcgctccgtatccttctctgttgtcatcagaagataacgctgatgatgaggtggacacacgaccagcctccttctgggagacatcatag

SEQ ID NO: 676 - DNA, 2565 bp, Homo sapiens
atggcggatctggaggagcagttgtctgatgaagagaaggttttcccaaatagtgcaccccttgaaggagggacaaggctgaccatatgtggctgggactttggatttcggaggaataataaatttgatttaaagaaaactagagttctccttggaaatgagagctgcaccttgactttaagtgagagcacgatgaatacattgaaatgcacagttggtcctgccatgaataagcatttcaatatgtccataattatttcaaatggccacgggacaacacaatacagtacattctcctatgtggatcctgtaataacaagtatttcgccgaaatacggtcctatggctggtggcactttacttactttaactggaaattacctaaacagtgggaattctagacacatttcaattggtggaaaaacatgtactttaaaaagtgtgtcaaacagtattcttgaatgttataccccagcccaaaccatttcaactgagtttgctgttaaattgaaaattgacttagccaaccgagagacaagcatcttcagttaccgtgaagatcccattgtctatgaaattcatccaaccaaatcttttattagtacttggtggaaagaacctctcaacattgtcagttttctattttgctttgccagtggtgggagcacaataacaggtgttgggaaaaacctgaattcagttagtgtcccgagaatggtcataaatgtgcatgaagcaggaaggaactttacagtggcatgtcaacatcgctctaattcagagataatctgttgtaccactccttccctgcaacagctgaatctgcaactccccctgaaaaccaaagcctttttcatgttagatgggatcctttccaaatactttgatctcatttatgtacataatcctgtgtttaagccttttgaaaagccagtgatgatctcaatgggcaatgaaaatgtactggaaattaagggaaatgatattgaccctgaagcagttaaaggtgaagtgttaaaagttggaaataagagctgtgagaatatacacttacattctgaagccgttttatgcacggtccccaatgacctgctgaaattgaacagcgagctaaatatagagtggaagcaagcaatttcttcaaccgtccttggaaaagtaatagttcaaccagatcagaatttcacaggattgattgctggtgttgtctcaatatcaacagcactgttattactacttgggtttttcctgtggctgaaaaagagaaagcaaattaaagatctgggcagtgaattagttcgctacgatgcaagagtacacactcctcatttggataggcttgtaagtgcccgaagtgtaagcccaactacagaaatggtttcaaatgaatctgtagactaccgagctacttttccagaagatcagtttcctaattcatctcagaacggttcatgccgacaagtgcagtatcctctgacagacatgtcccccatcctaactagtggggactctgatatatccagtccattactgcaaaatactgtccacattgacctcagtgctctaaatccagagctggtccaggcagtgcagcatgtagtgattgggcccagtagcctgattgtgcatttcaatgaagtcataggaagagggcattttggttgtgtatatcatgggactttgttggacaatgatggcaagaaaattcactgtgctgtgaaatccttgaacagaatcactgacataggagaagtttcccaatttctgaccgagggaatcatcatgaaagattttagtcatcccaatgtcctctcgctcctgggaatctgcctgcgaagtgaagggtctccgctggtggtcctaccatacatgaaacatggagatcttcgaaatttcattcgaaatgagactcataatccaactgtaaaagatcttattggctttggtcttcaagtagccaaaggcatgaaatatcttgcaagcaaaaagtttgtccacagagacttggctgcaagaaactgtatgctggatgaaaaattcacagtcaaggttgctgattttggtcttgccagagacatgtatgataaagaatactatagtgtacacaacaaaacaggtgcaaagctgccagtgaagtggatggctttggaaagtctgcaaactcaaaagtttaccaccaagtcagatgtgtggtcctttggcgtgctcctctgggagctgatgacaagaggagccccaccttatcctgacgtaaacacctttgatataactgtttacttgttgcaagggagaagactcctacaacccgaatactgcccagaccccttatatgaagtaatgctaaaatgctggcaccctaaagccgaaatgcgcccatccttttctgaactggtgtcccggatatcagcgatcttctctactttcattggggagcactatgtccatgtgaacgctacttatgtgaacgtaaaatgtgtcgctccgtatccttctctgttgtcatcagaagataacgctgatgatgaggtggacacacgaccagcctccttctgggagacatcatag

SEQ ID NO: 677 - DNA, 498 bp, Homo sapiens
atggcggatctggaggagcagttgtctgatgaagagaaggttttcccaaatagtgcaccccttgaaggagggacaaggctgaccatatgtggctgggactttggatttcggaggaataataaatttgatttaaagaaaactagagttctccttggaaatgagagctgcaccttgactttaagtgagagcacgatgaatacattgaaatgcacagttggtcctgccatgaataagcatttcaatatgtccataattatttcaaatggccacgggacaacacaatacagtacattctcctatgtggatcctgtaataacaagtatttcgccgaaatacggtcctatggctggtggcactttacttactttaactggaaattacctaaacagtgggaattctagacacatttcaattggtggaaaaacatgtactttaaaaaggtgttgtaaatttattttttgttgcatctgtcaatttgaattaatatctgtaccttaa

SEQ ID NO: 678 - DNA, 633 bp, Homo sapiens
atggcggatctggaggagcagttgtctgatgaagagaaggttttcccaaatagtgcaccccttgaaggagggacaaggctgaccatatgtggctgggactttggatttcggaggaataataaatttgatttaaagaaaactagagttctccttggaaatgagagctgcaccttgactttaagtgagagcacgatgaatacattgaaatgcacagttggtcctgccatgaataagcatttcaatatgtccataattatttcaaatggccacgggacaacacaatacagtacattctcctatgtggatcctgtaataacaagtatttcgccgaaatacggtcctatggctggtggcactttacttactttaactggaaattacctaaacagtgggaattctagacacatttcaattggtggaaaaacatgtactttaaaaagtgtgtcaaacagtattcttgaatgttataccccagcccaaaccatttcaactgagtttgctgttaaattgaaaattgacttagccaaccgagagacaagcatcttcagttaccgtgaagatcccattgtctatgaaattcatccaaccaaatcttttattaggcatgtcaacatcgctctaattcagagataa

SEQ ID NO: 679 - DNA, 2175 bp, Homo sapiens
atggcggatctggaggagcagttgtctgatgaagagaaggtgcgtatagcagcaaaattcatcattcatgcccctcctggagaatttaatgaggttttcaatgatgttcggttactgcttaataatgacaatcttctcagggaaggagcagcccatgcatttgcacagtataacttggaccagtttactccagtaaaaattgaaggttatgaagatcaggtattgataacagaacatggcgacttgggaaatggaaagtttttggatccaaagaacagaatctgttttaaatttgatcacttaaggaaggaggcaactgatccaagaccctgtgaagtagaaaatgcagttgaatcatggagaacttcagtagaaactgctctgagagcttacgtaaaagaacattacccgaatggagtctgcactgtgtatggcaaaaaaatagatggacagcaaaccattattgcatgcatagaaagccatcagttccaagcaaaaaatttttggaatggtcgttggaggtcagaatggaagtttacaatcactccttcaaccactcaagtggttggcatcttgaaaattcagggaaatgatattgaccctgaagcagttaaaggtgaagtgttaaaagttggaaataagagctgtgagaatatacacttacattctgaagccgttttatgcacggtccccaatgacctgctgaaattgaacagcgagctaaatatagagtggaagcaagcaatttcttcaaccgtccttggaaaagtaatagttcaaccagatcagaatttcacaggattgattgctggtgttgtctcaatatcaacagcactgttattactacttgggtttttcctgtggctgaaaaagagaaagcaaattaaagatctgggcagtgaattagttcgctacgatgcaagagtacacactcctcatttggataggcttgtaagtgcccgaagtgtaagcccaactacagaaatggtttcaaatgaatctgtagactaccgagctacttttccagaagatcagtttcctaattcatctcagaacggttcatgccgacaagtgcagtatcctctgacagacatgtcccccatcctaactagtggggactctgatatatccagtccattactgcaaaatactgtccacattgacctcagtgctctaaatccagagctggtccaggcagtgcagcatgtagtgattgggcccagtagcctgattgtgcatttcaatgaagtcataggaagagggcattttggttgtgtatatcatgggactttgttggacaatgatggcaagaaaattcactgtgctgtgaaatccttgaacagaatcactgacataggagaagtttcccaatttctgaccgagggaatcatcatgaaagattttagtcatcccaatgtcctctcgctcctgggaatctgcctgcgaagtgaagggtctccgctggtggtcctaccatacatgaaacatggagatcttcgaaatttcattcgaaatgagactcataatccaactgtaaaagatcttattggctttggtcttcaagtagccaaaggcatgaaatatcttgcaagcaaaaagtttgtccacagagacttggctgcaagaaactgtatgctggatgaaaaattcacagtcaaggttgctgattttggtcttgccagagacatgtatgataaagaatactatagtgtacacaacaaaacaggtgcaaagctgccagtgaagtggatggctttggaaagtctgcaaactcaaaagtttaccaccaagtcagatgtgtggtcctttggcgtgctcctctgggagctgatgacaagaggagccccaccttatcctgacgtaaacacctttgatataactgtttacttgttgcaagggagaagactcctacaacccgaatactgcccagaccccttatatgaagtaatgctaaaatgctggcaccctaaagccgaaatgcgcccatccttttctgaactggtgtcccggatatcagcgatcttctctactttcattggggagcactatgtccatgtgaacgctacttatgtgaacgtaaaatgtgtcgctccgtatccttctctgttgtcatcagaagataacgctgatgatgaggtggacacacgaccagcctccttctgggagacatcatag

SEQ ID NO: 680 - DNA, 414 bp, Homo sapiens
atggcggatctggaggagcagttgtctgatgaagagaagtggtcctttggcgtgctcctctgggagctgatgacaagaggagccccaccttatcctgacgtaaacacctttgatataactgtttacttgttgcaagggagaagactcctacaacccgaatactgcccagaccccttatatgaagtaatgctaaaatgctggcaccctaaagccgaaatgcgcccatccttttctgaactggtgtcccggatatcagcgatcttctctactttcattggggagcactatgtccatgtgaacgctacttatgtgaacgtaaaatgtgtcgctccgtatccttctctgttgtcatcagaagataacgctgatgatgaggtggacacacgaccagcctccttctgggagacatcatag

SEQ ID NO: 681 - DNA, 1257 bp, Homo sapiens
atgaagagtaaatcaaagagtttagcagaatgcttcccatatgataaacctctcataatgaaggcccccgctgtgcttgcacctggcatcctcgtgctcctgtttaccttggtgcagaggagcaatggggagtgtaaagaggcactagcaaagtccgagatgaatgtgaatatgaagtatcagcttcccaacttcaccgcggaaacacccatccagaatgtcattctacatgagcatcacattttccttggtgccactaactacatttatgttttaaatgaggaagaccttcagaaggttgctgagtacaagactgggcctgtgctggaacacccagattgtttcccatgtcaggactgcagcagcaaagccaatttatcaggaggtgtttggaaagataacatcaacatggctctagttgtcgacacctactatgatgatcaactcattagctgtggcagcgtcaacagagggacctgccagcgacatgtctttccccacaatcatactgctgacatacagtcggaggttcactgcatattctccccacagatagaagagcccagccagtgtcctgactgtgtggtgagcgccctgggagccaaagtcctttcatctgtaaaggaccggttcatcaacttctttgtaggcaataccataaattcttcttatttcccagatcatccattgcattcgatatcagtgagaaggctaaaggaaacgaaagatggttttatgtttttgacggaccagtcctacattgatgttttacctgagttcagagattcttaccccattaagtatgtccatgcctttgaaagcaacaattttatttacttcttgacggtccaaagggaaactctagatgctcagacttttcacacaagaataatcaggttctgttccataaactctggattgcattcctacatggaaatgcctctggagtgtattctcacagaaaagagaaaaaagagatccacaaagaaggaagtgtttaatatacttcaggctgcgtatgtcagcaagcctggggcccagcttgctagacaaataggagccagcctgaatgatgacattcttttcggggtgttcgcacaaagcaagccagattctgccgaaccaatggatcgatctgccatgtgtgcattccctatcaaatatgtcaacgacttcttcaacaagatcgtcaacaaaaacaatgtgagatgtctccagcatttttacggacccaatcatgagcactgctttaatagg

SEQ ID NO: 682 - DNA, 810 bp, Homo sapiens
atggcggatctggaggagcagttgtctgatgaagagaaggttttcccaaatagtgcaccccttgaaggagggacaaggctgaccatatgtggctgggactttggatttcggaggaataataaatttgatttaaagaaaactagagttctccttggaaatgagagctgcaccttgactttaagtgagagcacgatgaatacattgaaatgcacagttggtcctgccatgaataagcatttcaatatgtccataattatttcaaatggccacgggacaacacaatacagtacattctcctatgtggatcctgtaataacaagtatttcgccgaaatacggtcctatggctggtggcactttacttactttaactggaaattacctaaacagtgggaattctagacacatttcaattggtggaaaaacatgtactttaaaaagtgtgtcaaacagtattcttgaatgttataccccagcccaaaccatttcaactgagtttgctgttaaattgaaaattgacttagccaaccgagagacaagcatcttcagttaccgtgaagatcccattgtctatgaaattcatccaaccaaatcttttattagtggtgggagcacaataacaggtgttgggaaaaacctgaattcagttagtgtcccgagaatggtcataaatgtgcatgaagcaggaaggaactttacagtggtaagtcctttgagcaatggttctactcagagctctgcatctttgcctctaaccatgtggctttcatggtacctgagacatctcagtttcgcctttaaggtttgctag

SEQ ID NO: 683 - DNA, 972 bp, Homo sapiens
atggcggatctggaggagcagttgtctgatgaagagaaggttttcccaaatagtgcaccccttgaaggagggacaaggctgaccatatgtggctgggactttggatttcggaggaataataaatttgatttaaagaaaactagagttctccttggaaatgagagctgcaccttgactttaagtgagagcacgatgaatacattgaaatgcacagttggtcctgccatgaataagcatttcaatatgtccataattatttcaaatggccacgggacaacacaatacagtacattctcctatgtggatcctgtaataacaagtatttcgccgaaatacggtcctatggctggtggcactttacttactttaactggaaattacctaaacagtgggaattctagacacatttcaattggtggaaaaacatgtactttaaaaagtgtgtcaaacagtattcttgaatgttataccccagcccaaaccatttcaactgagtttgctgttaaattgaaaattgacttagccaaccgagagacaagcatcttcagttaccgtgaagatcccattgtctatgaaattcatccaaccaaatcttttattagtggtgggagcacaataacaggtgttgggaaaaacctgaattcagttagtgtcccgagaatggtcataaatgtgcatgaagcaggaaggaactttacagtggcatgtcaacatcgctctaattcagagataatctgttgtaccactccttccctgcaacagctgaatctgcaactccccctgaaaaccaaagcctttttcatgttagatgggatcctttccaaatactttgatctcatttatgtacataatcctgtgtttaagccttttgaaaagccagtgatgatctcaatgggcaatgaaaatgtactggaaattaaggtaagaaatgctttaaacactgtcttaaatcatcagctcaaacttaattga

SEQ ID NO: 684 - DNA, 1143 bp, Homo sapiens
atggcggatctggaggagcagttgtctgatgaagagaaggttttcccaaatagtgcaccccttgaaggagggacaaggctgaccatatgtggctgggactttggatttcggaggaataataaatttgatttaaagaaaactagagttctccttggaaatgagagctgcaccttgactttaagtgagagcacgatgaatacattgaaatgcacagttggtcctgccatgaataagcatttcaatatgtccataattatttcaaatggccacgggacaacacaatacagtacattctcctatgtggatcctgtaataacaagtatttcgccgaaatacggtcctatggctggtggcactttacttactttaactggaaattacctaaacagtgggaattctagacacatttcaattggtggaaaaacatgtactttaaaaagtgtgtcaaacagtattcttgaatgttataccccagcccaaaccatttcaactgagtttgctgttaaattgaaaattgacttagccaaccgagagacaagcatcttcagttaccgtgaagatcccattgtctatgaaattcatccaaccaaatcttttattagtggtgggagcacaataacaggtgttgggaaaaacctgaattcagttagtgtcccgagaatggtcataaatgtgcatgaagcaggaaggaactttacagtggcatgtcaacatcgctctaattcagagataatctgttgtaccactccttccctgcaacagctgaatctgcaactccccctgaaaaccaaagcctttttcatgttagatgggatcctttccaaatactttgatctcatttatgtacataatcctgtgtttaagccttttgaaaagccagtgatgatctcaatgggcaatgaaaatgtactggaaattaagggaaatgatattgaccctgaagcagttaaaggtgaagtgttaaaagttggaaataagagctgtgagaatatacacttacattctgaagccgttttatgcacggtccccaatgacctgctgaaattgaacagcgagctaaatatagaggtgggattcctgcattcctctcatgatgtaaataaggaagccagtgtaattatgttattctcaggcttaaaataa

SEQ ID NO: 685 - DNA, 2799 bp, Homo sapiens
atgggggactcaggatcaagacgatctaccctggtctcccggttgccaatattcagaagaagtattaacagaagacatgattctcttccttcttcaccttcttccagtaatacagttggtgtccacagttcctctccttccagcactaactcaagctcaggtagcacaggtaaacggaggagcatattccgtactccttccattagcttccaccataagaaggggagtgagcctaagcaagagcctaccaaccagaaccttagtatttcaaatggtgctcaacctggtcacagcaatatgcagaaactgagtttggaagaacatattaagaccaggggaagacattctgttggttttagtagttcacgaaataagaagataacaagatctttgacagaggattttgaaagggaaaaagagcactcaactaacaagaatgtctttataaattgtctaagttctggcaaaagtgaaggggatgattctggtttcacagaagaccaaactcgtcgttctgttaagcagtcaacaaggaagctactccctaaatctttttcatctcactataaattttctaagccagttctacagagccaatccatttcattggtacaacagtctgaattctcattggaagttacacagtaccaagagagagaacctgtattagtaagagcttcgccatcctgttctgtggatgtaacagaacgggcaggaagctctttacaatctcctttgctttctgctgatcttaccacagctcagacaccttcagaatttttagccttgactgaagattctgtgtctgaaatggatgcattttctaaaagtggaagcatggcatcccactgtgacaactttggccacaatgattctacctctcagatgtccctcaattctgctgctgttacaaagacaacaacagaacttacgggaactgttccctgtgcaattatgtctcctgggaaatataggttagagggtcaatgtagcactgaatctaattcattaccggaaacctctgctgctaatcagaaggaagtgttattacaaattgctgaactacctgctacaagtgtgagccactcagagagtaacctaccagcagatagtgaaagagaagaaaatatagggttacaaaatggtgaaacaatgctggggacaaactccccaaggaaacttggattttatgagcaacataaagcaatagcggaacatgtaaaagggatccatcctatttcagattcaaagataatacctacttctggtgatcatcatatttttaacaaaacatcacatggatatgaagcaaatcctgccaaagttcttgccagtagtctcagtccatttcgtgaaggaagatttatagagaggagactgcgatcctcgtcagaaggcactgcagggagtagcagaatgattttgaaaccgaaagatggaaatatagaagaagttaatagtttaagaaagcaaagagcaggttcttcatcttcaaaaatgaacagtttggatgttttgaataatttgggatcttgtgaactggatgaagatgatctaatgcttgatcttgaatttttagaggaacagagtcttcacccttctgtttgccgggaggactcatatcactctgtcgtctcatgtgccgcagtagttcttactcctatggaaccaatgatagaaatgaagaaaagagaagaaccagaatttcctgagccttccaaacagaattggtgtgcttatgtacataccaggttatctcccacagtgatattggacaaccaggtcacttatgtcccaggtgggaaaggaccttgtggctggaccggtggatcctgtcctcagagatctcagaagatatccaatcctgtctataggatgcaacataaaattgtcacctcattggattggaggtgctgtcctggatacagtgggccgaaatgtcaactaagagcccaggaacagcaaagtttgatacacaccaaccaggctgaaagtcatacagctgttggcagaggagtagctgagcagcagcagcagcaaggctgtggtgacccagaagtgatgcaaaaaatgactgatcaggtgaactaccaggcaatgaaactgactcttctgcagaagaagattgacaatatttctttgactgtgaatgatgtaaggaacacttactcctccctagaaggaaaagtcagcgaagataaaagcagagaatttcaatctcttctaaaagaggagtattcaagctgtagtcggcatccgtgccaaaatgggggcacgtgcataaatggaagaactagctttacctgtgcctgcagacatccttttactggtgacaactgcactatcaagcttgtggaagaaaatgctttagctccagatttttccaaaggatcttacagatatgcacccatggtggcattttttgcatctcatacgtatggaatgactatacctggtcctatcctgtttaataacttggatgtcaattatggagcttcatataccccaagaactggaaaatttagaattccgtatcttggagtatatgttttcaagtacaccatcgagtcatttagtgctcatatttctggatttttagtggttgatggaatagacaagcttgcatttgagtctgaaaatattaacagtgaaatacactgtgatagggttttaactggggatgccttattagaattaaattatgggcaggaagtctggttacgacttgcaaaaggaacaattccagccaagtttccccctgttactacatttagtggctatttattatatcgtacataa

SEQ ID NO: 686 - DNA, 4788 bp, Homo sapiens
atgggggactcaggatcaagacgatctaccctggtctcccggttgccaatattcagaagaagtattaacagaagacatgattctcttccttcttcaccttcttccagtaatacagttggtgtccacagttcctctccttccagcactaactcaagctcaggtagcacaggtaaacggaggagcatattccgtactccttccattagcttccaccataagaaggggagtgagcctaagcaagagcctaccaaccagaaccttagtatttcaaatggtgctcaacctggtcacagcaatatgcagaaactgagtttggaagaacatattaagaccaggggaagacattctgttggttttagtagttcacgaaataagaagataacaagatctttgacagaggattttgaaagggaaaaagagcactcaactaacaagaatgtctttataaattgtctaagttctggcaaaagtgaaggggatgattctggtttcacagaagaccaaactcgtcgttctgttaagcagtcaacaaggaagctactccctaaatctttttcatctcactataaattttctaagccagttctacagagccaatccatttcattggtacaacagtctgaattctcattggaagttacacagtaccaagagagagaacctgtattagtaagagcttcgccatcctgttctgtggatgtaacagaacgggcaggaagctctttacaatctcctttgctttctgctgatcttaccacagctcagacaccttcagaatttttagccttgactgaagattctgtgtctgaaatggatgcattttctaaaagtggaagcatggcatcccactgtgacaactttggccacaatgattctacctctcagatgtccctcaattctgctgctgttacaaagacaacaacagaacttacgggaactgttccctgtgcaattatgtctcctgggaaatataggttagagggtcaatgtagcactgaatctaattcattaccggaaacctctgctgctaatcagaaggaagtgttattacaaattgctgaactacctgctacaagtgtgagccactcagagagtaacctaccagcagatagtgaaagagaagaaaatatagggttacaaaatggtgaaacaatgctggggacaaactccccaaggaaacttggattttatgagcaacataaagcaatagcggaacatgtaaaagggatccatcctatttcagattcaaagataatacctacttctggtgatcatcatatttttaacaaaacatcacatggatatgaagcaaatcctgccaaagttcttgccagtagtctcagtccatttcgtgaaggaagatttatagagaggagactgcgatcctcgtcagaaggcactgcagggagtagcagaatgattttgaaaccgaaagatggaaatatagaagaagttaatagtttaagaaagcaaagagcaggttcttcatcttcaaaaatgaacagtttggatgttttgaataatttgggatcttgtgaactggatgaagatgatctaatgcttgatcttgaatttttagaggaacagagtcttcacccttctgtttgccgggaggactcatatcactctgtcgtctcatgtgccgcagtagttcttactcctatggaaccaatgatagaaatgaagaaaagagaagaaccagaatttcctgagccttccaaacagaattggtgtgcttatgtacataccaggttatctcccacagtgatattggacaaccaggtcacttatgtcccaggtgggaaaggaccttgtggctggaccggtggatcctgtcctcagagatctcagaagatatccaatcctgtctataggatgcaacataaaattgtcacctcattggattggaggtgctgtcctggatacagtgggccgaaatgtcaactaagagcccaggaacagcaaagtttgatacacaccaaccaggctgaaagtcatacagctgttggcagaggagtagctgagcagcagcagcagcaaggctgtggtgacccagaagtgatgcaaaaaatgactgatcaggtgaactaccaggcaatgaaactgactcttctgcagaagaagattgacaatatttctttgactgtgaatgatgtaaggaacacttactcctccctagaaggaaaagtcagcgaagataaaagcagagaatttcaatctcttctaaaaggtctaaaatccaaaagcattaatgtactgataagagacatagtaagagaacaatttaaaatttttcaaaatgacatgcaagagactgtagcacagctcttcaagactgtatcaagtctatcagaggacctcgaaagcaccaggcaaataattcaaaaagttaatgaatctgtggtttcaatagcagcccagcaaaagtttgttttggtgcaagagaatcggcccactttgactgatatagtggaactaaggaatcacattgtgaatgtaaggcaagaaatgactcttacatgtgagaagcctattaaagaactagaagtaaagcagactcatttagaaggtgctctagaacaggaacactcaagaagcattctgtattatgaatccctcaataaaactctttctaaattgaaggaagtacatgagcagcttttatcaactgaacaggtatcagaccagaagaatgctccagctgctgagtcagttagcaataatgtcactgagtacatgtctactttacatgaaaatataaagaagcagagtttgatgatgctgcaaatgtttgaagatttgcacattcaagaaagcaagattaacaatctcaccgtctctttggagatggagaaagagtctctcagaggtgaatgtgaagacatgttatccaaatgcagaaatgattttaaatttcaacttaaggacacagaagagaatttacatgtgttaaatcaaacattggctgaagttctctttccaatggacaataagatggacaaaatgagtgagcaactaaatgatttgacttatgatatggagatccttcaacccttgcttgagcagggagcatcactcagacagacaatgacatatgaacaaccaaaggaagcaatagtgataaggaaaaagatagaaaatctgactagtgctgtcaatagtctaaattttattatcaaagaacttacaaaaagacacaacttacttagaaatgaagtacagggtcgtgatgatgccttagaaagacgtatcaatgaatatgccttagaaatggaagatggcctcaataagacaatgactattataaataatgctattgatttcattcaagataactatgccctaaaagagactttaagtactattaaggataatagtgagatccatcataaatgtacctccgatatggaaactattttgacatttattcctcagttccaccgtctgaatgattctattcagactttggtcaatgacaatcagagatataactttgttttgcaagtcgccaagacccttgcaggtattcccagagatgagaaactaaatcagtccaacttccaaaagatgtatcaaatgttcaatgaaaccacttcccaagtgagaaaataccagcaaaatatgagtcatttggaagaaaaactactcttaactaccaagatttccaaaaattttgagactcggttgcaagacattgagtctaaagttacccagacgctcataccttattatatttcagttaaaaaaggcagtgtagttacaaatgagagagatcaggctcttcaactgcaagtattaaattccagatttaaggcgttggaagcaaaatctatccatctttcaattaacttcttttcgcttaacaaaactctccacgaagttttaacaatgtgtcacaatgcttctacaagtgtgtcagaactgaatgctaccatccctaagtggataaaacattccctgccagatattcaacttcttcagaaaggtctaacagaatttgtggaaccaataattcaaataaaaactcaagctgccctatctaatttaacttgttgtatagatcgatcgttgcctggtagtctggcaaatgttgtcaagtctcagaagcaagtaaaatcattgccaaagaaaattaacgcacttaagaaaccaacggtaaatcttaccacagtcctgataggccggactcaaagaaacacggacaacataatatatcctgaggagtattcaagctgtagtcggcatccgtgccaaaatgggggcacgtgcataaatggaagaactagctttacctgtgcctgcagacatccttttactggtgacaactgcactatcaagcttgtggaagaaaatgctttagctccagatttttccaaaggatcttacagatatgcacccatggtggcattttttgcatctcatacgtatggaatgactatacctggtcctatcctgtttaataacttggatgtcaattatggagcttcatataccccaagaactggaaaatttagaattccgtatcttggagtatatgttttcaagtacaccatcgagtcatttagtgctcatatttctggatttttagtggttgatggaatagacaagcttgcatttgagtctgaaaatattaacagtgaaatacactgtgatagggttttaactggggatgccttattagaattaaattatgggcaggaagtctggttacgacttgcaaaaggaacaattccagccaagtttccccctgttactacatttagtggctatttattatatcgtacataa

SEQ ID NO: 687 - DNA, 2913 bp, Homo sapiens
atgcaacataaaattgtcacctcattggattggaggtgctgtcctggatacagtgggccgaaatgtcaactaagagcccaggaacagcaaagtttgatacacaccaaccaggctgaaagtcatacagctgttggcagaggagtagctgagcagcagcagcagcaaggctgtggtgacccagaagtgatgcaaaaaatgactgatcaggtgaactaccaggcaatgaaactgactcttctgcagaagaagattgacaatatttctttgactgtgaatgatgtaaggaacacttactcctccctagaaggaaaagtcagcgaagataaaagcagagaatttcaatctcttctaaaaggtctaaaatccaaaagcattaatgtactgataagagacatagtaagagaacaatttaaaatttttcaaaatgacatgcaagagactgtagcacagctcttcaagactgtatcaagtctatcagaggacctcgaaagcaccaggcaaataattcaaaaagttaatgaatctgtggtttcaatagcagcccagcaaaagtttgttttggtgcaagagaatcggcccactttgactgatatagtggaactaaggaatcacattgtgaatgtaaggcaagaaatgactcttacatgtgagaagcctattaaagaactagaagtaaagcagactcatttagaaggtgctctagaacaggaacactcaagaagcattctgtattatgaatccctcaataaaactctttctaaattgaaggaagtacatgagcagcttttatcaactgaacaggtatcagaccagaagaatgctccagctgctgagtcagttagcaataatgtcactgagtacatgtctactttacatgaaaatataaagaagcagagtttgatgatgctgcaaatgtttgaagatttgcacattcaagaaagcaagattaacaatctcaccgtctctttggagatggagaaagagtctctcagaggtgaatgtgaagacatgttatccaaatgcagaaatgattttaaatttcaacttaaggacacagaagagaatttacatgtgttaaatcaaacattggctgaagttctctttccaatggacaataagatggacaaaatgagtgagcaactaaatgatttgacttatgatatggagatccttcaacccttgcttgagcagggagcatcactcagacagacaatgacatatgaacaaccaaaggaagcaatagtgataaggaaaaagatagaaaatctgactagtgctgtcaatagtctaaattttattatcaaagaacttacaaaaagacacaacttacttagaaatgaagtacagggtcgtgatgatgccttagaaagacgtatcaatgaatatgccttagaaatggaagatggcctcaataagacaatgactattataaataatgctattgatttcattcaagataactatgccctaaaagagactttaagtactattaaggataatagtgagatccatcataaatgtacctccgatatggaaactattttgacatttattcctcagttccaccgtctgaatgattctattcagactttggtcaatgacaatcagagatataactttgttttgcaagtcgccaagacccttgcaggtattcccagagatgagaaactaaatcagtccaacttccaaaagatgtatcaaatgttcaatgaaaccacttcccaagtgagaaaataccagcaaaatatgagtcatttggaagaaaaactactcttaactaccaagatttccaaaaattttgagactcggttgcaagacattgagtctaaagttacccagacgctcataccttattatatttcagttaaaaaaggcagtgtagttacaaatgagagagatcaggctcttcaactgcaagtattaaattccagatttaaggcgttggaagcaaaatctatccatctttcaattaacttcttttcgcttaacaaaactctccacgaagttttaacaatgtgtcacaatgcttctacaagtgtgtcagaactgaatgctaccatccctaagtggataaaacattccctgccagatattcaacttcttcagaaaggtctaacagaatttgtggaaccaataattcaaataaaaactcaagctgccctatctaatttaacttgttgtatagatcgatcgttgcctggtagtctggcaaatgttgtcaagtctcagaagcaagtaaaatcattgccaaagaaaattaacgcacttaagaaaccaacggtaaatcttaccacagtcctgataggccggactcaaagaaacacggacaacataatatatcctgaggagtattcaagctgtagtcggcatccgtgccaaaatgggggcacgtgcataaatggaagaactagctttacctgtgcctgcagacatccttttactggtgacaactgcactatcaagcttgtggaagaaaatgctttagctccagatttttccaaaggatcttacagatatgcacccatggtggcattttttgcatctcatacgtatggaatgactatacctggtcctatcctgtttaataacttggatgtcaattatggagcttcatataccccaagaactggaaaatttagaattccgtatcttggagtatatgttttcaagtacaccatcgagtcatttagtgctcatatttctggatttttagtggttgatggaatagacaagcttgcatttgagtctgaaaatattaacagtgaaatacactgtgatagggttttaactggggatgccttattagaattaaattatgggcaggaagtctggttacgacttgcaaaaggaacaattccagccaagtttccccctgttactacatttagtggctatttattatatcgtacataa

SEQ ID NO: 688 - DNA, 1377 bp, Homo sapiens
atgatgcgcgcagtgtgggaggcgctggcggcgctggcggcggtggcgtgcctggtgggcgcggtgcgcggcgggcccgggctcagcatgttcgcgggccaggcggcgcagcccgatccctgctcggacgagaacggccacccgcgccgctgcatcccggactttgtcaatgcggccttcggcaaggacgtgcgcgtgtccagcacctgcggccggcccccggcgcgctactgcgtggtgagcgagcgcggcgaggagcggctgcgctcgtgccacctctgcaacgcgtccgaccccaagaaggcgcacccgcccgccttcctcaccgacctcaacaacccgcacaacctgacgtgctggcagtccgagaactacctgcagttcccgcacaacgtcacgctcacactgtccctcggcaagaagttcgaagtgacctacgtgagcctgcagttctgctcgccgcggcccgagtccatggccatctacaagtccatggactacgggcgcacgtgggtgcccttccagttctactccacgcagtgccgcaagatgtacaaccggccgcaccgcgcgcccatcaccaagcagaacgagcaggaggccgtgtgcaccgactcgcacaccgacatgcgcccgctctcgggcggcctcatcgccttcagcacgctggacgggcggccctcggcgcacgacttcgacaactcgcccgtgctgcaggactgggtcacggccacagacatccgcgtggccttcagccgcctgcacacgttcggcgacgagaacgaggacgactcggagctggcgcgcgactcgtacttctacgcggtgtccgacctgcaggtgggcggccggtgcaagtgcaacggccacgcggcccgctgcgtgcgcgaccgcgacgacagcctggtgtgcgactgcaggcacaacacggccggcccggagtgcgaccgctgcaagcccttccactacgaccggccctggcagcgcgccacagcccgcgaagccaacgagtgcgtggcctgtaactgcaacctgcatgcccggcgctgccgcttcaacatggagctctacaagctttcggggcgcaagagcggaggtgtctgcctcaactgtcgccacaacaccgccggccgccactgccattactgcaaggagggctactaccgcgacatgggcaagcccatcacccaccggaaggcctgcaaagagataattgacgaccttgccaacctagtggagaacacagatgaaaaacttcgcaatgaaaccaggcgggtaaacatggtggacagaaagtcagcctcttgtgggatgatcatggtgattttactgctgcttgtggctatcgtggttgttgcagtctggccgaccaactga

SEQ ID NO: 689 - DNA, 1581 bp, Homo sapiens
atgatgcgcgcagtgtgggaggcgctggcggcgctggcggcggtggcgtgcctggtgggcgcggtgcgcggcgggcccgggctcagcatgttcgcgggccaggcggcgcagcccgatccctgctcggacgagaacggccacccgcgccgctgcatcccggactttgtcaatgcggccttcggcaaggacgtgcgcgtgtccagcacctgcggccggcccccggcgcgctactgcgtggtgagcgagcgcggcgaggagcggctgcgctcgtgccacctctgcaacgcgtccgaccccaagaaggcgcacccgcccgccttcctcaccgacctcaacaacccgcacaacctgacgtgctggcagtccgagaactacctgcagttcccgcacaacgtcacgctcacactgtccctcggcaagaagttcgaagtgacctacgtgagcctgcagttctgctcgccgcggcccgagtccatggccatctacaagtccatggactacgggcgcacgtgggtgcccttccagttctactccacgcagtgccgcaagatgtacaaccggccgcaccgcgcgcccatcaccaagcagaacgagcaggaggccgtgtgcaccgactcgcacaccgacatgcgcccgctctcgggcggcctcatcgccttcagcacgctggacgggcggccctcggcgcacgacttcgacaactcgcccgtgctgcaggactgggtcacggccacagacatccgcgtggccttcagccgcctgcacacgttcggcgacgagaacgaggacgactcggagctggcgcgcgactcgtacttctacgcggtgtccgacctgcaggtgggcggccggtgcaagtgcaacggccacgcggcccgctgcgtgcgcgaccgcgacgacagcctggtgtgcgactgcaggcacaacacggccggcccggagtgcgaccgctgcaagcccttccactacgaccggccctggcagcgcgccacagcccgcgaagccaacgagtgcgtggcctgtaactgcaacctgcatgcccggcgctgccgcttcaacatggagctctacaagctttcggggcgcaagagcggaggtgtctgcctcaactgtcgccacaacaccgccggccgccactgccattactgcaaggagggctactaccgcgacatgggcaagcccatcacccaccggaaggcctgcaaagcctgtgattgccaccctgtgggtgctgctggcaaaacctgcaaccaaaccaccggccagtgtccctgcaaggacggcgtgacgggtatcacctgcaaccgctgcgccaaaggctaccagcagagccgctctcccatcgccccctgcataaagatccctgtagcgccgccgacgactgcagccagcagcgtggaggagcctgaagagataattgacgaccttgccaacctagtggagaacacagatgaaaaacttcgcaatgaaaccaggcgggtaaacatggtggacagaaagtcagcctcttgtgggatgatcatggtgattttactgctgcttgtggctatcgtggttgttgcagtctggccgaccaactga

SEQ ID NO: 690 - DNA, 1188 bp, Homo sapiens
atgatgcgcgcagtgtgggaggcgctggcggcgctggcggcggtggcgtgcctggtgggcgcggtgcgcggcgggcccgggctcagcatgttcgcgggccaggcggcgcagcccgatccctgctcggacgagaacggccacccgcgccgctgcatcccggactttgtcaatgcggccttcggcaaggacgtgcgcgtgtccagcacctgcggccggcccccggcgcgctactgcgtggtgagcgagcgcggcgaggagcggctgcgctcgtgccacctctgcaacgcgtccgaccccaagaaggcgcacccgcccgccttcctcaccgacctcaacaacccgcacaacctgacgtgctggcagtccgagaactacctgcagttcccgcacaacgtcacgctcacactgtccctcggcaagaagttcgaagtgacctacgtgagcctgcagttctgctcgccgcggcccgagtccatggccatctacaagtccatggactacgggcgcacgtgggtgcccttccagttctactccacgcagtgccgcaagatgtacaaccggccgcaccgcgcgcccatcaccaagcagaacgagcaggaggccgtgtgcaccgactcgcacaccgacatgcgcccgctctcgggcggcctcatcgccttcagcacgctggacgggcggccctcggcgcacgacttcgacaactcgcccgtgctgcaggactgggtcacggccacagacatccgcgtggccttcagccgcctgcacacgttcggcgacgagaacgaggacgactcggagctggcgcgcgactcgtacttctacgcggtgtccgacctgcaggtgggcggccggtgcaagtgcaacggccacgcggcccgctgcgtgcgcgaccgcgacgacagcctggtgtgcgactgcaggcacaacacggccggcccggagtgcgaccgctgcaagcccttccactacgaccggccctggcagcgcgccacagcccgcgaagccaacgagtgcgtggagataattgacgaccttgccaacctagtggagaacacagatgaaaaacttcgcaatgaaaccaggcgggtaaacatggtggacagaaagtcagcctcttgtgggatgatcatggtgattttactgctgcttgtggctatcgtggttgttgcagtctggccgaccaactga

SEQ ID NO: 691 - DNA, 1656 bp, Homo sapiens
atgatgcgcgcagtgtgggaggcgctggcggcgctggcggcggtggcgtgcctggtgggcgcggtgcgcggcgggcccgggctcagcatgttcgcgggccaggcggcgcagcccgatccctgctcggacgagaacggccacccgcgccgctgcatcccggactttgtcaatgcggccttcggcaaggacgtgcgcgtgtccagcacctgcggccggcccccggcgcgctactgcgtggtgagcgagcgcggcgaggagcggctgcgctcgtgccacctctgcaacgcgtccgaccccaagaaggcgcacccgcccgccttcctcaccgacctcaacaacccgcacaacctgacgtgctggcagtccgagaactacctgcagttcccgcacaacgtcacgctcacactgtccctcggcaagaagttcgaagtgacctacgtgagcctgcagttctgctcgccgcggcccgagtccatggccatctacaagtccatggactacgggcgcacgtgggtgcccttccagttctactccacgcagtgccgcaagatgtacaaccggccgcaccgcgcgcccatcaccaagcagaacgagcaggaggccgtgtgcaccgactcgcacaccgacatgcgcccgctctcgggcggcctcatcgccttcagcacgctggacgggcggccctcggcgcacgacttcgacaactcgcccgtgctgcaggactgggtcacggccacagacatccgcgtggccttcagccgcctgcacacgttcggcgacgagaacgaggacgactcggagctggcgcgcgactcgtacttctacgcggtgtccgacctgcaggtgggcggccggtgcaagtgcaacggccacgcggcccgctgcgtgcgcgaccgcgacgacagcctggtgtgcgactgcaggcacaacacggccggcccggagtgcgaccgctgcaagcccttccactacgaccggccctggcagcgcgccacagcccgcgaagccaacgagtgcgtggcctgtaactgcaacctgcatgcccggcgctgccgcttcaacatggagctctacaagctttcggggcgcaagagcggaggtgtctgcctcaactgtcgccacaacaccgccggccgccactgccattactgcaaggagggctactaccgcgacatgggcaagcccatcacccaccggaaggcctgcaaagcctgtgattgccaccctgtgggtgctgctggcaaaacctgcaaccaaaccaccggccagtgtccctgcaaggacggcgtgacgggtatcacctgcaaccgctgcgccaaaggctaccagcagagccgctctcccatcgccccctgcataaagatccctgtagcgccgccgacgactgcagccagcagcgtggaggagcctgaagactgcgattcctactgcaaggcctccaaggggaagctgaagattaacatgaaaaagtactgcaagaaggactatgagataattgacgaccttgccaacctagtggagaacacagatgaaaaacttcgcaatgaaaccaggcgggtaaacatggtggacagaaagtcagcctcttgtgggatgatcatggtgattttactgctgcttgtggctatcgtggttgttgcagtctggccgaccaactga

SEQ ID NO: 692 - DNA, 1479 bp, Homo sapiens
atgatgcgcgcagtgtgggaggcgctggcggcgctggcggcggtggcgtgcctggtgggcgcggtgcgcggcgggcccgggctcagcatgttcgcgggccaggcggcgcagcccgatccctgctcggacgagaacggccacccgcgccgctgcatcccggactttgtcaatgcggccttcggcaaggacgtgcgcgtgtccagcacctgcggccggcccccggcgcgctactgcgtggtgagcgagcgcggcgaggagcggctgcgctcgtgccacctctgcaacgcgtccgaccccaagaaggcgcacccgcccgccttcctcaccgacctcaacaacccgcacaacctgacgtgctggcagtccgagaactacctgcagttcccgcacaacgtcacgctcacactgtccctcggcaagaagttcgaagtgacctacgtgagcctgcagttctgctcgccgcggcccgagtccatggccatctacaagtccatggactacgggcgcacgtgggtgcccttccagttctactccacgcagtgccgcaagatgtacaaccggccgcaccgcgcgcccatcaccaagcagaacgagcaggaggccgtgtgcaccgactcgcacaccgacatgcgcccgctctcgggcggcctcatcgccttcagcacgctggacgggcggccctcggcgcacgacttcgacaactcgcccgtgctgcaggactgggtcacggccacagacatccgcgtggccttcagccgcctgcacacgttcggcgacgagaacgaggacgactcggagctggcgcgcgactcgtacttctacgcggtgtccgacctgcaggtgggcggccggtgcaagtgcaacggccacgcggcccgctgcgtgcgcgaccgcgacgacagcctggtgtgcgactgcaggcacaacacggccggcccggagtgcgaccgctgcaagcccttccactacgaccggccctggcagcgcgccacagcccgcgaagccaacgagtgcgtggcctgtaactgcaacctgcatgcccggcgctgccgcttcaacatggagctctacaagctttcggggcgcaagagcggaggtgtctgcctcaactgtcgccacaacaccgccggccgccactgccattactgcaaggagggctactaccgcgacatgggcaagcccatcacccaccggaaggcctgcaaagcctgtgattgccaccctgtgggtgctgctggcaaaacctgcaaccaaaccaccggccagtgtccctgcaaggacggcgtgacgggtatcacctgcaaccgctgcgccaaaggctaccagcagagccgctctcccatcgccccctgcataaagatccctgtagcgccgccgacgactgcagccagcagcgtggaggagcctgaagggatgatcatggtgattttactgctgcttgtggctatcgtggttgttgcagtctggccgaccaactga

SEQ ID NO: 693 - DNA, 1527 bp, Homo sapiens
atgatgcgcgcagtgtgggaggcgctggcggcgctggcggcggtggcgtgcctggtgggcgcggtgcgcggcgggcccgggctcagcatgttcgcgggccaggcggcgcagcccgatccctgctcggacgagaacggccacccgcgccgctgcatcccggactttgtcaatgcggccttcggcaaggacgtgcgcgtgtccagcacctgcggccggcccccggcgcgctactgcgtggtgagcgagcgcggcgaggagcggctgcgctcgtgccacctctgcaacgcgtccgaccccaagaaggcgcacccgcccgccttcctcaccgacctcaacaacccgcacaacctgacgtgctggcagtccgagaactacctgcagttcccgcacaacgtcacgctcacactgtccctcggcaagaagttcgaagtgacctacgtgagcctgcagttctgctcgccgcggcccgagtccatggccatctacaagtccatggactacgggcgcacgtgggtgcccttccagttctactccacgcagtgccgcaagatgtacaaccggccgcaccgcgcgcccatcaccaagcagaacgagcaggaggccgtgtgcaccgactcgcacaccgacatgcgcccgctctcgggcggcctcatcgccttcagcacgctggacgggcggccctcggcgcacgacttcgacaactcgcccgtgctgcaggactgggtcacggccacagacatccgcgtggccttcagccgcctgcacacgttcggcgacgagaacgaggacgactcggagctggcgcgcgactcgtacttctacgcggtgtccgacctgcaggtgggcggccggtgcaagtgcaacggccacgcggcccgctgcgtgcgcgaccgcgacgacagcctggtgtgcgactgcaggcacaacacggccggcccggagtgcgaccgctgcaagcccttccactacgaccggccctggcagcgcgccacagcccgcgaagccaacgagtgcgtggcctgtaactgcaacctgcatgcccggcgctgccgcttcaacatggagctctacaagctttcggggcgcaagagcggaggtgtctgcctcaactgtcgccacaacaccgccggccgccactgccattactgcaaggagggctactaccgcgacatgggcaagcccatcacccaccggaaggcctgcaaagcctgtgattgccaccctgtgggtgctgctggcaaaacctgcaaccaaaccaccggccagtgtccctgcaaggacggcgtgacgggtatcacctgcaaccgctgcgccaaaggctaccagcagagccgctctcccatcgccccctgcataaagataattgacgaccttgccaacctagtggagaacacagatgaaaaacttcgcaatgaaaccaggcgggtaaacatggtggacagaaagtcagcctcttgtgggatgatcatggtgattttactgctgcttgtggctatcgtggttgttgcagtctggccgaccaactga

SEQ ID NO: 694 - DNA, 1086 bp, Homo sapiens
atgatgcgcgcagtgtgggaggcgctggcggcgctggcggcggtggcgtgcctggtgggcgcggtgcgcggcgggcccgggctcagcatgttcgcgggccaggcggcgcagcccgatccctgctcggacgagaacggccacccgcgccgctgcatcccggactttgtcaatgcggccttcggcaaggacgtgcgcgtgtccagcacctgcggccggcccccggcgcgctactgcgtggtgagcgagcgcggcgaggagcggctgcgctcgtgccacctctgcaacgcgtccgaccccaagaaggcgcacccgcccgccttcctcaccgacctcaacaacccgcacaacctgacgtgctggcagtccgagaactacctgcagttcccgcacaacgtcacgctcacactgtccctcggcaagaagttcgaagtgacctacgtgagcctgcagttctgctcgccgcggcccgagtccatggccatctacaagtccatggactacgggcgcacgtgggtgcccttccagttctactccacgcagtgccgcaagatgtacaaccggccgcaccgcgcgcccatcaccaagcagaacgagcaggaggccgtgtgcaccgactcgcacaccgacatgcgcccgctctcgggcggcctcatcgccttcagcacgctggacgggcggccctcggcgcacgacttcgacaactcgcccgtgctgcaggactgggtcacggccacagacatccgcgtggccttcagccgcctgcacacgttcggcgacgagaacgaggacgactcggagctggcgcgcgactcgtacttctacgcggtgtccgacctgcaggtgggcggccggtgcaagtgcaacggccacgcggcccgctgcgtgcgcgaccgcgacgacagcctggtgtgcgactgcaggcacaacacggccggcccggagtgcgaccgctgcaagcccttccactacgaccggccctggcagcgcgccacagcccgcgaagccaacgagtgcgtggggatgatcatggtgattttactgctgcttgtggctatcgtggttgttgcagtctggccgaccaactga

SEQ ID NO: 695 - DNA, 1275 bp, Homo sapiens
atgatgcgcgcagtgtgggaggcgctggcggcgctggcggcggtggcgtgcctggtgggcgcggtgcgcggcgggcccgggctcagcatgttcgcgggccaggcggcgcagcccgatccctgctcggacgagaacggccacccgcgccgctgcatcccggactttgtcaatgcggccttcggcaaggacgtgcgcgtgtccagcacctgcggccggcccccggcgcgctactgcgtggtgagcgagcgcggcgaggagcggctgcgctcgtgccacctctgcaacgcgtccgaccccaagaaggcgcacccgcccgccttcctcaccgacctcaacaacccgcacaacctgacgtgctggcagtccgagaactacctgcagttcccgcacaacgtcacgctcacactgtccctcggcaagaagttcgaagtgacctacgtgagcctgcagttctgctcgccgcggcccgagtccatggccatctacaagtccatggactacgggcgcacgtgggtgcccttccagttctactccacgcagtgccgcaagatgtacaaccggccgcaccgcgcgcccatcaccaagcagaacgagcaggaggccgtgtgcaccgactcgcacaccgacatgcgcccgctctcgggcggcctcatcgccttcagcacgctggacgggcggccctcggcgcacgacttcgacaactcgcccgtgctgcaggactgggtcacggccacagacatccgcgtggccttcagccgcctgcacacgttcggcgacgagaacgaggacgactcggagctggcgcgcgactcgtacttctacgcggtgtccgacctgcaggtgggcggccggtgcaagtgcaacggccacgcggcccgctgcgtgcgcgaccgcgacgacagcctggtgtgcgactgcaggcacaacacggccggcccggagtgcgaccgctgcaagcccttccactacgaccggccctggcagcgcgccacagcccgcgaagccaacgagtgcgtggcctgtaactgcaacctgcatgcccggcgctgccgcttcaacatggagctctacaagctttcggggcgcaagagcggaggtgtctgcctcaactgtcgccacaacaccgccggccgccactgccattactgcaaggagggctactaccgcgacatgggcaagcccatcacccaccggaaggcctgcaaagggatgatcatggtgattttactgctgcttgtggctatcgtggttgttgcagtctggccgaccaactga

SEQ ID NO: 696 - DNA, 1281 bp, Homo sapiens
atgatgcgcgcagtgtgggaggcgctggcggcgctggcggcggtggcgtgcctggtgggcgcggtgcgcggcgggcccgggctcagcatgttcgcgggccaggcggcgcagcccgatccctgctcggacgagaacggccacccgcgccgctgcatcccggactttgtcaatgcggccttcggcaaggacgtgcgcgtgtccagcacctgcggccggcccccggcgcgctactgcgtggtgagcgagcgcggcgaggagcggctgcgctcgtgccacctctgcaacgcgtccgaccccaagaaggcgcacccgcccgccttcctcaccgacctcaacaacccgcacaacctgacgtgctggcagtccgagaactacctgcagttcccgcacaacgtcacgctcacactgtccctcggcaagaagttcgaagtgacctacgtgagcctgcagttctgctcgccgcggcccgagtccatggccatctacaagtccatggactacgggcgcacgtgggtgcccttccagttctactccacgcagtgccgcaagatgtacaaccggccgcaccgcgcgcccatcaccaagcagaacgagcaggaggccgtgtgcaccgactcgcacaccgacatgcgcccgctctcgggcggcctcatcgccttcagcacgctggacgggcggccctcggcgcacgacttcgacaactcgcccgtgctgcaggactgggtcacggccacagacatccgcgtggccttcagccgcctgcacacgttcggcgacgagaacgaggacgactcggagctggcgcgcgactcgtacttctacgcggtgtccgacctgcaggtgggcggccggtgcaagtgcaacggccacgcggcccgctgcgtgcgcgaccgcgacgacagcctggtgtgcgactgcaggcacaacacggccggcccggagtgcgaccgctgcaagcccttccactacgaccggccctggcagcgcgccacagcccgcgaagccaacgagtgcgtggaacaggacgcaggccttgatgccctttcctctatcataagtcgccaaaaacaaatggggcaggaaattgggaatgaattggatgaacaaaatgagataattgacgaccttgccaacctagtggagaacacagatgaaaaacttcgcaatgaaaccaggcgggtaaacatggtggacagaaagtcagcctcttgtgggatgatcatggtgattttactgctgcttgtggctatcgtggttgttgcagtctggccgaccaactga

SEQ ID NO: 697 - DNA, 1020 bp, Homo sapiens
atggacaagttttggtggcacgcagcctggggactctgcctcgtgccgctgagcctggcgcagatcgatttgaatataacctgccgctttgcaggtgtattccacgtggagaaaaatggtcgctacagcatctctcggacggaggccgctgacctctgcaaggctttcaatagcaccttgcccacaatggcccagatggagaaagctctgagcatcggatttgagacctgcaggtatgggttcatagaagggcacgtggtgattccccggatccaccccaactccatctgtgcagcaaacaacacaggggtgtacatcctcacatccaacacctcccagtatgacacatattgcttcaatgcttcagctccacctgaagaagattgtacatcagtcacagacctgcccaatgcctttgatggaccaattaccataagtgaagcggtgagtgctggagatgcattatgtgaaattgagactgacaaagctgtggttaccttagatgcaagtgatgatggaatcttggccaaaatcgtgcaaatgccagatgttaatgtaagctgggatggagagggcccaaagcaactgccatttattgacatttcagtggctgtggcaacagataaaggcttacttactccaatcataaaagatgctgctgctaaaggtatccaggaaattgctgactctgtaaaggctctatcaaagaaagcaagagatggaaaattgttgcctgaagaataccaaggaggatcttttagtatttccaacttggggatgtttggcatcgacgaatttactgcagtgattaaccctcctcaggcctgcattttggcggttgggaggttccgacctgtgctgaagctcactgaggatgaagagggaaatgccaaactgcagcagcgccagctcataacagtcacaatgtcaagtgacagtcgagtggttgatgacgaactggcaaccaggtttcttaaaagttttaaagcaaacctagagaatcctatccgacttgcctag

SEQ ID NO: 698 - DNA, 1413 bp, Homo sapiens
atggacaagttttggtggcacgcagcctggggactctgcctcgtgccgctgagcctggcgcagatcggtgatcccattaagatactaatgccatcactgtctcctacaatggaagaaggaaacattgtgaaatggctgaaaaaggaaggtgaagcggtgagtgctggagatgcattatgtgaaattgagactgacaaagctgtggttaccttagatgcaagtgatgatggaatcttggccaaaatcgtggttgaagaaggaagtaaaaatatacggctaggttcactaattggtttgatagtagaagaaggagaagattggaaacatgttgaaattcccaaagacgtaggtcctccaccaccagtttcaaaaccttcagagcctcgcccctcaccagaaccacagatttccatccctgtcaagaaggaacacatacccgggacactacggttccgtttaagtccagctgcccgcaatattctggaaaaacactcactggatgctagccagggcacagccactggccctcgggggatattcactaaagaggatgctctcaaacttgtccagttgaaacaaacgggcaagattaccgagtccagaccaactccagcccccacagccactcccacagcaccttcgcccctacaggccacagctggaccatcttatccccggcctgtgatcccaccagtatcaactcctggacaacccaatgcagtgggcacattcactgaaatccccgccagcaatattcgaagagttattgccaagagattaactgaatctaaaagtactgtacctcatgcatatgctactgctgactgtgaccttggagctgttttaaaagttaggcaagatctggtcaaagatgacattaaagtatcagtaaatgattttatcatcaaggcagcagctgttacccttaaacaaatgccagatgttaatgtaagctgggatggagagggcccaaagcaactgccatttattgacatttcagtggctgtggcaacagataaaggcttacttactccaatcataaaagatgctgctgctaaaggtatccaggaaattgctgactctgtaaaggctctatcaaagaaagcaagagatggaaaattgttgcctgaagaataccaaggaggatcttttagtatttccaacttggggatgtttggcatcgacgaatttactgcagtgattaaccctcctcaggcctgcattttggcggttgggaggttccgacctgtgctgaagctcactgaggatgaagagggaaatgccaaactgcagcagcgccagctcataacagtcacaatgtcaagtgacagtcgagtggttgatgacgaactggcaaccaggtttcttaaaagttttaaagcaaacctagagaatcctatccgacttgcctag

SEQ ID NO: 699 - DNA, 1701 bp, Homo sapiens
atggacaagttttggtggcacgcagcctggggactctgcctcgtgccgctgagcctggcgcagatcgatttgaatataacctgccgctttgcaggtgtattccacgtggagaaaaatggtcgctacagcatctctcggacggaggccgctgacctctgcaaggctttcaatagcaccttgcccacaatggcccagatggagaaagctctgagcatcggatttgagacctgcaggtatgggttcatagaagggcacgtggtgattccccggatccaccccaactccatctgtgcagcaaacaacacaggggtgtacatcctcacatccaacacctcccagtatgacacatattgcttcaatgcttcagctccacctgaagaagattgtacatcagtcacagacctgcccaatgcctttgatggaccaattaccataagtgaagcggtgagtgctggagatgcattatgtgaaattgagactgacaaagctgtggttaccttagatgcaagtgatgatggaatcttggccaaaatcgtggttgaagaaggaagtaaaaatatacggctaggttcactaattggtttgatagtagaagaaggagaagattggaaacatgttgaaattcccaaagacgtaggtcctccaccaccagtttcaaaaccttcagagcctcgcccctcaccagaaccacagatttccatccctgtcaagaaggaacacatacccgggacactacggttccgtttaagtccagctgcccgcaatattctggaaaaacactcactggatgctagccagggcacagccactggccctcgggggatattcactaaagaggatgctctcaaacttgtccagttgaaacaaacgggcaagattaccgagtccagaccaactccagcccccacagccactcccacagcaccttcgcccctacaggccacagctggaccatcttatccccggcctgtgatcccaccagtatcaactcctggacaacccaatgcagtgggcacattcactgaaatccccgccagcaatattcgaagagttattgccaagagattaactgaatctaaaagtactgtacctcatgcatatgctactgctgactgtgaccttggagctgttttaaaagttaggcaagatctggtcaaagatgacattaaagtatcagtaaatgattttatcatcaaggcagcagctgttacccttaaacaaatgccagatgttaatgtaagctgggatggagagggcccaaagcaactgccatttattgacatttcagtggctgtggcaacagataaaggcttacttactccaatcataaaagatgctgctgctaaaggtatccaggaaattgctgactctgtaaaggctctatcaaagaaagcaagagatggaaaattgttgcctgaagaataccaaggaggatcttttagtatttccaacttggggatgtttggcatcgacgaatttactgcagtgattaaccctcctcaggcctgcattttggcggttgggaggttccgacctgtgctgaagctcactgaggatgaagagggaaatgccaaactgcagcagcgccagctcataacagtcacaatgtcaagtgacagtcgagtggttgatgacgaactggcaaccaggtttcttaaaagttttaaagcaaacctagagaatcctatccgacttgcctag

SEQ ID NO: 700 - DNA, 585 bp, Homo sapiens
atggacaagttttggtggcacgcagcctggggactctgcctcgtgccgctgagcctggcgcagatcgatttgaatataacctgccgctttgcaggtgtattccacgtggagaaaaatggtcgctacagcatctctcggacggaggccgctgacctctgcaaggctttcaatagcaccttgcccacaatggcccagatggagaaagctctgagcatcggatttgagacctgcagtttgcattgcagtcaacagtcgaagaaggctctatcaaagaaagcaagagatggaaaattgttgcctgaagaataccaaggaggatcttttagtatttccaacttggggatgtttggcatcgacgaatttactgcagtgattaaccctcctcaggcctgcattttggcggttgggaggttccgacctgtgctgaagctcactgaggatgaagagggaaatgccaaactgcagcagcgccagctcataacagtcacaatgtcaagtgacagtcgagtggttgatgacgaactggcaaccaggtttcttaaaagttttaaagcaaacctagagaatcctatccgacttgcctag

SEQ ID NO: 701 - DNA, 1098 bp, Homo sapiens
atggacaagttttggtggcacgcagcctggggactctgcctcgtgccgctgagcctggcgcagatcgatttgaatataacctgccgctttgcaggtgtattccacgtggagaaaaatggtcgctacagcatctctcggacggaggccgctgacctctgcaaggctttcaatagcaccttgcccacaatggcccagatggagaaagctctgagcatcggatttgagacctgcagggatgctctcaaacttgtccagttgaaacaaacgggcaagattaccgagtccagaccaactccagcccccacagccactcccacagcaccttcgcccctacaggccacagctggaccatcttatccccggcctgtgatcccaccagtatcaactcctggacaacccaatgcagtgggcacattcactgaaatccccgccagcaatattcgaagagttattgccaagagattaactgaatctaaaagtactgtacctcatgcatatgctactgctgactgtgaccttggagctgttttaaaagttaggcaagatctggtcaaagatgacattaaagtatcagtaaatgattttatcatcaaggcagcagctgttacccttaaacaaatgccagatgttaatgtaagctgggatggagagggcccaaagcaactgccatttattgacatttcagtggctgtggcaacagataaaggcttacttactccaatcataaaagatgctgctgctaaaggtatccaggaaattgctgactctgtaaaggctctatcaaagaaagcaagagatggaaaattgttgcctgaagaataccaaggaggatcttttagtatttccaacttggggatgtttggcatcgacgaatttactgcagtgattaaccctcctcaggcctgcattttggcggttgggaggttccgacctgtgctgaagctcactgaggatgaagagggaaatgccaaactgcagcagcgccagctcataacagtcacaatgtcaagtgacagtcgagtggttgatgacgaactggcaaccaggtttcttaaaagttttaaagcaaacctagagaatcctatccgacttgcctag

SEQ ID NO: 702 - DNA, 1332 bp, Homo sapiens
atggacaagttttggtggcacgcagcctggggactctgcctcgtgccgctgagcctggcgcagatcgatttgaatataacctgccgctttgcaggtgtattccacgtggagaaaaatggtcgctacagcatctctcggacggaggccgctgacctctgcaaggctttcaatagcaccttgcccacaatggcccagatggagaaagctctgagcatcggatttgagacctgcaggtatgggttcatagaagggcacgtggtgattccccggatccaccccaactccatctgtgcagcaaacaacacaggggtgtacatcctcacatccaacacctcccagtatgacacatattgcttcaatgcttcagctccacctgaagaagattgtacatcagtcacagacctgcccaatgcctttgatggaccaattaccataactattgttaaccgtgatggcacccgctatgtccagaaaggagaatacagaacgaatcctgaagacatctaccccagcaaccctactgatgatgacgtgagcagcggctcctccagtgaaaggagcagcacttcaggaggttacatcttttacaccttttctactgtacaccccatcccagacgaagacagtccctggatcaccgacagcacagacagaatccctgctaccagtgatcccattaagatactaatgccatcactgtctcctacaatggaagaaggaaacattgtgaaatggctgaaaaaggaaggtgaagcggtgagtgctggagatgcattatgtgaaattgagactgacaaagctgtggttaccttagatgcaagtgatgatggaatcttggccaaaatcgtgcaaatgccagatgttaatgtaagctgggatggagagggcccaaagcaactgccatttattgacatttcagtggctgtggcaacagataaaggcttacttactccaatcataaaagatgctgctgctaaaggtatccaggaaattgctgactctgtaaaggctctatcaaagaaagcaagagatggaaaattgttgcctgaagaataccaaggaggatcttttagtatttccaacttggggatgtttggcatcgacgaatttactgcagtgattaaccctcctcaggcctgcattttggcggttgggaggttccgacctgtgctgaagctcactgaggatgaagagggaaatgccaaactgcagcagcgccagctcataacagtcacaatgtcaagtgacagtcgagtggttgatgacgaactggcaaccaggtttcttaaaagttttaaagcaaacctagagaatcctatccgacttgcctag

SEQ ID NO: 703 - DNA, 2013 bp, Homo sapiens
atggacaagttttggtggcacgcagcctggggactctgcctcgtgccgctgagcctggcgcagatcgatttgaatataacctgccgctttgcaggtgtattccacgtggagaaaaatggtcgctacagcatctctcggacggaggccgctgacctctgcaaggctttcaatagcaccttgcccacaatggcccagatggagaaagctctgagcatcggatttgagacctgcaggtatgggttcatagaagggcacgtggtgattccccggatccaccccaactccatctgtgcagcaaacaacacaggggtgtacatcctcacatccaacacctcccagtatgacacatattgcttcaatgcttcagctccacctgaagaagattgtacatcagtcacagacctgcccaatgcctttgatggaccaattaccataactattgttaaccgtgatggcacccgctatgtccagaaaggagaatacagaacgaatcctgaagacatctaccccagcaaccctactgatgatgacgtgagcagcggctcctccagtgaaaggagcagcacttcaggaggttacatcttttacaccttttctactgtacaccccatcccagacgaagacagtccctggatcaccgacagcacagacagaatccctgctaccagtgatcccattaagatactaatgccatcactgtctcctacaatggaagaaggaaacattgtgaaatggctgaaaaaggaaggtgaagcggtgagtgctggagatgcattatgtgaaattgagactgacaaagctgtggttaccttagatgcaagtgatgatggaatcttggccaaaatcgtggttgaagaaggaagtaaaaatatacggctaggttcactaattggtttgatagtagaagaaggagaagattggaaacatgttgaaattcccaaagacgtaggtcctccaccaccagtttcaaaaccttcagagcctcgcccctcaccagaaccacagatttccatccctgtcaagaaggaacacatacccgggacactacggttccgtttaagtccagctgcccgcaatattctggaaaaacactcactggatgctagccagggcacagccactggccctcgggggatattcactaaagaggatgctctcaaacttgtccagttgaaacaaacgggcaagattaccgagtccagaccaactccagcccccacagccactcccacagcaccttcgcccctacaggccacagctggaccatcttatccccggcctgtgatcccaccagtatcaactcctggacaacccaatgcagtgggcacattcactgaaatccccgccagcaatattcgaagagttattgccaagagattaactgaatctaaaagtactgtacctcatgcatatgctactgctgactgtgaccttggagctgttttaaaagttaggcaagatctggtcaaagatgacattaaagtatcagtaaatgattttatcatcaaggcagcagctgttacccttaaacaaatgccagatgttaatgtaagctgggatggagagggcccaaagcaactgccatttattgacatttcagtggctgtggcaacagataaaggcttacttactccaatcataaaagatgctgctgctaaaggtatccaggaaattgctgactctgtaaaggctctatcaaagaaagcaagagatggaaaattgttgcctgaagaataccaaggaggatcttttagtatttccaacttggggatgtttggcatcgacgaatttactgcagtgattaaccctcctcaggcctgcattttggcggttgggaggttccgacctgtgctgaagctcactgaggatgaagagggaaatgccaaactgcagcagcgccagctcataacagtcacaatgtcaagtgacagtcgagtggttgatgacgaactggcaaccaggtttcttaaaagttttaaagcaaacctagagaatcctatccgacttgcctag

SEQ ID NO: 704 - DNA, 609 bp, Homo sapiens
atggacaagttttggtggcacgcagcctggggactctgcctcgtgccgctgagcctggcgcagatcgatgacattaaagtatcagtaaatgattttatcatcaaggcagcagctgttacccttaaacaaatgccagatgttaatgtaagctgggatggagagggcccaaagcaactgccatttattgacatttcagtggctgtggcaacagataaaggcttacttactccaatcataaaagatgctgctgctaaaggtatccaggaaattgctgactctgtaaaggctctatcaaagaaagcaagagatggaaaattgttgcctgaagaataccaaggaggatcttttagtatttccaacttggggatgtttggcatcgacgaatttactgcagtgattaaccctcctcaggcctgcattttggcggttgggaggttccgacctgtgctgaagctcactgaggatgaagagggaaatgccaaactgcagcagcgccagctcataacagtcacaatgtcaagtgacagtcgagtggttgatgacgaactggcaaccaggtttcttaaaagttttaaagcaaacctagagaatcctatccgacttgcctag

SEQ ID NO: 705 - DNA, 732 bp, Homo sapiens
atggacaagttttggtggcacgcagcctggggactctgcctcgtgccgctgagcctggcgcagatcggtgatcccattaagatactaatgccatcactgtctcctacaatggaagaaggaaacattgtgaaatggctgaaaaaggaaggtgaagcggtgagtgctggagatgcattatgtgaaattgagactgacaaagctgtggttaccttagatgcaagtgatgatggaatcttggccaaaatcgtgcaaatgccagatgttaatgtaagctgggatggagagggcccaaagcaactgccatttattgacatttcagtggctgtggcaacagataaaggcttacttactccaatcataaaagatgctgctgctaaaggtatccaggaaattgctgactctgtaaaggctctatcaaagaaagcaagagatggaaaattgttgcctgaagaataccaaggaggatcttttagtatttccaacttggggatgtttggcatcgacgaatttactgcagtgattaaccctcctcaggcctgcattttggcggttgggaggttccgacctgtgctgaagctcactgaggatgaagagggaaatgccaaactgcagcagcgccagctcataacagtcacaatgtcaagtgacagtcgagtggttgatgacgaactggcaaccaggtttcttaaaagttttaaagcaaacctagagaatcctatccgacttgcctag

SEQ ID NO: 706 - DNA, 1080 bp, Homo sapiens
atgacccaggggaagaagaagaaacgggccgcgaaccgcagtatcatgctggccaagaagatcatcattaaggacggaggcacggcaaatgaagataaaacaatgttcgccaacctaaaatacgtttccctgggaattttggtctttcagactaccagtttggttctaacaatgcgttattccagaactttaaaagaagaaggacctcgttatctatcttctacagcagtggttgttgctgaacttttgaagataatggcctgcattttattggtctacaaagacagcaaatgtagtctaagagcactgaatcgagtactacatgatgaaattcttaataaacctatggaaacacttaaacttgctattccatcagggatctatactcttcagaataatttactgtatgtggcactatcaaatctagatgcagctacttatcaggtcacgtatcagttaaaaattcttacaacagcattattttctgtgtctatgcttagtaaaaaattgggtgtataccagtggctgtccctagtaattttgatgacaggagttgcttttgtacagtggccctcagattctcagcttgattctaaggaactttcagctggttctcaatttgtaggactcatggcagttctcacagcatgtttttcaagtggctttgctggggtttactttgagaaaatcttaaaagaaacaaaacaatcagtgtggataagaaatattcagcttggtttctttggaagtatatttggattaatgggtgtatacatttatgatggagaactggtatcaaagaatggattttttcagggatataaccgactgacctggatagtagttgttcttcaggcacttggaggccttgtaatagctgctgttattaagtatgcagataatattttaaaaggatttgcaacctctttatcgataatattatcaacattgatctcctatttttggcttcaagattttgtgccaaccagtgtctttttccttggagccatccttgtaataacagctacttttttgtatggttatgatcccaaacctgcaggaaatcccactaaagcatag

SEQ ID NO: 707 - DNA, 405 bp, Homo sapiens
atgacccaggggaagaagaagaaacgggccgcgaaccgcagtatcatgctggccaagaagatcatcattaaggacggaggcacggtcacgtatcagttaaaaattcttacaacagcattattttctgtgtctatgcttagtaaaaaattgggtgtataccagtggctgtccctagtaattttgatgacaggagttgcttttgtacagtggccctcagattctcagcttgattctaaggaactttcagctggttctcaatttgtaggactcatggcagttctcacagcatgtttttcaagtggctttgctggggtttactttgagaaaatcttaaaagaaacaaaacaatcagtgtggataagaaatattcagcttgtgtctttttccttggagccatccttgtaa

SEQ ID NO: 708 - DNA, 720 bp, Homo sapiens
atgacccaggggaagaagaagaaacgggccgcgaaccgcagtatcatgctggccaagaagatcatcattaaggacggaggcacggtcacgtatcagttaaaaattcttacaacagcattattttctgtgtctatgcttagtaaaaaattgggtgtataccagtggctgtccctagtaattttgatgacaggagttgcttttgtacagtggccctcagattctcagcttgattctaaggaactttcagctggttctcaatttgtaggactcatggcagttctcacagcatgtttttcaagtggctttgctggggtttactttgagaaaatcttaaaagaaacaaaacaatcagtgtggataagaaatattcagcttggtttctttggaagtatatttggattaatgggtgtatacatttatgatggagaactggtatcaaagaatggattttttcagggatataaccgactgacctggatagtagttgttcttcaggcacttggaggccttgtaatagctgctgttattaagtatgcagataatattttaaaaggatttgcaacctctttatcgataatattatcaacattgatctcctatttttggcttcaagattttgtgccaaccagtgtctttttccttggagccatccttgtaataacagctacttttttgtatggttatgatcccaaacctgcaggaaatcccactaaagcatag

SEQ ID NO: 709 - DNA, 2838 bp, Homo sapiens
atggagcgggagccgggcgccgcgggagttcgccgggctctgggccgccggctggaggcggtgctggcgagccgcagtgaggccaacgccgtgttcgacatcctggccgtgctgcagtctgaggaccaggaggagatccaggaagcagtccgcacgtgcagccgtcttttcggggccttgctggagcggggagagctgtttgtgggccagctgccctctgaggagatggtcatgacagggtcccagggagccacacggaagtacaaggtgtggatgagacaccgctatcacagctgctgcaatcgcttgggagagctcctgggccacccctcctttcaggtcaaggcatccgtgggctctgagaagctctttgcgccgggaaccgataaaggcccagcgcttgagaagtcggaggccaaggccgggccggtgcccaaggtgtcaggcctggagcgcagccgcgagctcagcgccgagagcttcctgcccactgccagccccgcgccccatgccgcgccctgcccggggcccccgcccggctcccgcgccaatcccttggtgaagaaggaaccccccgccccgcaccgccacaccccgcagccgccacccccgcagccccgcggcctgctcccgacacacgtgcctgcatccctgggcgccttcgcgggccacagccaggcggcagccaacggcctgcacggcctcagcaggagcagcagcgcccccctgggcctggggaagcacgtgtcgctgtcgccacacgggccgggcccccacctgtctacctcacacctggcgctccggtcccaggcgcagcaccagctccacgcggccatgtttgccgcacccccgacactgcccccgcccccggcgctgccggccagcagcctggtcctcccaggacacccggccgatcacgagctgctcaggcaagagctgaacacgcggtttctggtgcagagcgccgagcggcctggcgcctccctgggcccgggggctctgctgcgggcggagttccatcagcaccagcacacacaccagcacacgcaccaacacacacaccagcaccaacacacattcgcccccttccccgcagggctgcccccgacgccgcccgccgcacccccgccgtttgacaagtatgcgcccaagctggacagcccctacttccgacattccagcgtgagtttcttcccgtccttccctcctgccatcccgggactgcccaccctgctcccacaccccggccccttcgggtccctgcagggcgcttttcagcctaaggtgtctgacccgtaccgggcggtggtcaaggtgagcacgtgttgggaaggcccgtggcaagggaggactctggtgcccccggggcggcctcggggggcccgtgacagcaggagtctgcagaaaacatgggtgggggtggcaccagccccactgagcgcttccatcctgtcgcagaagccggggaggtggtgtgccgtgcacgtgcagatcgcctggcagatctaccgtcaccagcagaagataaaggagatgcagctggacccccacaagctggaggtgggtgcaaagctggacctgttcggcagaccccctgccccgggcgtgtttgcaggcttccactacccacaggacctggcccggcccctcttccccagcacaggtgccgcccatcctgcctccaacccatttggaccctcagcccatcctggcagcttcctgcccactggccccctgacagaccctttcagcagaccgagcacctttgggggcctgggcagcctgagcagccacgcctttgggggcctgggcagccatgcactggctcccggtggcagcatctttgcccccaaggagggctcctccgtgcacggcctgcccagcccccatgaggcctggaaccgactgcaccgggcaccgccctccttcccggctccgcccccgtggcccaagtccgtggacgcggagcgggtgtcagccctgaccaaccatgaccgagagccggacaatggcaaggaggagcaggaacgggacctcctggagaagacgcgcctgctgagccgggcctcgcccgccacccccgctggccaccccgtcagcggcctcctgctccgggcccagagcgagctgggccggtccggggcccccgcggagcgcgaggccgaacctcgggtcaaggagagccgctccccggccaaggaggaggccgccaagatgcccgcgcgcgcatccccgccccacagcaaggcggcccctggagacgtgaaggtcaaggaggagcgcggggaggacgaggcctccgagcccccggcgggcggcctgcaccccgcgcccctgcagctcggcctgggccgcgagcgcctgggcgcgccgggcttcgcgtgggagcctttccgcggcctggagctgccacgtcgcgccttccccgctgccgcccccgccccgggctccgccgccctcttggagcccccggagcgcccctaccgcgaccgcgagccccacggctacagccccgagcgcctgcgcggggagctggagcgcgcgcgggccccgcacctgccgcccgccgcccccgccttggacggcgcgctgctgccctcgctgggagccctgcacttcccgcgcctctcgcccgccgcgctgcacaatgggctcctggcgcggaccccgcccgccgccgccgccctcggcgcaccgccccccctggtgacggcggccgggccccccacgccccccgggccgccgcggagccggactactccgctggggggcctcgggccgggcgaggcgcgcgactactccccgtcccgaaatcccccggaggtggaggcgcggtag

SEQ ID NO: 710 - DNA, 2868 bp, Homo sapiens
atggagcgggagccgggcgccgcgggagttcgccgggctctgggccgccggctggaggcggtgctggcgagccgcagtgaggccaacgccgtgttcgacatcctggccgtgctgcagtctgaggaccaggaggagatccaggaagcagtccgcacgtgcagccgtcttttcggggccttgctggagcggggagagctgtttgtgggccagctgccctctgaggagatggtcatgacagggtcccagggagccacacggaagtacaaggtgtggatgagacaccgctatcacagctgctgcaatcgcttgggagagctcctgggccacccctcctttcaggtcaagtgtgacagcgagagcggcccggacgacaaggcatccgtgggctctgagaagctctttgcgccgggaaccgataaaggcccagcgcttgagaagtcggaggccaaggccgggccggtgcccaaggtgtcaggcctggagcgcagccgcgagctcagcgccgagagcttcctgcccactgccagccccgcgccccatgccgcgccctgcccggggcccccgcccggctcccgcgccaatcccttggtgaagaaggaaccccccgccccgcaccgccacaccccgcagccgccacccccgcagccccgcggcctgctcccgacacacgtgcctgcatccctgggcgccttcgcgggccacagccaggcggcagccaacggcctgcacggcctcagcaggagcagcagcgcccccctgggcctggggaagcacgtgtcgctgtcgccacacgggccgggcccccacctgtctacctcacacctggcgctccggtcccaggcgcagcaccagctccacgcggccatgtttgccgcacccccgacactgcccccgcccccggcgctgccggccagcagcctggtcctcccaggacacccggccgatcacgagctgctcaggcaagagctgaacacgcggtttctggtgcagagcgccgagcggcctggcgcctccctgggcccgggggctctgctgcgggcggagttccatcagcaccagcacacacaccagcacacgcaccaacacacacaccagcaccaacacacattcgcccccttccccgcagggctgcccccgacgccgcccgccgcacccccgccgtttgacaagtatgcgcccaagctggacagcccctacttccgacattccagcgtgagtttcttcccgtccttccctcctgccatcccgggactgcccaccctgctcccacaccccggccccttcgggtccctgcagggcgcttttcagcctaaggtgtctgacccgtaccgggcggtggtcaaggtgagcacgtgttgggaaggcccgtggcaagggaggactctggtgcccccggggcggcctcggggggcccgtgacagcaggagtctgcagaaaacatgggtgggggtggcaccagccccactgagcgcttccatcctgtcgcagaagccggggaggtggtgtgccgtgcacgtgcagatcgcctggcagatctaccgtcaccagcagaagataaaggagatgcagctggacccccacaagctggaggtgggtgcaaagctggacctgttcggcagaccccctgccccgggcgtgtttgcaggcttccactacccacaggacctggcccggcccctcttccccagcacaggtgccgcccatcctgcctccaacccatttggaccctcagcccatcctggcagcttcctgcccactggccccctgacagaccctttcagcagaccgagcacctttgggggcctgggcagcctgagcagccacgcctttgggggcctgggcagccatgcactggctcccggtggcagcatctttgcccccaaggagggctcctccgtgcacggcctgcccagcccccatgaggcctggaaccgactgcaccgggcaccgccctccttcccggctccgcccccgtggcccaagtccgtggacgcggagcgggtgtcagccctgaccaaccatgaccgagagccggacaatggcaaggaggagcaggaacgggacctcctggagaagacgcgcctgctgagccgggcctcgcccgccacccccgctggccaccccgtcagcggcctcctgctccgggcccagagcgagctgggccggtccggggcccccgcggagcgcgaggccgaacctcgggtcaaggagagccgctccccggccaaggaggaggccgccaagatgcccgcgcgcgcatccccgccccacagcaaggcggcccctggagacgtgaaggtcaaggaggagcgcggggaggacgaggcctccgagcccccggcgggcggcctgcaccccgcgcccctgcagctcggcctgggccgcgagcgcctgggcgcgccgggcttcgcgtgggagcctttccgcggcctggagctgccacgtcgcgccttccccgctgccgcccccgccccgggctccgccgccctcttggagcccccggagcgcccctaccgcgaccgcgagccccacggctacagccccgagcgcctgcgcggggagctggagcgcgcgcgggccccgcacctgccgcccgccgcccccgccttggacggcgcgctgctgccctcgctgggagccctgcacttcccgcgcctctcgcccgccgcgctgcacaatgggctcctggcgcggaccccgcccgccgccgccgccctcggcgcaccgccccccctggtgacggcggccgggccccccacgccccccgggccgccgcggagccggactactccgctggggggcctcgggccgggcgaggcgcgcgactactccccgtcccgaaatcccccggaggtggaggcgcggtag

SEQ ID NO: 711 - DNA, 483 bp, Homo sapiens
atgaaggaagtgggcagaccccgggaagttagaggacgcccggggaaaagcagaattcagaaggagctggcggacatcactttagaccctccacctaattgcagtgctggacccaaaggagacaacatttatgaatggaggtcaactatattgggacccccaggatctgtctatgaaggaggggtgttctttcttgacattaccttttcaccagactatccgtttaaaccccctaaggttaccttccgaacaagaatctatcactgtaatattaacagccaaggtgtgatctgtctggacatcttaaaggacaactggagtccggctttaactatttctaaagttctcctctccatctgctcacttcttacagattgcaaccctgctgaccctctggtgggcagcatcgccacacagtacatgaccaacagagcagagcatgaccggatggccagacagtggaccaagcggtacgccacatag

SEQ ID NO: 712 - DNA, 633 bp, Homo sapiens
atgtcggatgacgattcgagggccagcaccagctcctcctcatcttcgtcttccaaccagcaaaccgagaaagaaacaaacacccccaagaagaaggagagtaaagtcagcatgagcaaaaactccaaactcctctccaccagcgccaagagaattcagaaggagctggcggacatcactttagaccctccacctaattgcagaattcagaaggaacttgcagaaatcacattggaccctcctcccaactgtagtgctggacccaaaggagacaacatttatgaatggaggtcaactatattgggacccccaggatctgtctatgaaggaggggtgttctttcttgacattaccttttcaccagactatccgtttaaaccccctaaggttaccttccgaacaagaatctatcactgtaatattaacagccaaggtgtgatctgtctggacatcttaaaggacaactggagtccggctttaactatttctaaagttctcctctccatctgctcacttcttacagattgcaaccctgctgaccctctggtgggcagcatcgccacacagtacatgaccaacagagcagagcatgaccggatggccagacagtggaccaagcggtacgccacatag

SEQ ID NO: 713 - DNA, 582 bp, Homo sapiens
atgtcggatgacgattcgagggccagcaccagctcctcctcatcttcgtcttccaaccagcaaaccgagaaagaaacaaacacccccaagaagaaggagagtaaagtcagcatgagcaaaaactccaaactcctctccaccagcgccaagagaattcagaaggagctggcggacatcactttagaccctccacctaattgcagtgctggacccaaaggagacaacatttatgaatggaggtcaactatattgggacccccaggatctgtctatgaaggaggggtgttctttcttgacattaccttttcaccagactatccgtttaaaccccctaaggttaccttccgaacaagaatctatcactgtaatattaacagccaaggtgtgatctgtctggacatcttaaaggacaactggagtccggctttaactatttctaaagttctcctctccatctgctcacttcttacagattgcaaccctgctgaccctctggtgggcagcatcgccacacagtacatgaccaacagagcagagcatgaccggatggccagacagtggaccaagcggtacgccacatag

SEQ ID NO: 714 - DNA, 534 bp, Homo sapiens
atgaaggaagtgggcagaccccgggaagttagaggacgcccggggaaaagcagaattcagaaggagctggcggacatcactttagaccctccacctaattgcagaattcagaaggaacttgcagaaatcacattggaccctcctcccaactgtagtgctggacccaaaggagacaacatttatgaatggaggtcaactatattgggacccccaggatctgtctatgaaggaggggtgttctttcttgacattaccttttcaccagactatccgtttaaaccccctaaggttaccttccgaacaagaatctatcactgtaatattaacagccaaggtgtgatctgtctggacatcttaaaggacaactggagtccggctttaactatttctaaagttctcctctccatctgctcacttcttacagattgcaaccctgctgaccctctggtgggcagcatcgccacacagtacatgaccaacagagcagagcatgaccggatggccagacagtggaccaagcggtacgccacatag

SEQ ID NO: 715 - DNA, 4776 bp, Homo sapiens
atgaattcacaacctcaaacccgttctccgggaggattcagacctatccagtttttccagaggcctcaaatacagcctcctagagctaccatcccgaacagcagtccttccattcgtcctggtgcacagacacccactgcagtgtaccaggctaatcagcacatcatgatggttaaccatctgcccatgccgtacccagtgccccaggggcctcagtactgtataccacagtaccgtcatagtggccctccttatgttgggcccccccaacaatatccagttcaaccaccggggccaggtcctttttatcctggaccaggacctggggacttccccaatgcttatggaacgcctttttacccaagtcagccggtgtatcagtcagcacctatcatagtgcctacgcagcaacagccgcctccagccaagagagagaaaaaaactataagaattcgggatccaaaccagggaggtaaagacataacagaggagattatgtctggaggtggcagcagaaatcctactccacccataggaagacccacgtccacacctactcctcctcagctgcccagccaggtccccgagcacagccctgtggtttatgggactgtggagagcgctcatcttgctgccagcacccctgtcactgcagctagcgaccagaagcaagaggagaagccaaaaccagatccagtgttaaagtctccttccccagtccttaggctagtcctcagtggagagaagaaagaacaagaaggccagacatctgaaactactgcaatagtatccatagcagagcttcctctgcctccatcacctaccactgtttcttctgttgctcgaagtacaattgcagcccccacctcttctgctcttagtagccaaccaatattcaccactgctatagatgacagatgtgaactctcatccccaagagaagacacaattcctatacccagcctcacatcttgcacagaaacatcagaccctttaccaacaaatgaaaatgatgatgatatatgcaagaaaccctgtagtgtagcacctaatgatattccactggtttctagtactaacctaattaatgaaataaatggagttagcgaaaaattatcagccacggagagcattgtggaaatagtaaaacaggaagtattgccattgactcttgaattggagattctcgaaaatcccccagaagaaatgaaactggagtgtatcccagctcccatcaccccttccacagttccttcctttcctccaactcctccaactcctccagcttctcctcctcacactccagtcattgttcctgctgctgccactactgttagttctccgagtgctgccatcacagtccagagagtcctagaggaggacgagagcataagaacttgccttagtgaagatgcaaaagagattcagaacaaaatagaggtagaagcagatgggcaaacagaagagattttggattctcaaaacttaaattcaagaaggagccctgtcccagctcaaatagctataactgtaccaaagacatggaagaaaccaaaagatcggacccgaaccactgaagagatgttagaggcagaattggagcttaaagctgaagaggagctttccattgacaaagtacttgaatctgaacaagataaaatgagccaggggtttcatcctgaaagagacccctctgacctaaaaaaagtgaaagctgtggaagaaaatggagaagaagctgagccagtacgtaatggtgctgagagtgtttctgagggtgaaggaatagatgctaattcaggctccacagatagttctggtgatggggttacatttccatttaaaccagaatcctggaagcctactgatactgaaggtaagaagcagtatgacagggagtttctgctggacttccagttcatgcctgcctgtatacaaaaaccagagggcctgcctcctatcagtgatgtggttcttgacaagatcaaccaacccaaattgccaatgcgaactctggatcctcgaattttgcctcgaggaccagactttacaccagcctttgctgattttggaaggcagacacctggtggaagaggcgtacctttgttgaatgttgggtcacgaagatctcaacctggccaaagaagagaacccagaaagatcatcacagtttctgtaaaagaagatgtacacctgaaaaaggcagaaaatgcctggaagccaagccaaaaacgagacagccaagccgatgatcccgaaaacattaaaacccaggagctttttagaaaagttcgaagtatcttaaataaattgacaccacagatgttcaatcaactgatgaagcaagtgtcaggacttactgttgacacagaggagcggctgaaaggagttattgacctggtctttgagaaggctattgatgaacccagtttctctgtggcttacgcaaacatgtgtcgatgtctagtaacgctgaaagtacccatggcagacaagcctggtaacacagtgaatttccggaagctgctactgaaccgttgccagaaggagtttgaaaaagataaagcagatgatgatgtctttgagaagaagcagaaagaacttgaggctgccagtgctccagaggagaggacaaggcttcatgatgaactggaagaagccaaggacaaagcccggcggagatccattggcaacatcaagtttattggagaactctttaaactcaaaatgctgactgaagccatcatgcatgactgtgtggtgaagctgctaaagaaccatgatgaagaatccctggagtgcctgtgtcgcctgctcaccaccattggcaaagacttggactttgaaaaagcaaagccacgtatggaccagtactttaatcagatggagaaaattgtgaaagaaagaaaaacctcatctaggattcggttcatgcttcaagatgttatagacctaaggctgtgcaattgggtatctcgaagagcagatcaagggcctaaaactatcgaacagattcacaaagaggctaaaatagaagaacaagaagagcaaaggaaggtccagcaactcatgaccaaagagaagagaagaccaggtgtccagagagtggacgaaggtgggtggaacactgtacaaggggccaagaacagtcgggtactggacccctcaaaattcctaaaaatcactaagcctacaattgatgaaaaaattcagctggtacctaaagcacagctaggcagctggggaaaaggcagcagtggtggagcaaaggcaagtgagactgatgccttacggtcaagtgcttccagtttaaacagattctctgccctgcaacctccagcaccctcagggtccacgccatccacgcctgtagagtttgattcccgaaggaccttaactagtcgtggaagtatgggcagggagaagaatgacaagccccttccatctgcaacagctcggccaaatactttcatgaggggtggcagcagtaaagacctgctagacaatcagtctcaagaagagcagcggagagagatgctggagaccgtgaagcagctcacaggaggtgtggatgtggagaggaacagcactgaggctgagcgaaataaaacaagggagtcagcaaaaccagaaatttcagcaatgtcagctcatgacaaggctgcattatcagaagaggaactggagaggaagtcgaaatctatcattgatgaatttctacacattaatgattttaaggaagccatgcagtgtgtggaagagctgaatgcccagggcctactacatgtttttgtgagagtgggagtggagtccaccctggaaaggagccagatcaccagggatcacatgggccaattactctatcagctggtacagtcagaaaaactcagcaaacaggactttttcaaaggtttttcagaaactttggaattggcagatgacatggccattgatattccccatatttggttgtaccttgctgaactggtgacccccatgttaaaagaaggtggaatctccatgagagaacttaccatagaatttagcaaacctttacttcctgttggaagagctggggtcttgctatctgaaatattgcacctactatgcaaacaaatgagccataagaaagtgggagccttatggagggaggctgacctcagctggaaggactttttaccagaaggagaagatgtacataattttcttttggagcagaagttggacttcatagagtctgacagtccctgttcctctgaagcactttcaaagaaagaactgtctgccgaagagctgtataagcgactcgagaaactcattattgaggacaaagcgaatgatgaacagatctttgactgggtagaggctaatctagacgaaatccagatgagttcacctacattccttagagctttaatgactgctgtttgtaaagcagctattatagccgactcttctaccttcagagtggacactgctgttatcaagcagagagtgccgatcttactcaagtacctagactcagatacagagaaggaactgcaagcactttatgcactacaagcatcgatagtaaaacttgatcaacctgccaatttgctgcggatgttttttgattgtctatatgacgaggaggtgatctccgaggatgccttctacaaatgggagagcagcaaggaccctgcagagcagaatgggaagggcgtggctctgaaatctgtcacggcattcttcacgtggctgcgggaagcagaagaggagtctgaggataactaa

SEQ ID NO: 716 - DNA, 4866 bp, Homo sapiens
atgaattcacaacctcaaacccgttctccgtttttccagaggcctcaaatacagcctcctagagctaccatcccgaacagcagtccttccattcgtcctggtgcacagacacccactgcagtgtaccaggctaatcagcacatcatgatggttaaccatctgcccatgccgtacccagtgccccaggggcctcagtactgtataccacagtaccgtcatagtggccctccttatgttgggcccccccaacaatatccagttcaaccaccggggccaggtcctttttatcctggaccaggacctggggacttccccaatgcttatggaacgcctttttacccaagtcagccggtgtatcagtcagcacctatcatagtgcctacgcagcaacagccgcctccagccaagagagagaaaaaaactataagaattcgggatccaaaccagggaggtaaagacataacagaggagattatgtctggaggtggcagcagaaatcctactccacccataggaagacccacgtccacacctactcctcctcagctgcccagccaggtccccgagcacagccctgtggtttatgggactgtggagagcgctcatcttgctgccagcacccctgtcactgcagctagcgaccagaagcaagaggagaagccaaaaccagatccagtgttaaagtctccttccccagtccttaggctagtcctcagtggagagaagaaagaacaagaaggccagacatctgaaactactgcaatagtatccatagcagagcttcctctgcctccatcacctaccactgtttcttctgttgctcgaagtacaattgcagcccccacctcttctgctcttagtagccaaccaatattcaccactgctatagatgacagatgtgaactctcatccccaagagaagacacaattcctatacccagcctcacatcttgcacagaaacatcagaccctttaccaacaaatgaaaatgatgatgatatatgcaagaaaccctgtagtgtagcacctaatgatattccactggtttctagtactaacctaattaatgaaataaatggagttagcgaaaaattatcagccacggagagcattgtggaaatagtaaaacaggaagtattgccattgactcttgaattggagattctcgaaaatcccccagaagaaatgaaactggagtgtatcccagctcccatcaccccttccacagttccttcctttcctccaactcctccaactcctccagcttctcctcctcacactccagtcattgttcctgctgctgccactactgttagttctccgagtgctgccatcacagtccagagagtcctagaggaggacgagagcataagaacttgccttagtgaagatgcaaaagagattcagaacaaaatagaggtagaagcagatgggcaaacagaagagattttggattctcaaaacttaaattcaagaaggagccctgtcccagctcaaatagctataactgtaccaaagacatggaagaaaccaaaagatcggacccgaaccactgaagagatgttagaggcagaattggagcttaaagctgaagaggagctttccattgacaaagtacttgaatctgaacaagataaaatgagccaggggtttcatcctgaaagagacccctctgacctaaaaaaagtgaaagctgtggaagaaaatggagaagaagctgagccagtacgtaatggtgctgagagtgtttctgagggtgaaggaatagatgctaattcaggctccacagatagttctggtgatggggttacatttccatttaaaccagaatcctggaagcctactgatactgaaggtaagaagcagtatgacagggagtttctgctggacttccagttcatgcctgcctgtatacaaaaaccagagggcctgcctcctatcagtgatgtggttcttgacaagatcaaccaacccaaattgccaatgcgaactctggatcctcgaattttgcctcgaggaccagactttacaccagcctttgctgattttggaaggcagacacctggtggaagaggcgtacctatttgcaaagtgcagagcaggcatggattgccaattctggaacagagcaaagccccaacttgccctccactggtgatgtcacacccacccatgaagagcctgcctctagggttgttgaatgttgggtcacgaagatctcaacctggccaaagaagagaacccagaaagatcatcacagtttctgtaaaagaagatgtacacctgaaaaaggcagaaaatgcctggaagccaagccaaaaacgagacagccaagccgatgatcccgaaaacattaaaacccaggagctttttagaaaagttcgaagtatcttaaataaattgacaccacagatgttcaatcaactgatgaagcaagtgtcaggacttactgttgacacagaggagcggctgaaaggagttattgacctggtctttgagaaggctattgatgaacccagtttctctgtggcttacgcaaacatgtgtcgatgtctagtaacgctgaaagtacccatggcagacaagcctggtaacacagtgaatttccggaagctgctactgaaccgttgccagaaggagtttgaaaaagataaagcagatgatgatgtctttgagaagaagcagaaagaacttgaggctgccagtgctccagaggagaggacaaggcttcatgatgaactggaagaagccaaggacaaagcccggcggagatccattggcaacatcaagtttattggagaactctttaaactcaaaatgctgactgaagccatcatgcatgactgtgtggtgaagctgctaaagaaccatgatgaagaatccctggagtgcctgtgtcgcctgctcaccaccattggcaaagacttggactttgaaaaagcaaagccacgtatggaccagtactttaatcagatggagaaaattgtgaaagaaagaaaaacctcatctaggattcggttcatgcttcaagatgttatagacctaaggctgtgcaattgggtatctcgaagagcagatcaagggcctaaaactatcgaacagattcacaaagaggctaaaatagaagaacaagaagagcaaaggaaggtccagcaactcatgaccaaagagaagagaagaccaggtgtccagagagtggacgaaggtgggtggaacactgtacaaggggccaagaacagtcgggtactggacccctcaaaattcctaaaaatcactaagcctacaattgatgaaaaaattcagctggtacctaaagcacagctaggcagctggggaaaaggcagcagtggtggagcaaaggcaagtgagactgatgccttacggtcaagtgcttccagtttaaacagattctctgccctgcaacctccagcaccctcagggtccacgccatccacgcctgtagagtttgattcccgaaggaccttaactagtcgtggaagtatgggcagggagaagaatgacaagccccttccatctgcaacagctcggccaaatactttcatgaggggtggcagcagtaaagacctgctagacaatcagtctcaagaagagcagcggagagagatgctggagaccgtgaagcagctcacaggaggtgtggatgtggagaggaacagcactgaggctgagcgaaataaaacaagggagtcagcaaaaccagaaatttcagcaatgtcagctcatgacaaggctgcattatcagaagaggaactggagaggaagtcgaaatctatcattgatgaatttctacacattaatgattttaaggaagccatgcagtgtgtggaagagctgaatgcccagggcctactacatgtttttgtgagagtgggagtggagtccaccctggaaaggagccagatcaccagggatcacatgggccaattactctatcagctggtacagtcagaaaaactcagcaaacaggactttttcaaaggtttttcagaaactttggaattggcagatgacatggccattgatattccccatatttggttgtaccttgctgaactggtgacccccatgttaaaagaaggtggaatctccatgagagaacttaccatagaatttagcaaacctttacttcctgttggaagagctggggtcttgctatctgaaatattgcacctactatgcaaacaaatgagccataagaaagtgggagccttatggagggaggctgacctcagctggaaggactttttaccagaaggagaagatgtacataattttcttttggagcagaagttggacttcatagagtctgacagtccctgttcctctgaagcactttcaaagaaagaactgtctgccgaagagctgtataagcgactcgagaaactcattattgaggacaaagcgaatgatgaacagatctttgactgggtagaggctaatctagacgaaatccagatgagttcacctacattccttagagctttaatgactgctgtttgtaaagcagctattatagccgactcttctaccttcagagtggacactgctgttatcaagcagagagtgccgatcttactcaagtacctagactcagatacagagaaggaactgcaagcactttatgcactacaagcatcgatagtaaaacttgatcaacctgccaatttgctgcggatgttttttgattgtctatatgacgaggaggtgatctccgaggatgccttctacaaatgggagagcagcaaggaccctgcagagcagaatgggaagggcgtggctctgaaatctgtcacggcattcttcacgtggctgcgggaagcagaagaggagtctgaggataactaa

SEQ ID NO: 717 - DNA, 1548 bp, Homo sapiens
atgaattcacaacctcaaacccgttctccgtttgcagcggggcctcgacctccccatcatcagtttttccagaggcctcaaatacagcctcctagagctaccatcccgaacagcagtccttccattcgtcctggtgcacagacacccactgcagtgtaccaggctaatcagcacatcatgatggttaaccatctgcccatgccgtacccagtgccccaggggcctcagtactgtataccacagtaccgtcatagtggccctccttatgttgggcccccccaacaatatccagttcaaccaccggggccaggtcctttttatcctggaccaggacctggggacttccccaatgcttatggaacgcctttttacccaagtcagccggtgtatcagtcagcacctatcatagtgcctacgcagcaacagccgcctccagccaagagagagaaaaaaactataagaattcgggatccaaaccagggaggtaaagacataacagaggagattatgtctggaggtggcagcagaaatcctactccacccataggaagacccacgtccacacctactcctcctcagcagctgcccagccaggtccccgagcacagccctgtggtttatgggactgtggagagcgctcatcttgctgccagcacccctgtcactgcagctagcgaccagaagcaagaggagaagccaaaaccagatccagtgttaaagtctccttccccagtccttaggctagtcctcagtggagagaagaaagaacaagaaggccagacatctgaaactactgcaatagtatccatagcagagcttcctctgcctccatcacctaccactgtttcttctgttgctcgaagtacaattgcagcccccacctcttctgctcttagtagccaaccaatattcaccactgctatagatgacagatgtgaactctcatccccaagagaagacacaattcctatacccagcctcacatcttgcacagaaacatcagaccctttaccaacaaatgaaaatgatgatgatatatgcaagaaaccctgtagtgtagcacctaatgatattccactggtttctagtactaacctaattaatgaaataaatggagttagcgaaaaattatcagccacggagagcattgtggaaatagtaaaacaggaagtattgccattgactcttgaattggagattctcgaaaatcccccagaagaaatgaaactggagtgtatcccagctcccatcaccccttccacagttccttcctttcctccaactcctccaactcctccagcttctcctcctcacactccagtcattgttcctgctgctgccactactgttagttctccgagtgctgccatcacagtccagagagtcctagaggaggacgagagcataagaacttgccttagtgaagatgcaaaagagattcagaacaaaatagaggtagaagcagatgggcaaacagaagagattttggattctcaaaacttaaattcaagaaggagccctgtcccagaaacatcgaatgaatgctga

SEQ ID NO: 718 - DNA, 465 bp, Homo sapiens
atggcttcttccccacgtcccaagatggatgcaatcttaactgaggccattaaggctaatctagacgaaatccagatgagttcacctacattccttagagctttaatgactgctgtttgtaaagcagctattatagccgactcttctaccttcagagtggacactgctgttatcaagcagagagtgccgatcttactcaagtacctagactcagatacagagaaggaactgcaagcactttatgcactacaagcatcgatagtaaaacttgatcaacctgccaatttgctgcggatgttttttgattgtctatatgacgaggaggtgatctccgaggatgccttctacaaatgggagagcagcaaggaccctgcagagcagaatgggaagggcgtggctctgaaatctgtcacggcattcttcacgtggctgcgggaagcagaagaggagtctgaggataactaa

SEQ ID NO: 719 - DNA, 1515 bp, Homo sapiens
atgaattcacaacctcaaacccgttctccgtttttccagaggcctcaaatacagcctcctagagctaccatcccgaacagcagtccttccattcgtcctggtgcacagacacccactgcagtgtaccaggctaatcagcacatcatgatggttaaccatctgcccatgccgtacccagtgccccaggggcctcagtactgtataccacagtaccgtcatagtggccctccttatgttgggcccccccaacaatatccagttcaaccaccggggccaggtcctttttatcctggaccaggacctggggacttccccaatgcttatggaacgcctttttacccaagtcagccggtgtatcagtcagcacctatcatagtgcctacgcagcaacagccgcctccagccaagagagagaaaaaaactataagaattcgggatccaaaccagggaggtaaagacataacagaggagattatgtctggaggtggcagcagaaatcctactccacccataggaagacccacgtccacacctactcctcctcagcagctgcccagccaggtccccgagcacagccctgtggtttatgggactgtggagagcgctcatcttgctgccagcacccctgtcactgcagctagcgaccagaagcaagaggagaagccaaaaccagatccagtgttaaagtctccttccccagtccttaggctagtcctcagtggagagaagaaagaacaagaaggccagacatctgaaactactgcaatagtatccatagcagagcttcctctgcctccatcacctaccactgtttcttctgttgctcgaagtacaattgcagcccccacctcttctgctcttagtagccaaccaatattcaccactgctatagatgacagatgtgaactctcatccccaagagaagacacaattcctatacccagcctcacatcttgcacagaaacatcagaccctttaccaacaaatgaaaatgatgatgatatatgcaagaaaccctgtagtgtagcacctaatgatattccactggtttctagtactaacctaattaatgaaataaatggagttagcgaaaaattatcagccacggagagcattgtggaaatagtaaaacaggaagtattgccattgactcttgaattggagattctcgaaaatcccccagaagaaatgaaactggagtgtatcccagctcccatcaccccttccacagttccttcctttcctccaactcctccaactcctccagcttctcctcctcacactccagtcattgttcctgctgctgccactactgttagttctccgagtgctgccatcacagtccagagagtcctagaggaggacgagagcataagaacttgccttagtgaagatgcaaaagagattcagaacaaaatagaggtagaagcagatgggcaaacagaagagattttggattctcaaaacttaaattcaagaaggagccctgtcccagaaacatcgaatgaatgctga

SEQ ID NO: 720 - DNA, 1182 bp, Homo sapiens
atgttgaaacacaagcgccagagagatgatggggagggcaggggtgaagtggggtctgctggagacatgagagctgccaacctttggccaagcccgctcatgatcaaacgctctaagaagaacagcctggccttgtccctgacggccgaccagatggtcagtgccttgttggatgctgagcccccgatactctattccgagtatgatcctaccagacccttcagtgaagcttcgatgatgggcttactgaccaacctggcagacagggagctggttcacatgatcaactgggcgaagagggtgccaggaaccagggaaaatgtgtagtatcttaaatttctggatcagctttctcagaaaatgaagttggaccagatggctgccgaacttggctttgacatgcggctggacgtggttttagctcgaacagagcagctggttcgtcttgagagcaatgcagtcattgagaacaagaccattgcccacaatttgcagagaaagctaaagacacagaaagagagactggagagcaaagaattacacatgagcctcctccggcagaaaatagcccagctggaggaggagaagcaggcacgcacggccttggtggttgagagggacaacgcgcatcttaccatcaggaacttgcagaagaaggtggagaggctgcagaaagagctgaacacgtgtcgagacttgcacaccgagctcaaagccaaactggccgacaccaatgaactgaagattaaaactttggaacagactaaagccattgaagatctaaacaaatccagagaccaactggagaagatgaaggagaaagctgagaaaaagctcatgtctgtcaagtcagaactggataccacagaacatgaggctaaggagaataaagaaagggccagaaacatgatagaagtggtaaccagtgaaatgaagacactaaaaaaatctctggaagaagcagaaaagagagaaaagcagctggcagacttcagggaggtggtgtcgcagatgctaggcttgaacgtgaccagccttgctcttcctgattatgaaatcatcaagtgtcttgaaagattggtccattcacatcagcatcactttgttacctgtgcctgcctcaaagatgtgactactgggcaagagaggcacccacaaggccatttacagcttcttcattga

SEQ ID NO: 721 - DNA, 2289 bp, Homo sapiens
atgttgaaacacaagcgccagagagatgatggggagggcaggggtgaagtggggtctgctggagacatgagagctgccaacctttggccaagcccgctcatgatcaaacgctctaagaagaacagcctggccttgtccctgacggccgaccagatggtcagtgccttgttggatgctgagcccccgatactctattccgagtatgatcctaccagacccttcagtgaagcttcgatgatgggcttactgaccaacctggcagacagggagctggttcacatgatcaactgggcgaagagggtgccaggaaccagggaaaatgtgtagcttcaagacctccgatccaagatgctttctaaagaagtctcctgtcaagaactgaaagctgaaatggagagctacaaggaaaacaatgccagaaaatcatctctccttacctctttgagagacagagttcaggaactagaagaagaatcagcagcactttccacttctaaaatcagaacagaaatcacagctcacgctgcaatcaaggagaaccaggaattaaagaagaaagttgtagagttaaatgaaaaattacaaaagtgttcaaaagaaaatgaggagaataagaaacaagtttcaaagaattgcaggaaacatgaggaatttctgactcaactgcgtgactgcttggatccagatgagaggaatgacaaggcatcagatgaagatttaattttaaagcttagagacctgcgcaaagaaaatgaattcgtgaaaggacaaattgttattcttgaagagactataaatgtccatgagatggaagcaaaagctagcagagaaacgatcatgaggctggcttcagaagtcaacagagagcagaaaaaagctgcctcctgtactgaagagaaagagaagctgaaccaggacctgctcagtgctgtagaagcaaaagaagctcttgaaagggaagttaagatcttccaagaaaggctgcttgctggccagcaggtctgggatgcctcaaagcaggaagtgagcctcctgaagaaaagctcttctgagttggagaagagtttgaaggccagtcaggatgcagtcacaacctcacaaagccagtacttctcatttagggagaaaatcgcagccctccttaggggcagattgagcatgactgggtccactgaggacaccattttggagaagattcgagaaatggacagccgggaagaaagcagggaccggatggtctcccagcttgaagcccaaatatctgagcttgttgaacagttgggaaaggagtctgggtttcaccagaaagctctccagagggcccagaaagcagagaatatgttggagactcttcagggtcagctgacacacctggaggcagagctggtttctggaggtgttttgcgagacaacttgaattttgagaaacaaaaatatcttaaatttctggatcagctttctcagaaaatgaagttggaccagatggctgccgaacttggctttgacatgcggctggacgtggttttagctcgaacagagcagctggttcgtcttgagagcaatgcagtcattgagaacaagaccattgcccacaatttgcagagaaagctaaagacacagaaagagagactggagagcaaagaattacacatgagcctcctccggcagaaaatagcccagctggaggaggagaagcaggcacgcacggccttggtggttgagagggacaacgcgcatcttaccatcaggaacttgcagaagaaggtggagaggctgcagaaagagctgaacacgtgtcgagacttgcacaccgagctcaaagccaaactggccgacaccaatgaactgaagattaaaactttggaacagactaaagccattgaagatctaaacaaatccagagaccaactggagaagatgaaggagaaagctgagaaaaagctcatgtctgtcaagtcagaactggataccacagaacatgaggctaaggagaataaagaaagggccagaaacatgatagaagtggtaaccagtgaaatgaagacactaaaaaaatctctggaagaagcagaaaagagagaaaagcagctggcagacttcagggaggtggtgtcgcagatgctaggcttgaacgtgaccagccttgctcttcctgattatgaaatcatcaagtgtcttgaaagattggtccattcacatcagcatcactttgttacctgtgcctgcctcaaagatgtgactactgggcaagagaggcacccacaaggccatttacagcttcttcattga

SEQ ID NO: 722 - DNA, 1080 bp, Homo sapiens
atgaccatgaccctccacaccaaagcatctgggatggccctactgcatcagatccaagggaacgagctggagcccctgaaccgtccgcagctcaagatccccctggagcggcccctgggcgaggtgtacctggacagcagcaagcccgccgtgtacaactaccccgagggcgccgcctacgagttcaacgccgcggccgccgccaacgcgcaggtctacggtcagaccggcctcccctacggccccgggtctgaggctgcggcgttcggctccaacggcctggggggtttccccccactcaacagcgtgtctccgagcccgctgatgctactgcacccgccgccgcagctgtcgcctttcctgcagccccacggccagcaggtgccctactacctggagaacgagcccagcggctacacggtgcgcgaggccggcccgccggcattctacaggccaaattcagataatcgacgccagggtggcagagaaagattggccagtaccaatgacaagggaagtatggctatggaatctgccaaggagactcgctactgtgcagtgtgcaatgactatgcttcaggctaccattatggagtctggtcctgtgagggctgcaaggccttcttcaagagaagtattcaaattaaaactttggaacagactaaagccattgaagatctaaacaaatccagagaccaactggagaagatgaaggagaaagctgagaaaaagctcatgtctgtcaagtcagaactggataccacagaacatgaggctaaggagaataaagaaagggccagaaacatgatagaagtggtaaccagtgaaatgaagacactaaaaaaatctctggaagaagcagaaaagagagaaaagcagctggcagacttcagggaggtggtgtcgcagatgctaggcttgaacgtgaccagccttgctcttcctgattatgaaatcatcaagtgtcttgaaagattggtccattcacatcagcatcactttgttacctgtgcctgcctcaaagatgtgactactgggcaagagaggcacccacaaggccatttacagcttcttcattga

SEQ ID NO: 723 - DNA, 2157 bp, Homo sapiens
atgaccatgaccctccacaccaaagcatctgggatggccctactgcatcagatccaagggaacgagctggagcccctgaaccgtccgcagctcaagatccccctggagcggcccctgggcgaggtgtacctggacagcagcaagcccgccgtgtacaactaccccgagggcgccgcctacgagttcaacgccgcggccgccgccaacgcgcaggtctacggtcagaccggcctcccctacggccccgggtctgaggctgcggcgttcggctccaacggcctggggggtttccccccactcaacagcgtgtctccgagcccgctgatgctactgcacccgccgccgcagctgtcgcctttcctgcagccccacggccagcaggtgccctactacctggagaacgagcccagcggctacacggtgcgcgaggccggcccgccggcattctacagaaagtgttcaaaagaaaatgaggagaataagaaacaagtttcaaagaattgcaggaaacatgaggaatttctgactcaactgcgtgactgcttggatccagatgagaggaatgacaaggcatcagatgaagatttaattttaaagcttagagacctgcgcaaagaaaatgaattcgtgaaaggacaaattgttattcttgaagagactataaatgtccatgagatggaagcaaaagctagcagagaaacgatcatgaggctggcttcagaagtcaacagagagcagaaaaaagctgcctcctgtactgaagagaaagagaagctgaaccaggacctgctcagtgctgtagaagcaaaagaagctcttgaaagggaagttaagatcttccaagaaaggctgcttgctggccagcaggtctgggatgcctcaaagcaggaagtgagcctcctgaagaaaagctcttctgagttggagaagagtttgaaggccagtcaggatgcagtcacaacctcacaaagccagtacttctcatttagggagaaaatcgcagccctccttaggggcagattgagcatgactgggtccactgaggacaccattttggagaagattcgagaaatggacagccgggaagaaagcagggaccggatggtctcccagcttgaagcccaaatatctgagcttgttgaacagttgggaaaggagtctgggtttcaccagaaagctctccagagggcccagaaagcagagaatatgttggagactcttcagggtcagctgacacacctggaggcagagctggtttctggaggtgttttgcgagacaacttgaattttgagaaacaaaaatatcttaaatttctggatcagctttctcagaaaatgaagttggaccagatggctgccgaacttggctttgacatgcggctggacgtggttttagctcgaacagagcagctggttcgtcttgagagcaatgcagtcattgagaacaagaccattgcccacaatttgcagagaaagctaaagacacagaaagagagactggagagcaaagaattacacatgagcctcctccggcagaaaatagcccagctggaggaggagaagcaggcacgcacggccttggtggttgagagggacaacgcgcatcttaccatcaggaacttgcagaagaaggtggagaggctgcagaaagagctgaacacgtgtcgagacttgcacaccgagctcaaagccaaactggccgacaccaatgaactgaagattaaaactttggaacagactaaagccattgaagatctaaacaaatccagagaccaactggagaagatgaaggagaaagctgagaaaaagctcatgtctgtcaagtcagaactggataccacagaacatgaggctaaggagaataaagaaagggccagaaacatgatagaagtggtaaccagtgaaatgaagacactaaaaaaatctctggaagaagcagaaaagagagaaaagcagctggcagacttcagggaggtggtgtcgcagatgctaggcttgaacgtgaccagccttgctcttcctgattatgaaatcatcaagtgtcttgaaagattggtccattcacatcagcatcactttgttacctgtgcctgcctcaaagatgtgactactgggcaagagaggcacccacaaggccatttacagcttcttcattga

SEQ ID NO: 724 - DNA, 1701 bp, Homo sapiens
atgttgaaacacaagcgccagagagatgatggggagggcaggggtgaagtggggtctgctggagacatgagagctgccaacctttggccaagcccgctcatgatcaaacgctctaagaagaacagcctggccttgtccctgacggccgaccagatggtcagtgccttgttggatgctgagcccccgatactctattccgagtatgatcctaccagacccttcagtgaagcttcgatgatgggcttactgaccaacctggcagacagggagctggttcacatgatcaactgggcgaagagggtgccaggaaccagggaaaatgtgtaggacctgctcagtgctgtagaagcaaaagaagctcttgaaagggaagttaagatcttccaagaaaggctgcttgctggccagcaggtctgggatgcctcaaagcaggaagtgagcctcctgaagaaaagctcttctgagttggagaagagtttgaaggccagtcaggatgcagtcacaacctcacaaagccagtacttctcatttagggagaaaatcgcagccctccttaggggcagattgagcatgactgggtccactgaggacaccattttggagaagattcgagaaatggacagccgggaagaaagcagggaccggatggtctcccagcttgaagcccaaatatctgagcttgttgaacagttgggaaaggagtctgggtttcaccagaaagctctccagagggcccagaaagcagagaatatgttggagactcttcagggtcagctgacacacctggaggcagagctggtttctggaggtgttttgcgagacaacttgaattttgagaaacaaaaatatcttaaatttctggatcagctttctcagaaaatgaagttggaccagatggctgccgaacttggctttgacatgcggctggacgtggttttagctcgaacagagcagctggttcgtcttgagagcaatgcagtcattgagaacaagaccattgcccacaatttgcagagaaagctaaagacacagaaagagagactggagagcaaagaattacacatgagcctcctccggcagaaaatagcccagctggaggaggagaagcaggcacgcacggccttggtggttgagagggacaacgcgcatcttaccatcaggaacttgcagaagaaggtggagaggctgcagaaagagctgaacacgtgtcgagacttgcacaccgagctcaaagccaaactggccgacaccaatgaactgaagattaaaactttggaacagactaaagccattgaagatctaaacaaatccagagaccaactggagaagatgaaggagaaagctgagaaaaagctcatgtctgtcaagtcagaactggataccacagaacatgaggctaaggagaataaagaaagggccagaaacatgatagaagtggtaaccagtgaaatgaagacactaaaaaaatctctggaagaagcagaaaagagagaaaagcagctggcagacttcagggaggtggtgtcgcagatgctaggcttgaacgtgaccagccttgctcttcctgattatgaaatcatcaagtgtcttgaaagattggtccattcacatcagcatcactttgttacctgtgcctgcctcaaagatgtgactactgggcaagagaggcacccacaaggccatttacagcttcttcattga

SEQ ID NO: 725 - DNA, 576 bp, Homo sapiens
atgacaagggaagtatggctatggaatctgccaaggagactcgctactgtgcagtgtgcaatgactatgcttcaggctaccattatggagtctggtcctgtgagggctgcaaggccttcttcaagagaagtattcaagattaaaactttggaacagactaaagccattgaagatctaaacaaatccagagaccaactggagaagatgaaggagaaagctgagaaaaagctcatgtctgtcaagtcagaactggataccacagaacatgaggctaaggagaataaagaaagggccagaaacatgatagaagtggtaaccagtgaaatgaagacactaaaaaaatctctggaagaagcagaaaagagagaaaagcagctggcagacttcagggaggtggtgtcgcagatgctaggcttgaacgtgaccagccttgctcttcctgattatgaaatcatcaagtgtcttgaaagattggtccattcacatcagcatcactttgttacctgtgcctgcctcaaagatgtgactactgggcaagagaggcacccacaaggccatttacagcttcttcattga

SEQ ID NO: 726 - DNA, 885 bp, Homo sapiens
atgcccaccgtgaatgccagcgtggggaccggcgcctgtgcgggccccgcctccctgagccacatgcagctccaccacctcgaccccaagactttcaagtgcagagccatagagctgtcctggttccagacggtgggggagtcggcactgagcgtagagcccttctcctaccaaggggagcctcacattgtgctggcacagcccttcgccggccgctgcctgattctctcctgggactacagcctgcagcgcttccggcccgaggaagagctgcccgcggcctccgtggtgtcctgcaagccactggtgctgggcccgagcctcttcgtgctggctgcccgcctgtgggggggctcacagctgtgggcccggcccagtcccggcctgcgcctggccccaacgcagaccctggccccgcggcggctgctgcggcccaatgacgccgagctcctgtggctggaagggcaaccctgcttcgtggtggccgatgcctccaaggcgggcagcaccacgctgctgtgccgcgacgggcccggcttttacccgcaccagagcctgcacgcctggcaccgggacacggacgctgaggccctggagctggacggccggccccacctgctgctggcctcggcttcccagcggcccgtgctcttccactggaccggtggccgcttcgagagacgcacagacatccccgaggccgaggatgtctatgccacacgccacttccaggctggtggggacgtgttcctgtgcctcacacgctacattggggactccatggtgaggctgggcctgggggcggggggctggcttttcagcactgacccaatcttgcacactaagcctctaaactctgacctaccctcacatgccgacctttga

SEQ ID NO: 727 - DNA, 1098 bp, Homo sapiens
atgcccaccgtgaatgccagcgtggggaccggcgcctgtgcgggccccgcctccctgagccacatgcagctccaccacctcgaccccaagactttcaagtgcagagccatagagctgtcctggttccagacggtgggggagtcggcactgagcgtagagcccttctcctaccaaggggagcctcacattgtgctggcacagcccttcgccggccgctgcctgattctctcctgggactacagcctgcagcgcttccggcccgaggaagagctgcccgcggcctccgtggtgtcctgcaagccactggtgctgggcccgagcctcttcgtgctggctgcccgcctgtgggggggctcacagctgtgggcccggcccagtcccggcctgcgcctggccccaacgcagaccctggccccgcggcggctgctgcggcccaatgacgccgagctcctgtggctggaagggcaaccctgcttcgtggtggccgatgcctccaaggcgggcagcaccacgctgctgtgccgcgacgggcccggcttttacccgcaccagagcctgcacgcctggcaccgggacacggacgctgaggccctggagctggacggccggccccacctgctgctggcctcggcttcccagcggcccgtgctcttccactggaccggtggccgcttcgagagacgcacagacatccccgaggccgaggatgtctatgccacacgccacttccaggctggtggggacgtgttcctgtgcctcacacgctacattggggactccatggtcatgcgctgggacggctccatgtttcgtctgctgcagcaacttccctcgcgcggtgcccacgtcttccagccactgctcatcgccagggaccagctggccatcctaggcagcgacttcgccttcagccaggtcctccgccttgagcctgacaaggggctcctggagccactgcaggagctggggcctccggccctggtggccccccgtgcctttgcccacatcactatggccggcagacgcttcctctttgctgcttgctttaagggccccacacagatctaccagcatcacgagatcgacctcagtgcctga

SEQ ID NO: 728 - DNA, 1314 bp, Homo sapiens
atgccaccaaaaagaaatgaaaaatacaaacttcctattccatttccagaaggcaaggttctggatgatatggaaggcaatcagtgggtactgggcaagaagattggctctggaggatttggattgatatatttagctttccccacaaataaaccagagaaagatgcaagacatgtagtaaaagtggaatatcaagaaaatggcccgttattttcagaacttaaattttatcagagagttgcaaaaaaagactgtatcaaaaagtggatagaacgcaaacaacttgattatttaggaattcctctgttttatggatctggtctgactgaattcaagggaagaagttacagatttatggtaatggaaagactaggaatagatttacagaagatctcaggccagaatggtacctttaaaaagtcaactgtcctgcaattaggtatccgaatgttggatgtactggaatatatacatgaaaatgaatatgttcatggtgatataaaagcagcaaatctacttttgggttacaaaaatccagaccaggaagttgccttaaagaatagacaagagctgtatgcactacctcctcctccccagttctactcaagccttattgaagagataggaactcttggttgggataaacttgtgtatgcggatacctgcttcagtaccatcaagttaaaagcagaagatgcttctggtagagagcatttaatcactctcaagttgaaggcaaagtatcctgcagaatcaccagattattttgtggattttcctgttccattttgtgcctcctggacacctcagagctccttaataagcatttatagtcagtttttggcagcaatagaatcactaaaggcattctgggatgttatggatgaaatcgatgagaagacctgggtacttgagccagaaaaacctccacggagtgcaacagcacgcagaattgcattagtggtaaaacccctgggaattaagctgagcaggaacatacatttgtgggatccagaaaatagtgtgttacaaaatttgaaagatgttttagaaattgattttccagctcgtgctatcctggaaaaatctgattttactatggattgtggaatttgttatgcttatcaacttgacggtaccattcctgatcaagtgtgtgataattctcagtgtggacaacctttccatcaaatatgcttatatgagtggctgagaggactactaactagtagacagagttttaacatcatatttggtgaatgtccatattgtagtaagccaattaccttaaaaatgtctggaaggaaacactga

SEQ ID NO: 729 - DNA, 1701 bp, Homo sapiens
atggaaggcaatcagtgggtactgggcaagaagattggctctggaggatttggattgatatatttagctttccccacaaataaaccagagaaagatgcaagacatgtagtaaaagtggaatatcaagaaaatggcccgttattttcagaacttaaattttatcagagagttgcaaaaaaagactgtatcaaaaagtggatagaacgcaaacaacttgattatttaggaattcctctgttttatggatctggtctgactgaattcaagggaagaagttacagatttatggtaatggaaagactaggaatagatttacagaagatctcaggccagaatggtacctttaaaaagtcaactgtcctgcaattaggtatccgaatgttggatgtactggaatatatacatgaaaatgaatatgttcatggtgatataaaagcagcaaatctacttttgggttacaaaaatccagaccaggtttatcttgcagattatggactttcctacagatattgtcccaatgggaaccacaaacagtatcaggaaaatcctagaaaaggccataatgggacaatagagtttaccagcttggatgcccacaagggagtagccttgtccagacgaagtgacgttgagatcctcggctactgcatgctgcggtggttgtgtgggaaacttccctgggaacagaacctgaaggaccctgtggctgtgcagactgctaaaacaaatctgttggacgagctcccccagtcagtgcttaaatgggctccttctggaagcagttgctgtgaaatagcccaatttttggtatgtgctcatagtttagcatatgatgaaaagccaaactatcaagccctcaagaaaattttgaaccctcatggaatacctttaggaccactggacttttccacaaaaggacagagtataaatgtccatactccaaacagtcaaaaagttgattcacaaaaggctgcaacaaagcaagtcaacaaggcacacaataggttaatcgaaaaaaaagtccacagtgagagaagcgctgagtcctgtgcaacatggaaagtgcagaaagaggagaaactgattggattgatgaacaatgaagcagctcagagctccttaataagcatttatagtcagtttttggcagcaatagaatcactaaaggcattctgggatgttatggatgaaatcgatgagaagacctgggtacttgagccagaaaaacctccacggagtgcaacagcacgcagaattgcattaggtaataatgtttccataaatatagaggtagaccccaggcatcctactatgcttcctgagtgcttctttcttggagctgaccatgtggtaaaacccctgggaattaagctgagcaggaacatacatttgtgggatccagaaaatagtgtgttacaaaatttgaaagatgttttagaaattgattttccagctcgtgctatcctggaaaaatctgattttactatggattgtggaatttgttatgcttatcaacttgacggtaccattcctgatcaagtgtgtgataattctcagtgtggacaacctttccatcaaatatgcttatatgagtggctgagaggactactaactagtagacagagttttaacatcatatttggtgaatgtccatattgtagtaagccaattaccttaaaaatgtctggaaggaaacactga

SEQ ID NO: 730 - DNA, 1875 bp, Homo sapiens
atggtaatggaaagactaggaatagatttacagaagatctcaggccagaatggtacctttaaaaagtcaactgtcctgcaattaggtatccgaatgttggatgtactggaatatatacatgaaaatgaatatgttcatggtgatataaaagcagcaaatctacttttgggttacaaaaatccagaccaggtttatcttgcagattatggactttcctacagatattgtcccaatgggaaccacaaacagtatcaggaaaatcctagaaaaggccataatgggacaatagagtttaccagcttggatgcccacaagggagtagccttgtccagacgaagtgacgttgagatcctcggctactgcatgctgcggtggttgtgtgggaaacttccctgggaacagaacctgaaggaccctgtggctgtgcagactgctaaaacaaatctgttggacgagctcccccagtcagtgcttaaatgggctccttctggaagcagttgctgtgaaatagcccaatttttggtatgtgctcatagtttagcatatgatgaaaagccaaactatcaagccctcaagaaaattttgaaccctcatggaatacctttaggaccactggacttttccacaaaaggacagagtataaatgtccatactccaaacagtcaaaaagttgattcacaaaaggctgcaacaaagcaagtcaacaaggcacacaataggttaatcgaaaaaaaagtccacagtgagagaagcgctgagtcctgtgcaacatggaaagtgcagaaagaggagaaactgattggattgatgaacaatgaagcagctcagggaagagacttccaccttaggatagtgttgcctgaagatttacaactgaagaatgcaagattattatgtagttggcagctgagaacaatacttagtggataccatcgaatagtacaacagagaatgcagcactctcctgatctaatgagctttatgatggagttgaagatgcttttggaagttgccttaaagaatagacaagagctgtatgcactacctcctcctccccagttctactcaagccttattgaagagataggaactcttggttgggataaacttgtgtatgcggatacctgcttcagtaccatcaagttaaaagcagaagatgcttctggtagagagcatttaatcactctcaagttgaaggcaaagtatcctgcagaatcaccagattattttgtggattttcctgttccattttgtgcctcctggacacctcaggtaaattctcctcagagctccttaataagcatttatagtcagtttttggcagcaatagaatcactaaaggcattctgggatgttatggatgaaatcgatgagaagacctgggtacttgagccagaaaaacctccacggagtgcaacagcacgcagaattgcattaggtaataatgtttccataaatatagaggtagaccccaggcatcctactatgcttcctgagtgcttctttcttggagctgaccatgtggtaaaacccctgggaattaagctgagcaggaacatacatttgtgggatccagaaaatagtgtgttacaaaatttgaaagatgttttagaaattgattttccagctcgtgctatcctggaaaaatctgattttactatggattgtggaatttgttatgcttatcaacttgacggtaccattcctgatcaagtgtgtgataattctcagtgtggacaacctttccatcaaatatgcttatatgagtggctgagaggactactaactagtagacagagttttaacatcatatttggtgaatgtccatattgtagtaagccaattaccttaaaaatgtctggaaggaaacactga

SEQ ID NO: 731 - DNA, 1860 bp, Homo sapiens
atggtaatggaaagactaggaatagatttacagaagatctcaggccagaatggtacctttaaaaagtcaactgtcctgcaattaggtatccgaatgttggatgtactggaatatatacatgaaaatgaatatgttcatggtgatataaaagcagcaaatctacttttgggttacaaaaatccagaccaggtttatcttgcagattatggactttcctacagatattgtcccaatgggaaccacaaacagtatcaggaaaatcctagaaaaggccataatgggacaatagagtttaccagcttggatgcccacaagggagtagccttgtccagacgaagtgacgttgagatcctcggctactgcatgctgcggtggttgtgtgggaaacttccctgggaacagaacctgaaggaccctgtggctgtgcagactgctaaaacaaatctgttggacgagctcccccagtcagtgcttaaatgggctccttctggaagcagttgctgtgaaatagcccaatttttggtatgtgctcatagtttagcatatgatgaaaagccaaactatcaagccctcaagaaaattttgaaccctcatggaatacctttaggaccactggacttttccacaaaaggacagagtataaatgtccatactccaaacagtcaaaaagttgattcacaaaaggctgcaacaaagcaagtcaacaaggcacacaataggttaatcgaaaaaaaagtccacagtgagagaagcgctgagtcctgtgcaacatggaaagtgcagaaagaggagaaactgattggattgatgaacaatgaagcagctcagggaagagacttccaccttaggatagtgttgcctgaagatttacaactgaagaatgcaagattattatgtagttggcagctgagaacaatacttagtggataccatcgaatagtacaacagagaatgcagcactctcctgatctaatgagctttatgatggagttgaagatgcttttggaagttgccttaaagaatagacaagagctgtatgcactacctcctcctccccagttctactcaagccttattgaagagataggaactcttggttgggataaacttgtgtatgcggatacctgcttcagtaccatcaagttaaaagcagaagatgcttctggtagagagcatttaatcactctcaagttgaaggcaaagtatcctgcagaatcaccagattattttgtggattttcctgttccattttgtgcctcctggacacctcagagctccttaataagcatttatagtcagtttttggcagcaatagaatcactaaaggcattctgggatgttatggatgaaatcgatgagaagacctgggtacttgagccagaaaaacctccacggagtgcaacagcacgcagaattgcattaggtaataatgtttccataaatatagaggtagaccccaggcatcctactatgcttcctgagtgcttctttcttggagctgaccatgtggtaaaacccctgggaattaagctgagcaggaacatacatttgtgggatccagaaaatagtgtgttacaaaatttgaaagatgttttagaaattgattttccagctcgtgctatcctggaaaaatctgattttactatggattgtggaatttgttatgcttatcaacttgacggtaccattcctgatcaagtgtgtgataattctcagtgtggacaacctttccatcaaatatgcttatatgagtggctgagaggactactaactagtagacagagttttaacatcatatttggtgaatgtccatattgtagtaagccaattaccttaaaaatgtctggaaggaaacactga

SEQ ID NO: 732 - DNA, 1698 bp, Homo sapiens
atggtaatggaaagactaggaatagatttacagaagatctcaggccagaatggtacctttaaaaagtcaactgtcctgcaattaggtatccgaatgttggatgtactggaatatatacatgaaaatgaatatgttcatggtgatataaaagcagcaaatctacttttgggttacaaaaatccagaccaggtttatcttgcagattatggactttcctacagatattgtcccaatgggaaccacaaacagtatcaggaaaatcctagaaaaggccataatgggacaatagagtttaccagcttggatgcccacaagggagtagccttgtccagacgaagtgacgttgagatcctcggctactgcatgctgcggtggttgtgtgggaaacttccctgggaacagaacctgaaggaccctgtggctgtgcagactgctaaaacaaatctgttggacgagctcccccagtcagtgcttaaatgggctccttctggaagcagttgctgtgaaatagcccaatttttggtatgtgctcatagtttagcatatgatgaaaagccaaactatcaagccctcaagaaaattttgaaccctcatggaatacctttaggaccactggacttttccacaaaaggacagagtataaatgtccatactccaaacagtcaaaaagttgattcacaaaaggctgcaacaaagcaagtcaacaaggcacacaataggttaatcgaaaaaaaagtccacagtgagagaagcgctgagtcctgtgcaacatggaaagtgcagaaagaggagaaactgattggattgatgaacaatgaagcagctcaggaagttgccttaaagaatagacaagagctgtatgcactacctcctcctccccagttctactcaagccttattgaagagataggaactcttggttgggataaacttgtgtatgcggatacctgcttcagtaccatcaagttaaaagcagaagatgcttctggtagagagcatttaatcactctcaagttgaaggcaaagtatcctgcagaatcaccagattattttgtggattttcctgttccattttgtgcctcctggacacctcaggtaaattctcctcagagctccttaataagcatttatagtcagtttttggcagcaatagaatcactaaaggcattctgggatgttatggatgaaatcgatgagaagacctgggtacttgagccagaaaaacctccacggagtgcaacagcacgcagaattgcattaggtaataatgtttccataaatatagaggtagaccccaggcatcctactatgcttcctgagtgcttctttcttggagctgaccatgtggtaaaacccctgggaattaagctgagcaggaacatacatttgtgggatccagaaaatagtgtgttacaaaatttgaaagatgttttagaaattgattttccagctcgtgctatcctggaaaaatctgattttactatggattgtggaatttgttatgcttatcaacttgacggtaccattcctgatcaagtgtgtgataattctcagtgtggacaacctttccatcaaatatgcttatatgagtggctgagaggactactaactagtagacagagttttaacatcatatttggtgaatgtccatattgtagtaagccaattaccttaaaaatgtctggaaggaaacactga

SEQ ID NO: 733 - DNA, 537 bp, Homo sapiens
atgccaccaaaaagaaatgaaaaatacaaacttcctattccatttccagaaggcaaggttctggatgatatggaaggcaatcagtgggtactgggcaagaagattggctctggaggatttggattgatatatttaggtaataatgtttccataaatatagaggtagaccccaggcatcctactatgcttcctgagtgcttctttcttggagctgaccatgtggtaaaacccctgggaattaagctgagcaggaacatacatttgtgggatccagaaaatagtgtgttacaaaatttgaaagatgttttagaaattgattttccagctcgtgctatcctggaaaaatctgattttactatggattgtggaatttgttatgcttatcaacttgacggtaccattcctgatcaagtgtgtgataattctcagtgtggacaacctttccatcaaatatgcttatatgagtggctgagaggactactaactagtagacagagttttaacatcatatttggtgaatgtccatattgtagtaag

SEQ ID NO: 734 - DNA, 2037 bp, Homo sapiens
atgccaccaaaaagaaatgaaaaatacaaacttcctattccatttccagaaggcaaggttctggatgatatggaaggcaatcagtgggtactgggcaagaagattggctctggaggatttggattgatatatttagctttccccacaaataaaccagagaaagatgcaagacatgtagtaaaagtggaatatcaagaaaatggcccgttattttcagaacttaaattttatcagagagttgcaaaaaaagactgtatcaaaaagtggatagaacgcaaacaacttgattatttaggaattcctctgttttatggatctggtctgactgaattcaagggaagaagttacagatttatggtaatggaaagactaggaatagatttacagaagatctcaggccagaatggtacctttaaaaagtcaactgtcctgcaattaggtatccgaatgttggatgtactggaatatatacatgaaaatgaatatgttcatggtgatataaaagcagcaaatctacttttgggttacaaaaatccagaccaggtttatcttgcagattatggactttcctacagatattgtcccaatgggaaccacaaacagtatcaggaaaatcctagaaaaggccataatgggacaatagagtttaccagcttggatgcccacaagggagtagccttgtccagacgaagtgacgttgagatcctcggctactgcatgctgcggtggttgtgtgggaaacttccctgggaacagaacctgaaggaccctgtggctgtgcagactgctaaaacaaatctgttggacgagctcccccagtcagtgcttaaatgggctccttctggaagcagttgctgtgaaatagcccaatttttggtatgtgctcatagtttagcatatgatgaaaagccaaactatcaagccctcaagaaaattttgaaccctcatggaatacctttaggaccactggacttttccacaaaaggacagagtataaatgtccatactccaaacagtcaaaaagttgattcacaaaaggctgcaacaaagcaagtcaacaaggcacacaataggttaatcgaaaaaaaagtccacagtgagagaagcgctgagtcctgtgcaacatggaaagtgcagaaagaggagaaactgattggattgatgaacaatgaagcagctcaggaagttgccttaaagaatagacaagagctgtatgcactacctcctcctccccagttctactcaagccttattgaagagataggaactcttggttgggataaacttgtgtatgcggatacctgcttcagtaccatcaagttaaaagcagaagatgcttctggtagagagcatttaatcactctcaagttgaaggcaaagtatcctgcagaatcaccagattattttgtggattttcctgttccattttgtgcctcctggacacctcagagctccttaataagcatttatagtcagtttttggcagcaatagaatcactaaaggcattctgggatgttatggatgaaatcgatgagaagacctgggtacttgagccagaaaaacctccacggagtgcaacagcacgcagaattgcattaggtaataatgtttccataaatatagaggtagaccccaggcatcctactatgcttcctgagtgcttctttcttggagctgaccatgtggtaaaacccctgggaattaagctgagcaggaacatacatttgtgggatccagaaaatagtgtgttacaaaatttgaaagatgttttagaaattgattttccagctcgtgctatcctggaaaaatctgattttactatggattgtggaatttgttatgcttatcaacttgacggtaccattcctgatcaagtgtgtgataattctcagtgtggacaacctttccatcaaatatgcttatatgagtggctgagaggactactaactagtagacagagttttaacatcatatttggtgaatgtccatattgtagtaagccaattaccttaaaaatgtctggaaggaaacactga

SEQ ID NO: 735 - DNA, 1332 bp, Homo sapiens
atggtaatggaaagactaggaatagatttacagaagatctcaggccagaatggtacctttaaaaagtcaactgtcctgcaattaggtatccgaatgttggatgtactggaatatatacatgaaaatgaatatgttcatggtgatataaaagcagcaaatctacttttgggttacaaaaatccagaccaggtttatcttgcagattatggactttcctacagatattgtcccaatgggaaccacaaacagtatcaggaaaatcctagaaaaggccataatgggacaatagagtttaccagcttggatgcccacaagggagtagccttgtccagacgaagtgacgttgagatcctcggctactgcatgctgcggtggttgtgtgggaaacttccctgggaacagaacctgaaggaccctgtggctgtgcagactgctaaaacaaatctgttggacgagctcccccagtcagtgcttaaatgggctccttctggaagcagttgctgtgaaatagcccaatttttggtatgtgctcatagtttagcatatgatgaaaagccaaactatcaagccctcaagaaaattttgaaccctcatggaatacctttaggaccactggacttttccacaaaaggacagagtataaatgtccatactccaaacagtcaaaaagttgattcacaaaaggctgcaacaaagcaagtcaacaaggcacacaataggttaatcgaaaaaaaagtccacagtgagagaagcgctgagtcctgtgcaacatggaaagtgcagaaagaggagaaactgattggattgatgaacaatgaagcagctcagagctccttaataagcatttatagtcagtttttggcagcaatagaatcactaaaggcattctgggatgttatggatgaaatcgatgagaagacctgggtacttgagccagaaaaacctccacggagtgcaacagcacgcagaattgcattagtggtaaaacccctgggaattaagctgagcaggaacatacatttgtgggatccagaaaatagtgtgttacaaaatttgaaagatgttttagaaattgattttccagctcgtgctatcctggaaaaatctgattttactatggattgtggaatttgttatgcttatcaacttgacggtaccattcctgatcaagtgtgtgataattctcagtgtggacaacctttccatcaaatatgcttatatgagtggctgagaggactactaactagtagacagagttttaacatcatatttggtgaatgtccatattgtagtaagccaattaccttaaaaatgtctggaaggaaacactga

SEQ ID NO: 736 - DNA, 1026 bp, Homo sapiens
atggaaggcaatcagtgggtactgggcaagaagattggctctggaggatttggattgatatatttagctttccccacaaataaaccagagaaagatgcaagacatgtagtaaaagtggaatatcaagaaaatggcccgttattttcagaacttaaattttatcagagagttgcaaaaaaagactgtatcaaaaagtggatagaacgcaaacaacttgattatttaggaattcctctgttttatggatctggtctgactgaattcaagggaagaagttacagatttatggtaatggaaagactaggaatagatttacagaagatctcaggccagaatggtacctttaaaaagtcaactgtcctgcaattaggtatccgaatgttggatgtactggaatatatacatgaaaatgaatatgttcatggtgatataaaagcagcaaatctacttttgggttacaaaaatccagaccagagctccttaataagcatttatagtcagtttttggcagcaatagaatcactaaaggcattctgggatgttatggatgaaatcgatgagaagacctgggtacttgagccagaaaaacctccacggagtgcaacagcacgcagaattgcattaggtaataatgtttccataaatatagaggtagaccccaggcatcctactatgcttcctgagtgcttctttcttggagctgaccatgtggtaaaacccctgggaattaagctgagcaggaacatacatttgtgggatccagaaaatagtgtgttacaaaatttgaaagatgttttagaaattgattttccagctcgtgctatcctggaaaaatctgattttactatggattgtggaatttgttatgcttatcaacttgacggtaccattcctgatcaagtgtgtgataattctcagtgtggacaacctttccatcaaatatgcttatatgagtggctgagaggactactaactagtagacagagttttaacatcatatttggtgaatgtccatattgtagtaag

SEQ ID NO: 737 - DNA, 1221 bp, Homo sapiens
atggtaatggaaagactaggaatagatttacagaagatctcaggccagaatggtacctttaaaaagtcaactgtcctgcaattaggtatccgaatgttggatgtactggaatatatacatgaaaatgaatatgttcatggtgatataaaagcagcaaatctacttttgggttacaaaaatccagaccagggaagagacttccaccttaggatagtgttgcctgaagatttacaactgaagaatgcaagattattatgtagttggcagctgagaacaatacttagtggataccatcgaatagtacaacagagaatgcagcactctcctgatctaatgagctttatgatggagttgaagatgcttttggaagttgccttaaagaatagacaagagctgtatgcactacctcctcctccccagttctactcaagccttattgaagagataggaactcttggttgggataaacttgtgtatgcggatacctgcttcagtaccatcaagttaaaagcagaagatgcttctggtagagagcatttaatcactctcaagttgaaggcaaagtatcctgcagaatcaccagattattttgtggattttcctgttccattttgtgcctcctggacacctcagagctccttaataagcatttatagtcagtttttggcagcaatagaatcactaaaggcattctgggatgttatggatgaaatcgatgagaagacctgggtacttgagccagaaaaacctccacggagtgcaacagcacgcagaattgcattaggtaataatgtttccataaatatagaggtagaccccaggcatcctactatgcttcctgagtgcttctttcttggagctgaccatgtggtaaaacccctgggaattaagctgagcaggaacatacatttgtgggatccagaaaatagtgtgttacaaaatttgaaagatgttttagaaattgattttccagctcgtgctatcctggaaaaatctgattttactatggattgtggaatttgttatgcttatcaacttgacggtaccattcctgatcaagtgtgtgataattctcagtgtggacaacctttccatcaaatatgcttatatgagtggctgagaggactactaactagtagacagagttttaacatcatatttggtgaatgtccatattgtagtaagccaattaccttaaaaatgtctggaaggaaacactga

SEQ ID NO: 738 - DNA, 741 bp, Homo sapiens
atggtaatggaaagactaggaatagatttacagaagatctcaggccagaatggtacctttaaaaagtcaactgtcctgcaattaggtatccgaatgttggatgtactggaatatatacatgaaaatgaatatgttcatggtgatataaaagcagcaaatctacttttgggttacaaaaatccagaccagagctccttaataagcatttatagtcagtttttggcagcaatagaatcactaaaggcattctgggatgttatggatgaaatcgatgagaagacctgggtacttgagccagaaaaacctccacggagtgcaacagcacgcagaattgcattaggtaataatgtttccataaatatagaggtagaccccaggcatcctactatgcttcctgagtgcttctttcttggagctgaccatgtggtaaaacccctgggaattaagctgagcaggaacatacatttgtgggatccagaaaatagtgtgttacaaaatttgaaagatgttttagaaattgattttccagctcgtgctatcctggaaaaatctgattttactatggattgtggaatttgttatgcttatcaacttgacggtaccattcctgatcaagtgtgtgataattctcagtgtggacaacctttccatcaaatatgcttatatgagtggctgagaggactactaactagtagacagagttttaacatcatatttggtgaatgtccatattgtagtaag

SEQ ID NO: 739 - DNA, 1932 bp, Homo sapiens
atggaaggcaatcagtgggtactgggcaagaagattggctctggaggatttggattgatatatttagctttccccacaaataaaccagagaaagatgcaagacatgtagtaaaagtggaatatcaagaaaatggcccgttattttcagaacttaaattttatcagagagttgcaaaaaaagactgtatcaaaaagtggatagaacgcaaacaacttgattatttaggaattcctctgttttatggatctggtctgactgaattcaagggaagaagttacagatttatggtaatggaaagactaggaatagatttacagaagatctcaggccagaatggtacctttaaaaagtcaactgtcctgcaattaggtatccgaatgttggatgtactggaatatatacatgaaaatgaatatgttcatggtgatataaaagcagcaaatctacttttgggttacaaaaatccagaccaggtttatcttgcagattatggactttcctacagatattgtcccaatgggaaccacaaacagtatcaggaaaatcctagaaaaggccataatgggacaatagagtttaccagcttggatgcccacaagggagtagccttgtccagacgaagtgacgttgagatcctcggctactgcatgctgcggtggttgtgtgggaaacttccctgggaacagaacctgaaggaccctgtggctgtgcagactgctaaaacaaatctgttggacgagctcccccagtcagtgcttaaatgggctccttctggaagcagttgctgtgaaatagcccaatttttggtatgtgctcatagtttagcatatgatgaaaagccaaactatcaagccctcaagaaaattttgaaccctcatggaatacctttaggaccactggacttttccacaaaaggacagagtataaatgtccatactccaaacagtcaaaaagttgattcacaaaaggctgcaacaaagcaagtcaacaaggcacacaataggttaatcgaaaaaaaagtccacagtgagagaagcgctgagtcctgtgcaacatggaaagtgcagaaagaggagaaactgattggattgatgaacaatgaagcagctcaggaagttgccttaaagaatagacaagagctgtatgcactacctcctcctccccagttctactcaagccttattgaagagataggaactcttggttgggataaacttgtgtatgcggatacctgcttcagtaccatcaagttaaaagcagaagatgcttctggtagagagcatttaatcactctcaagttgaaggcaaagtatcctgcagaatcaccagattattttgtggattttcctgttccattttgtgcctcctggacacctcagagctccttaataagcatttatagtcagtttttggcagcaatagaatcactaaaggcattctgggatgttatggatgaaatcgatgagaagacctgggtacttgagccagaaaaacctccacggagtgcaacagcacgcagaattgcattaggtaataatgtttccataaatatagaggtagaccccaggcatcctactatgcttcctgagtgcttctttcttggagctgaccatgtggtaaaacccctgggaattaagctgagcaggaacatacatttgtgggatccagaaaatagtgtgttacaaaatttgaaagatgttttagaaattgattttccagctcgtgctatcctggaaaaatctgattttactatggattgtggaatttgttatgcttatcaacttgacggtaccattcctgatcaagtgtgtgataattctcagtgtggacaacctttccatcaaatatgcttatatgagtggctgagaggactactaactagtagacagagttttaacatcatatttggtgaatgtccatattgtagtaag

SEQ ID NO: 740 - DNA, 1413 bp, Homo sapiens
atgccaccaaaaagaaatgaaaaatacaaacttcctattccatttccagaaggcaaggttctggatgatatggaaggcaatcagtgggtactgggcaagaagattggctctggaggatttggattgatatatttagctttccccacaaataaaccagagaaagatgcaagacatgtagtaaaagtggaatatcaagaaaatggcccgttattttcagaacttaaattttatcagagagttgcaaaaaaagactgtatcaaaaagtggatagaacgcaaacaacttgattatttaggaattcctctgttttatggatctggtctgactgaattcaagggaagaagttacagatttatggtaatggaaagactaggaatagatttacagaagatctcaggccagaatggtacctttaaaaagtcaactgtcctgcaattaggtatccgaatgttggatgtactggaatatatacatgaaaatgaatatgttcatggtgatataaaagcagcaaatctacttttgggttacaaaaatccagaccaggaagttgccttaaagaatagacaagagctgtatgcactacctcctcctccccagttctactcaagccttattgaagagataggaactcttggttgggataaacttgtgtatgcggatacctgcttcagtaccatcaagttaaaagcagaagatgcttctggtagagagcatttaatcactctcaagttgaaggcaaagtatcctgcagaatcaccagattattttgtggattttcctgttccattttgtgcctcctggacacctcaggtaaattctcctcagagctccttaataagcatttatagtcagtttttggcagcaatagaatcactaaaggcattctgggatgttatggatgaaatcgatgagaagacctgggtacttgagccagaaaaacctccacggagtgcaacagcacgcagaattgcattaggtaataatgtttccataaatatagaggtagaccccaggcatcctactatgcttcctgagtgcttctttcttggagctgaccatgtggtaaaacccctgggaattaagctgagcaggaacatacatttgtgggatccagaaaatagtgtgttacaaaatttgaaagatgttttagaaattgattttccagctcgtgctatcctggaaaaatctgattttactatggattgtggaatttgttatgcttatcaacttgacggtaccattcctgatcaagtgtgtgataattctcagtgtggacaacctttccatcaaatatgcttatatgagtggctgagaggactactaactagtagacagagttttaacatcatatttggtgaatgtccatattgtagtaagccaattaccttaaaaatgtctggaaggaaacactga

SEQ ID NO: 741 - DNA, 1884 bp, Homo sapiens
atggaaggcaatcagtgggtactgggcaagaagattggctctggaggatttggattgatatatttagctttccccacaaataaaccagagaaagatgcaagacatgtagtaaaagtggaatatcaagaaaatggcccgttattttcagaacttaaattttatcagagagttgcaaaaaaagactgtatcaaaaagtggatagaacgcaaacaacttgattatttaggaattcctctgttttatggatctggtctgactgaattcaagggaagaagttacagatttatggtaatggaaagactaggaatagatttacagaagatctcaggccagaatggtacctttaaaaagtcaactgtcctgcaattaggtatccgaatgttggatgtactggaatatatacatgaaaatgaatatgttcatggtgatataaaagcagcaaatctacttttgggttacaaaaatccagaccaggtttatcttgcagattatggactttcctacagatattgtcccaatgggaaccacaaacagtatcaggaaaatcctagaaaaggccataatgggacaatagagtttaccagcttggatgcccacaagggagtagccttgtccagacgaagtgacgttgagatcctcggctactgcatgctgcggtggttgtgtgggaaacttccctgggaacagaacctgaaggaccctgtggctgtgcagactgctaaaacaaatctgttggacgagctcccccagtcagtgcttaaatgggctccttctggaagcagttgctgtgaaatagcccaatttttggtatgtgctcatagtttagcatatgatgaaaagccaaactatcaagccctcaagaaaattttgaaccctcatggaatacctttaggaccactggacttttccacaaaaggacagagtataaatgtccatactccaaacagtcaaaaagttgattcacaaaaggctgcaacaaagcaagtcaacaaggcacacaataggttaatcgaaaaaaaagtccacagtgagagaagcgctgagtcctgtgcaacatggaaagtgcagaaagaggagaaactgattggattgatgaacaatgaagcagctcaggaagttgccttaaagaatagacaagagctgtatgcactacctcctcctccccagttctactcaagccttattgaagagataggaactcttggttgggataaacttgtgtatgcggatacctgcttcagtaccatcaagttaaaagcagaagatgcttctggtagagagcatttaatcactctcaagttgaaggcaaagtatcctgcagaatcaccagattattttgtggattttcctgttccattttgtgcctcctggacacctcagagctccttaataagcatttatagtcagtttttggcagcaatagaatcactaaaggcattctgggatgttatggatgaaatcgatgagaagacctgggtacttgagccagaaaaacctccacggagtgcaacagcacgcagaattgcattagtggtaaaacccctgggaattaagctgagcaggaacatacatttgtgggatccagaaaatagtgtgttacaaaatttgaaagatgttttagaaattgattttccagctcgtgctatcctggaaaaatctgattttactatggattgtggaatttgttatgcttatcaacttgacggtaccattcctgatcaagtgtgtgataattctcagtgtggacaacctttccatcaaatatgcttatatgagtggctgagaggactactaactagtagacagagttttaacatcatatttggtgaatgtccatattgtagtaagccaattaccttaaaaatgtctggaaggaaacactga

SEQ ID NO: 742 - DNA, 1008 bp, Homo sapiens
atggtaatggaaagactaggaatagatttacagaagatctcaggccagaatggtacctttaaaaagtcaactgtcctgcaattaggtatccgaatgttggatgtactggaatatatacatgaaaatgaatatgttcatggtgatataaaagcagcaaatctacttttgggttacaaaaatccagaccaggaagttgccttaaagaatagacaagagctgtatgcactacctcctcctccccagttctactcaagccttattgaagagataggaactcttggttgggataaacttgtgtatgcggatacctgcttcagtaccatcaagttaaaagcagaagatgcttctggtagagagcatttaatcactctcaagttgaaggcaaagtatcctgcagaatcaccagattattttgtggattttcctgttccattttgtgcctcctggacacctcagagctccttaataagcatttatagtcagtttttggcagcaatagaatcactaaaggcattctgggatgttatggatgaaatcgatgagaagacctgggtacttgagccagaaaaacctccacggagtgcaacagcacgcagaattgcattaggtaataatgtttccataaatatagaggtagaccccaggcatcctactatgcttcctgagtgcttctttcttggagctgaccatgtggtaaaacccctgggaattaagctgagcaggaacatacatttgtgggatccagaaaatagtgtgttacaaaatttgaaagatgttttagaaattgattttccagctcgtgctatcctggaaaaatctgattttactatggattgtggaatttgttatgcttatcaacttgacggtaccattcctgatcaagtgtgtgataattctcagtgtggacaacctttccatcaaatatgcttatatgagtggctgagaggactactaactagtagacagagttttaacatcatatttggtgaatgtccatattgtagtaag

SEQ ID NO: 743 - DNA, 2001 bp, Homo sapiens
atgccaccaaaaagaaatgaaaaatacaaacttcctattccatttccagaaggcaaggttctggatgatatggaaggcaatcagtgggtactgggcaagaagattggctctggaggatttggattgatatatttagctttccccacaaataaaccagagaaagatgcaagacatgtagtaaaagtggaatatcaagaaaatggcccgttattttcagaacttaaattttatcagagagttgcaaaaaaagactgtatcaaaaagtggatagaacgcaaacaacttgattatttaggaattcctctgttttatggatctggtctgactgaattcaagggaagaagttacagatttatggtaatggaaagactaggaatagatttacagaagatctcaggccagaatggtacctttaaaaagtcaactgtcctgcaattaggtatccgaatgttggatgtactggaatatatacatgaaaatgaatatgttcatggtgatataaaagcagcaaatctacttttgggttacaaaaatccagaccaggtttatcttgcagattatggactttcctacagatattgtcccaatgggaaccacaaacagtatcaggaaaatcctagaaaaggccataatgggacaatagagtttaccagcttggatgcccacaagggagtagccttgtccagacgaagtgacgttgagatcctcggctactgcatgctgcggtggttgtgtgggaaacttccctgggaacagaacctgaaggaccctgtggctgtgcagactgctaaaacaaatctgttggacgagctcccccagtcagtgcttaaatgggctccttctggaagcagttgctgtgaaatagcccaatttttggtatgtgctcatagtttagcatatgatgaaaagccaaactatcaagccctcaagaaaattttgaaccctcatggaatacctttaggaccactggacttttccacaaaaggacagagtataaatgtccatactccaaacagtcaaaaagttgattcacaaaaggctgcaacaaagcaagtcaacaaggcacacaataggttaatcgaaaaaaaagtccacagtgagagaagcgctgagtcctgtgcaacatggaaagtgcagaaagaggagaaactgattggattgatgaacaatgaagcagctcaggaagttgccttaaagaatagacaagagctgtatgcactacctcctcctccccagttctactcaagccttattgaagagataggaactcttggttgggataaacttgtgtatgcggatacctgcttcagtaccatcaagttaaaagcagaagatgcttctggtagagagcatttaatcactctcaagttgaaggcaaagtatcctgcagaatcaccagattattttgtggattttcctgttccattttgtgcctcctggacacctcagagctccttaataagcatttatagtcagtttttggcagcaatagaatcactaaaggcattctgggatgttatggatgaaatcgatgagaagacctgggtacttgagccagaaaaacctccacggagtgcaacagcacgcagaattgcattaggtaataatgtttccataaatatagaggtagaccccaggcatcctactatgcttcctgagtgcttctttcttggagctgaccatgtggtaaaacccctgggaattaagctgagcaggaacatacatttgtgggatccagaaaatagtgtgttacaaaatttgaaagatgttttagaaattgattttccagctcgtgctatcctggaaaaatctgattttactatggattgtggaatttgttatgcttatcaacttgacggtaccattcctgatcaagtgtgtgataattctcagtgtggacaacctttccatcaaatatgcttatatgagtggctgagaggactactaactagtagacagagttttaacatcatatttggtgaatgtccatattgtagtaag

SEQ ID NO: 744 - DNA, 1983 bp, Homo sapiens
atggaaggcaatcagtgggtactgggcaagaagattggctctggaggatttggattgatatatttagctttccccacaaataaaccagagaaagatgcaagacatgtagtaaaagtggaatatcaagaaaatggcccgttattttcagaacttaaattttatcagagagttgcaaaaaaagactgtatcaaaaagtggatagaacgcaaacaacttgattatttaggaattcctctgttttatggatctggtctgactgaattcaagggaagaagttacagatttatggtaatggaaagactaggaatagatttacagaagatctcaggccagaatggtacctttaaaaagtcaactgtcctgcaattaggtatccgaatgttggatgtactggaatatatacatgaaaatgaatatgttcatggtgatataaaagcagcaaatctacttttgggttacaaaaatccagaccaggtttatcttgcagattatggactttcctacagatattgtcccaatgggaaccacaaacagtatcaggaaaatcctagaaaaggccataatgggacaatagagtttaccagcttggatgcccacaagggagtagccttgtccagacgaagtgacgttgagatcctcggctactgcatgctgcggtggttgtgtgggaaacttccctgggaacagaacctgaaggaccctgtggctgtgcagactgctaaaacaaatctgttggacgagctcccccagtcagtgcttaaatgggctccttctggaagcagttgctgtgaaatagcccaatttttggtatgtgctcatagtttagcatatgatgaaaagccaaactatcaagccctcaagaaaattttgaaccctcatggaatacctttaggaccactggacttttccacaaaaggacagagtataaatgtccatactccaaacagtcaaaaagttgattcacaaaaggctgcaacaaagcaagtcaacaaggcacacaataggttaatcgaaaaaaaagtccacagtgagagaagcgctgagtcctgtgcaacatggaaagtgcagaaagaggagaaactgattggattgatgaacaatgaagcagctcaggaagttgccttaaagaatagacaagagctgtatgcactacctcctcctccccagttctactcaagccttattgaagagataggaactcttggttgggataaacttgtgtatgcggatacctgcttcagtaccatcaagttaaaagcagaagatgcttctggtagagagcatttaatcactctcaagttgaaggcaaagtatcctgcagaatcaccagattattttgtggattttcctgttccattttgtgcctcctggacacctcaggtaaattctcctcagagctccttaataagcatttatagtcagtttttggcagcaatagaatcactaaaggcattctgggatgttatggatgaaatcgatgagaagacctgggtacttgagccagaaaaacctccacggagtgcaacagcacgcagaattgcattaggtaataatgtttccataaatatagaggtagaccccaggcatcctactatgcttcctgagtgcttctttcttggagctgaccatgtggtaaaacccctgggaattaagctgagcaggaacatacatttgtgggatccagaaaatagtgtgttacaaaatttgaaagatgttttagaaattgattttccagctcgtgctatcctggaaaaatctgattttactatggattgtggaatttgttatgcttatcaacttgacggtaccattcctgatcaagtgtgtgataattctcagtgtggacaacctttccatcaaatatgcttatatgagtggctgagaggactactaactagtagacagagttttaacatcatatttggtgaatgtccatattgtagtaagccaattaccttaaaaatgtctggaaggaaacactga

SEQ ID NO: 745 - DNA, 1053 bp, Homo sapiens
atggtaatggaaagactaggaatagatttacagaagatctcaggccagaatggtacctttaaaaagtcaactgtcctgcaattaggtatccgaatgttggatgtactggaatatatacatgaaaatgaatatgttcatggtgatataaaagcagcaaatctacttttgggttacaaaaatccagaccaggtttatcttgcagattatggactttcctacagatattgtcccaatgggaaccacaaacagtatcaggaaaatcctagaaaaggccataatgggacaatagagtttaccagcttggatgcccacaagggagtagccttgtccagacgaagtgacgttgagatcctcggctactgcatgctgcggtggttgtgtgggaaacttccctgggaacagaacctgaaggaccctgtggctgtgcagactgctaaaacaaatctgttggacgagctcccccagtcagtgcttaaatgggctccttctggaagcagttgctgtgaaatagcccaatttttggtatgtgctcatagtttagcatatgatgaaaagccaaactatcaagccctcaagaaaattttgaaccctcatggaatacctttaggaccactggacttttccacaaaaggacagagtataaatgtccatactccaaacagtcaaaaagttgattcacaaaaggctgcaacaaagcaagtcaacaaggcacacaataggttaatcgaaaaaaaagtccacagtgagagaagcgctgagtcctgtgcaacatggaaagtgcagaaagaggagaaactgattggattgatgaacaatgaagcagctcaggattttactatggattgtggaatttgttatgcttatcaacttgacggtaccattcctgatcaagtgtgtgataattctcagtgtggacaacctttccatcaaatatgcttatatgagtggctgagaggactactaactagtagacagagttttaacatcatatttggtgaatgtccatattgtagtaagccaattaccttaaaaatgtctggaaggaaacactga

SEQ ID NO: 746 - DNA, 1044 bp, Homo sapiens
atggtaatggaaagactaggaatagatttacagaagatctcaggccagaatggtacctttaaaaagtcaactgtcctgcaattaggtatccgaatgttggatgtactggaatatatacatgaaaatgaatatgttcatggtgatataaaagcagcaaatctacttttgggttacaaaaatccagaccaggaagttgccttaaagaatagacaagagctgtatgcactacctcctcctccccagttctactcaagccttattgaagagataggaactcttggttgggataaacttgtgtatgcggatacctgcttcagtaccatcaagttaaaagcagaagatgcttctggtagagagcatttaatcactctcaagttgaaggcaaagtatcctgcagaatcaccagattattttgtggattttcctgttccattttgtgcctcctggacacctcagagctccttaataagcatttatagtcagtttttggcagcaatagaatcactaaaggcattctgggatgttatggatgaaatcgatgagaagacctgggtacttgagccagaaaaacctccacggagtgcaacagcacgcagaattgcattaggtaataatgtttccataaatatagaggtagaccccaggcatcctactatgcttcctgagtgcttctttcttggagctgaccatgtggtaaaacccctgggaattaagctgagcaggaacatacatttgtgggatccagaaaatagtgtgttacaaaatttgaaagatgttttagaaattgattttccagctcgtgctatcctggaaaaatctgattttactatggattgtggaatttgttatgcttatcaacttgacggtaccattcctgatcaagtgtgtgataattctcagtgtggacaacctttccatcaaatatgcttatatgagtggctgagaggactactaactagtagacagagttttaacatcatatttggtgaatgtccatattgtagtaagccaattaccttaaaaatgtctggaaggaaacactga

SEQ ID NO: 747 - DNA, 1770 bp, Homo sapiens
atgccaccaaaaagaaatgaaaaatacaaacttcctattccatttccagaaggcaaggttctggatgatatggaaggcaatcagtgggtactgggcaagaagattggctctggaggatttggattgatatatttagctttccccacaaataaaccagagaaagatgcaagacatgtagtaaaagtggaatatcaagaaaatggcccgttattttcagaacttaaattttatcagagagttgcaaaaaaagactgtatcaaaaagtggatagaacgcaaacaacttgattatttaggaattcctctgttttatggatctggtctgactgaattcaagggaagaagttacagatttatggtaatggaaagactaggaatagatttacagaagatctcaggccagaatggtacctttaaaaagtcaactgtcctgcaattaggtatccgaatgttggatgtactggaatatatacatgaaaatgaatatgttcatggtgatataaaagcagcaaatctacttttgggttacaaaaatccagaccaggtttatcttgcagattatggactttcctacagatattgtcccaatgggaaccacaaacagtatcaggaaaatcctagaaaaggccataatgggacaatagagtttaccagcttggatgcccacaagggagtagccttgtccagacgaagtgacgttgagatcctcggctactgcatgctgcggtggttgtgtgggaaacttccctgggaacagaacctgaaggaccctgtggctgtgcagactgctaaaacaaatctgttggacgagctcccccagtcagtgcttaaatgggctccttctggaagcagttgctgtgaaatagcccaatttttggtatgtgctcatagtttagcatatgatgaaaagccaaactatcaagccctcaagaaaattttgaaccctcatggaatacctttaggaccactggacttttccacaaaaggacagagtataaatgtccatactccaaacagtcaaaaagttgattcacaaaaggctgcaacaaagcaagtcaacaaggcacacaataggttaatcgaaaaaaaagtccacagtgagagaagcgctgagtcctgtgcaacatggaaagtgcagaaagaggagaaactgattggattgatgaacaatgaagcagctcagagctccttaataagcatttatagtcagtttttggcagcaatagaatcactaaaggcattctgggatgttatggatgaaatcgatgagaagacctgggtacttgagccagaaaaacctccacggagtgcaacagcacgcagaattgcattaggtaataatgtttccataaatatagaggtagaccccaggcatcctactatgcttcctgagtgcttctttcttggagctgaccatgtggtaaaacccctgggaattaagctgagcaggaacatacatttgtgggatccagaaaatagtgtgttacaaaatttgaaagatgttttagaaattgattttccagctcgtgctatcctggaaaaatctgattttactatggattgtggaatttgttatgcttatcaacttgacggtaccattcctgatcaagtgtgtgataattctcagtgtggacaacctttccatcaaatatgcttatatgagtggctgagaggactactaactagtagacagagttttaacatcatatttggtgaatgtccatattgtagtaagccaattaccttaaaaatgtctggaaggaaacactga

SEQ ID NO: 748 - DNA, 1953 bp, Homo sapiens
atgccaccaaaaagaaatgaaaaatacaaacttcctattccatttccagaaggcaaggttctggatgatatggaaggcaatcagtgggtactgggcaagaagattggctctggaggatttggattgatatatttagctttccccacaaataaaccagagaaagatgcaagacatgtagtaaaagtggaatatcaagaaaatggcccgttattttcagaacttaaattttatcagagagttgcaaaaaaagactgtatcaaaaagtggatagaacgcaaacaacttgattatttaggaattcctctgttttatggatctggtctgactgaattcaagggaagaagttacagatttatggtaatggaaagactaggaatagatttacagaagatctcaggccagaatggtacctttaaaaagtcaactgtcctgcaattaggtatccgaatgttggatgtactggaatatatacatgaaaatgaatatgttcatggtgatataaaagcagcaaatctacttttgggttacaaaaatccagaccaggtttatcttgcagattatggactttcctacagatattgtcccaatgggaaccacaaacagtatcaggaaaatcctagaaaaggccataatgggacaatagagtttaccagcttggatgcccacaagggagtagccttgtccagacgaagtgacgttgagatcctcggctactgcatgctgcggtggttgtgtgggaaacttccctgggaacagaacctgaaggaccctgtggctgtgcagactgctaaaacaaatctgttggacgagctcccccagtcagtgcttaaatgggctccttctggaagcagttgctgtgaaatagcccaatttttggtatgtgctcatagtttagcatatgatgaaaagccaaactatcaagccctcaagaaaattttgaaccctcatggaatacctttaggaccactggacttttccacaaaaggacagagtataaatgtccatactccaaacagtcaaaaagttgattcacaaaaggctgcaacaaagcaagtcaacaaggcacacaataggttaatcgaaaaaaaagtccacagtgagagaagcgctgagtcctgtgcaacatggaaagtgcagaaagaggagaaactgattggattgatgaacaatgaagcagctcaggaagttgccttaaagaatagacaagagctgtatgcactacctcctcctccccagttctactcaagccttattgaagagataggaactcttggttgggataaacttgtgtatgcggatacctgcttcagtaccatcaagttaaaagcagaagatgcttctggtagagagcatttaatcactctcaagttgaaggcaaagtatcctgcagaatcaccagattattttgtggattttcctgttccattttgtgcctcctggacacctcagagctccttaataagcatttatagtcagtttttggcagcaatagaatcactaaaggcattctgggatgttatggatgaaatcgatgagaagacctgggtacttgagccagaaaaacctccacggagtgcaacagcacgcagaattgcattagtggtaaaacccctgggaattaagctgagcaggaacatacatttgtgggatccagaaaatagtgtgttacaaaatttgaaagatgttttagaaattgattttccagctcgtgctatcctggaaaaatctgattttactatggattgtggaatttgttatgcttatcaacttgacggtaccattcctgatcaagtgtgtgataattctcagtgtggacaacctttccatcaaatatgcttatatgagtggctgagaggactactaactagtagacagagttttaacatcatatttggtgaatgtccatattgtagtaagccaattaccttaaaaatgtctggaaggaaacactga

SEQ ID NO: 749 - DNA, 1491 bp, Homo sapiens
atgccaccaaaaagaaatgaaaaatacaaacttcctattccatttccagaaggcaaggttctggatgatatggaaggcaatcagtgggtactgggcaagaagattggctctggaggatttggattgatatatttagctttccccacaaataaaccagagaaagatgcaagacatgtagtaaaagtggaatatcaagaaaatggcccgttattttcagaacttaaattttatcagagagttgcaaaaaaagactgtatcaaaaagtggatagaacgcaaacaacttgattatttaggaattcctctgttttatggatctggtctgactgaattcaagggaagaagttacagatttatggtaatggaaagactaggaatagatttacagaagatctcaggccagaatggtacctttaaaaagtcaactgtcctgcaattaggtatccgaatgttggatgtactggaatatatacatgaaaatgaatatgttcatggtgatataaaagcagcaaatctacttttgggttacaaaaatccagaccagggaagagacttccaccttaggatagtgttgcctgaagatttacaactgaagaatgcaagattattatgtagttggcagctgagaacaatacttagtggataccatcgaatagtacaacagagaatgcagcactctcctgatctaatgagctttatgatggagttgaagatgcttttggaagttgccttaaagaatagacaagagctgtatgcactacctcctcctccccagttctactcaagccttattgaagagataggaactcttggttgggataaacttgtgtatgcggatacctgcttcagtaccatcaagttaaaagcagaagatgcttctggtagagagcatttaatcactctcaagttgaaggcaaagtatcctgcagaatcaccagattattttgtggattttcctgttccattttgtgcctcctggacacctcagagctccttaataagcatttatagtcagtttttggcagcaatagaatcactaaaggcattctgggatgttatggatgaaatcgatgagaagacctgggtacttgagccagaaaaacctccacggagtgcaacagcacgcagaattgcattagtggtaaaacccctgggaattaagctgagcaggaacatacatttgtgggatccagaaaatagtgtgttacaaaatttgaaagatgttttagaaattgattttccagctcgtgctatcctggaaaaatctgattttactatggattgtggaatttgttatgcttatcaacttgacggtaccattcctgatcaagtgtgtgataattctcagtgtggacaacctttccatcaaatatgcttatatgagtggctgagaggactactaactagtagacagagttttaacatcatatttggtgaatgtccatattgtagtaagccaattaccttaaaaatgtctggaaggaaacactga

SEQ ID NO: 750 - DNA, 1338 bp, Homo sapiens
atggaaggcaatcagtgggtactgggcaagaagattggctctggaggatttggattgatatatttagctttccccacaaataaaccagagaaagatgcaagacatgtagtaaaagtggaatatcaagaaaatggcccgttattttcagaacttaaattttatcagagagttgcaaaaaaagactgtatcaaaaagtggatagaacgcaaacaacttgattatttaggaattcctctgttttatggatctggtctgactgaattcaagggaagaagttacagatttatggtaatggaaagactaggaatagatttacagaagatctcaggccagaatggtacctttaaaaagtcaactgtcctgcaattaggtatccgaatgttggatgtactggaatatatacatgaaaatgaatatgttcatggtgatataaaagcagcaaatctacttttgggttacaaaaatccagaccaggtttatcttgcagattatggactttcctacagatattgtcccaatgggaaccacaaacagtatcaggaaaatcctagaaaaggccataatgggacaatagagtttaccagcttggatgcccacaagggagtagccttgtccagacgaagtgacgttgagatcctcggctactgcatgctgcggtggttgtgtgggaaacttccctgggaacagaacctgaaggaccctgtggctgtgcagactgctaaaacaaatctgttggacgagctcccccagtcagtgcttaaatgggctccttctggaagcagttgctgtgaaatagcccaatttttggtatgtgctcatagtttagcatatgatgaaaagccaaactatcaagccctcaagaaaattttgaaccctcatggaatacctttaggaccactggacttttccacaaaaggacagagtataaatgtccatactccaaacagtcaaaaagttgattcacaaaaggctgcaacaaagcaagtcaacaaggcacacaataggttaatcgaaaaaaaagtccacagtgagagaagcgctgagtcctgtgcaacatggaaagtgcagaaagaggagaaactgattggattgatgaacaatgaagcagctcaggattttactatggattgtggaatttgttatgcttatcaacttgacggtaccattcctgatcaagtgtgtgataattctcagtgtggacaacctttccatcaaatatgcttatatgagtggctgagaggactactaactagtagacagagttttaacatcatatttggtgaatgtccatattgtagtaagccaattaccttaaaaatgtctggaaggaaacactga

SEQ ID NO: 751 - DNA, 1362 bp, Homo sapiens
atgccaccaaaaagaaatgaaaaatacaaacttcctattccatttccagaaggcaaggttctggatgatatggaaggcaatcagtgggtactgggcaagaagattggctctggaggatttggattgatatatttagctttccccacaaataaaccagagaaagatgcaagacatgtagtaaaagtggaatatcaagaaaatggcccgttattttcagaacttaaattttatcagagagttgcaaaaaaagactgtatcaaaaagtggatagaacgcaaacaacttgattatttaggaattcctctgttttatggatctggtctgactgaattcaagggaagaagttacagatttatggtaatggaaagactaggaatagatttacagaagatctcaggccagaatggtacctttaaaaagtcaactgtcctgcaattaggtatccgaatgttggatgtactggaatatatacatgaaaatgaatatgttcatggtgatataaaagcagcaaatctacttttgggttacaaaaatccagaccaggaagttgccttaaagaatagacaagagctgtatgcactacctcctcctccccagttctactcaagccttattgaagagataggaactcttggttgggataaacttgtgtatgcggatacctgcttcagtaccatcaagttaaaagcagaagatgcttctggtagagagcatttaatcactctcaagttgaaggcaaagtatcctgcagaatcaccagattattttgtggattttcctgttccattttgtgcctcctggacacctcagagctccttaataagcatttatagtcagtttttggcagcaatagaatcactaaaggcattctgggatgttatggatgaaatcgatgagaagacctgggtacttgagccagaaaaacctccacggagtgcaacagcacgcagaattgcattaggtaataatgtttccataaatatagaggtagaccccaggcatcctactatgcttcctgagtgcttctttcttggagctgaccatgtggtaaaacccctgggaattaagctgagcaggaacatacatttgtgggatccagaaaatagtgtgttacaaaatttgaaagatgttttagaaattgattttccagctcgtgctatcctggaaaaatctgattttactatggattgtggaatttgttatgcttatcaacttgacggtaccattcctgatcaagtgtgtgataattctcagtgtggacaacctttccatcaaatatgcttatatgagtggctgagaggactactaactagtagacagagttttaacatcatatttggtgaatgtccatattgtagtaag

SEQ ID NO: 752 - DNA, 1095 bp, Homo sapiens
atgccaccaaaaagaaatgaaaaatacaaacttcctattccatttccagaaggcaaggttctggatgatatggaaggcaatcagtgggtactgggcaagaagattggctctggaggatttggattgatatatttagctttccccacaaataaaccagagaaagatgcaagacatgtagtaaaagtggaatatcaagaaaatggcccgttattttcagaacttaaattttatcagagagttgcaaaaaaagactgtatcaaaaagtggatagaacgcaaacaacttgattatttaggaattcctctgttttatggatctggtctgactgaattcaagggaagaagttacagatttatggtaatggaaagactaggaatagatttacagaagatctcaggccagaatggtacctttaaaaagtcaactgtcctgcaattaggtatccgaatgttggatgtactggaatatatacatgaaaatgaatatgttcatggtgatataaaagcagcaaatctacttttgggttacaaaaatccagaccagagctccttaataagcatttatagtcagtttttggcagcaatagaatcactaaaggcattctgggatgttatggatgaaatcgatgagaagacctgggtacttgagccagaaaaacctccacggagtgcaacagcacgcagaattgcattaggtaataatgtttccataaatatagaggtagaccccaggcatcctactatgcttcctgagtgcttctttcttggagctgaccatgtggtaaaacccctgggaattaagctgagcaggaacatacatttgtgggatccagaaaatagtgtgttacaaaatttgaaagatgttttagaaattgattttccagctcgtgctatcctggaaaaatctgattttactatggattgtggaatttgttatgcttatcaacttgacggtaccattcctgatcaagtgtgtgataattctcagtgtggacaacctttccatcaaatatgcttatatgagtggctgagaggactactaactagtagacagagttttaacatcatatttggtgaatgtccatattgtagtaag

SEQ ID NO: 753 - DNA, 1371 bp, Homo sapiens
atgccaccaaaaagaaatgaaaaatacaaacttcctattccatttccagaaggcaaggttctggatgatatggaaggcaatcagtgggtactgggcaagaagattggctctggaggatttggattgatatatttagctttccccacaaataaaccagagaaagatgcaagacatgtagtaaaagtggaatatcaagaaaatggcccgttattttcagaacttaaattttatcagagagttgcaaaaaaagactgtatcaaaaagtggatagaacgcaaacaacttgattatttaggaattcctctgttttatggatctggtctgactgaattcaagggaagaagttacagatttatggtaatggaaagactaggaatagatttacagaagatctcaggccagaatggtacctttaaaaagtcaactgtcctgcaattaggtatccgaatgttggatgtactggaatatatacatgaaaatgaatatgttcatggtgatataaaagcagcaaatctacttttgggttacaaaaatccagaccaggtttatcttgcagattatggactttcctacagatattgtcccaatgggaaccacaaacagtatcaggaaaatcctagaaaaggccataatgggacaatagagtttaccagcttggatgcccacaagggagtagccttgtccagacgaagtgacgttgagatcctcggctactgcatgctgcggtggttgtgtgggaaacttccctgggaacagaacctgaaggaccctgtggctgtgcagactgctaaaacaaatctgttggacgagctcccccagtcagtgcttaaatgggctccttctggaagcagttgctgtgaaatagcccaatttttggtatgtgctcatagtttagcatatgatgaaaagccaaactatcaagccctcaagaaaattttgaaccctcatggaatacctttaggaccactggacttttccacaaaaggacagagtataaatgtccatactccaaacagtcaaaaagttgattcacaaaaggctgcaacaaagcaagtcaacaaggcacacaataggttaatcgaaaaaaaagtccacagtgagagaagcgctgagtcctgtgcaacatggaaagtgcagaaagaggagaaactgattggattgatgaacaatgaagcagctcaggattttactatggattgtggaatttgttatgcttatcaacttgacggtaccattcctgatcaagtgtgtgataattctcagtgtggacaacctttccatcaaatatgcttatatgagtggctgagaggactactaactagtagacagagttttaacatcatatttggtgaatgtccatattgtagtaag

SEQ ID NO: 754 - DNA, 978 bp, Homo sapiens
atggaaggcaatcagtgggtactgggcaagaagattggctctggaggatttggattgatatatttagctttccccacaaataaaccagagaaagatgcaagacatgtagtaaaagtggaatatcaagaaaatggcccgttattttcagaacttaaattttatcagagagttgcaaaaaaagactgtatcaaaaagtggatagaacgcaaacaacttgattatttaggaattcctctgttttatggatctggtctgactgaattcaagggaagaagttacagatttatggtaatggaaagactaggaatagatttacagaagatctcaggccagaatggtacctttaaaaagtcaactgtcctgcaattaggtatccgaatgttggatgtactggaatatatacatgaaaatgaatatgttcatggtgatataaaagcagcaaatctacttttgggttacaaaaatccagaccagagctccttaataagcatttatagtcagtttttggcagcaatagaatcactaaaggcattctgggatgttatggatgaaatcgatgagaagacctgggtacttgagccagaaaaacctccacggagtgcaacagcacgcagaattgcattagtggtaaaacccctgggaattaagctgagcaggaacatacatttgtgggatccagaaaatagtgtgttacaaaatttgaaagatgttttagaaattgattttccagctcgtgctatcctggaaaaatctgattttactatggattgtggaatttgttatgcttatcaacttgacggtaccattcctgatcaagtgtgtgataattctcagtgtggacaacctttccatcaaatatgcttatatgagtggctgagaggactactaactagtagacagagttttaacatcatatttggtgaatgtccatattgtagtaagccaattaccttaaaaatgtctggaaggaaacactga

SEQ ID NO: 755 - DNA, 1380 bp, Homo sapiens
atggtaatggaaagactaggaatagatttacagaagatctcaggccagaatggtacctttaaaaagtcaactgtcctgcaattaggtatccgaatgttggatgtactggaatatatacatgaaaatgaatatgttcatggtgatataaaagcagcaaatctacttttgggttacaaaaatccagaccaggtttatcttgcagattatggactttcctacagatattgtcccaatgggaaccacaaacagtatcaggaaaatcctagaaaaggccataatgggacaatagagtttaccagcttggatgcccacaagggagtagccttgtccagacgaagtgacgttgagatcctcggctactgcatgctgcggtggttgtgtgggaaacttccctgggaacagaacctgaaggaccctgtggctgtgcagactgctaaaacaaatctgttggacgagctcccccagtcagtgcttaaatgggctccttctggaagcagttgctgtgaaatagcccaatttttggtatgtgctcatagtttagcatatgatgaaaagccaaactatcaagccctcaagaaaattttgaaccctcatggaatacctttaggaccactggacttttccacaaaaggacagagtataaatgtccatactccaaacagtcaaaaagttgattcacaaaaggctgcaacaaagcaagtcaacaaggcacacaataggttaatcgaaaaaaaagtccacagtgagagaagcgctgagtcctgtgcaacatggaaagtgcagaaagaggagaaactgattggattgatgaacaatgaagcagctcagagctccttaataagcatttatagtcagtttttggcagcaatagaatcactaaaggcattctgggatgttatggatgaaatcgatgagaagacctgggtacttgagccagaaaaacctccacggagtgcaacagcacgcagaattgcattaggtaataatgtttccataaatatagaggtagaccccaggcatcctactatgcttcctgagtgcttctttcttggagctgaccatgtggtaaaacccctgggaattaagctgagcaggaacatacatttgtgggatccagaaaatagtgtgttacaaaatttgaaagatgttttagaaattgattttccagctcgtgctatcctggaaaaatctgattttactatggattgtggaatttgttatgcttatcaacttgacggtaccattcctgatcaagtgtgtgataattctcagtgtggacaacctttccatcaaatatgcttatatgagtggctgagaggactactaactagtagacagagttttaacatcatatttggtgaatgtccatattgtagtaag

SEQ ID NO: 756 - DNA, 2160 bp, Homo sapiens
atggaaggcaatcagtgggtactgggcaagaagattggctctggaggatttggattgatatatttagctttccccacaaataaaccagagaaagatgcaagacatgtagtaaaagtggaatatcaagaaaatggcccgttattttcagaacttaaattttatcagagagttgcaaaaaaagactgtatcaaaaagtggatagaacgcaaacaacttgattatttaggaattcctctgttttatggatctggtctgactgaattcaagggaagaagttacagatttatggtaatggaaagactaggaatagatttacagaagatctcaggccagaatggtacctttaaaaagtcaactgtcctgcaattaggtatccgaatgttggatgtactggaatatatacatgaaaatgaatatgttcatggtgatataaaagcagcaaatctacttttgggttacaaaaatccagaccaggtttatcttgcagattatggactttcctacagatattgtcccaatgggaaccacaaacagtatcaggaaaatcctagaaaaggccataatgggacaatagagtttaccagcttggatgcccacaagggagtagccttgtccagacgaagtgacgttgagatcctcggctactgcatgctgcggtggttgtgtgggaaacttccctgggaacagaacctgaaggaccctgtggctgtgcagactgctaaaacaaatctgttggacgagctcccccagtcagtgcttaaatgggctccttctggaagcagttgctgtgaaatagcccaatttttggtatgtgctcatagtttagcatatgatgaaaagccaaactatcaagccctcaagaaaattttgaaccctcatggaatacctttaggaccactggacttttccacaaaaggacagagtataaatgtccatactccaaacagtcaaaaagttgattcacaaaaggctgcaacaaagcaagtcaacaaggcacacaataggttaatcgaaaaaaaagtccacagtgagagaagcgctgagtcctgtgcaacatggaaagtgcagaaagaggagaaactgattggattgatgaacaatgaagcagctcagggaagagacttccaccttaggatagtgttgcctgaagatttacaactgaagaatgcaagattattatgtagttggcagctgagaacaatacttagtggataccatcgaatagtacaacagagaatgcagcactctcctgatctaatgagctttatgatggagttgaagatgcttttggaagttgccttaaagaatagacaagagctgtatgcactacctcctcctccccagttctactcaagccttattgaagagataggaactcttggttgggataaacttgtgtatgcggatacctgcttcagtaccatcaagttaaaagcagaagatgcttctggtagagagcatttaatcactctcaagttgaaggcaaagtatcctgcagaatcaccagattattttgtggattttcctgttccattttgtgcctcctggacacctcaggtaaattctcctcagagctccttaataagcatttatagtcagtttttggcagcaatagaatcactaaaggcattctgggatgttatggatgaaatcgatgagaagacctgggtacttgagccagaaaaacctccacggagtgcaacagcacgcagaattgcattaggtaataatgtttccataaatatagaggtagaccccaggcatcctactatgcttcctgagtgcttctttcttggagctgaccatgtggtaaaacccctgggaattaagctgagcaggaacatacatttgtgggatccagaaaatagtgtgttacaaaatttgaaagatgttttagaaattgattttccagctcgtgctatcctggaaaaatctgattttactatggattgtggaatttgttatgcttatcaacttgacggtaccattcctgatcaagtgtgtgataattctcagtgtggacaacctttccatcaaatatgcttatatgagtggctgagaggactactaactagtagacagagttttaacatcatatttggtgaatgtccatattgtagtaagccaattaccttaaaaatgtctggaaggaaacactga

SEQ ID NO: 757 - DNA, 1665 bp, Homo sapiens
atggaaggcaatcagtgggtactgggcaagaagattggctctggaggatttggattgatatatttagctttccccacaaataaaccagagaaagatgcaagacatgtagtaaaagtggaatatcaagaaaatggcccgttattttcagaacttaaattttatcagagagttgcaaaaaaagactgtatcaaaaagtggatagaacgcaaacaacttgattatttaggaattcctctgttttatggatctggtctgactgaattcaagggaagaagttacagatttatggtaatggaaagactaggaatagatttacagaagatctcaggccagaatggtacctttaaaaagtcaactgtcctgcaattaggtatccgaatgttggatgtactggaatatatacatgaaaatgaatatgttcatggtgatataaaagcagcaaatctacttttgggttacaaaaatccagaccaggtttatcttgcagattatggactttcctacagatattgtcccaatgggaaccacaaacagtatcaggaaaatcctagaaaaggccataatgggacaatagagtttaccagcttggatgcccacaagggagtagccttgtccagacgaagtgacgttgagatcctcggctactgcatgctgcggtggttgtgtgggaaacttccctgggaacagaacctgaaggaccctgtggctgtgcagactgctaaaacaaatctgttggacgagctcccccagtcagtgcttaaatgggctccttctggaagcagttgctgtgaaatagcccaatttttggtatgtgctcatagtttagcatatgatgaaaagccaaactatcaagccctcaagaaaattttgaaccctcatggaatacctttaggaccactggacttttccacaaaaggacagagtataaatgtccatactccaaacagtcaaaaagttgattcacaaaaggctgcaacaaagcaagtcaacaaggcacacaataggttaatcgaaaaaaaagtccacagtgagagaagcgctgagtcctgtgcaacatggaaagtgcagaaagaggagaaactgattggattgatgaacaatgaagcagctcagagctccttaataagcatttatagtcagtttttggcagcaatagaatcactaaaggcattctgggatgttatggatgaaatcgatgagaagacctgggtacttgagccagaaaaacctccacggagtgcaacagcacgcagaattgcattaggtaataatgtttccataaatatagaggtagaccccaggcatcctactatgcttcctgagtgcttctttcttggagctgaccatgtggtaaaacccctgggaattaagctgagcaggaacatacatttgtgggatccagaaaatagtgtgttacaaaatttgaaagatgttttagaaattgattttccagctcgtgctatcctggaaaaatctgattttactatggattgtggaatttgttatgcttatcaacttgacggtaccattcctgatcaagtgtgtgataattctcagtgtggacaacctttccatcaaatatgcttatatgagtggctgagaggactactaactagtagacagagttttaacatcatatttggtgaatgtccatattgtagtaag

SEQ ID NO: 758 - DNA, 1398 bp, Homo sapiens
atgccaccaaaaagaaatgaaaaatacaaacttcctattccatttccagaaggcaaggttctggatgatatggaaggcaatcagtgggtactgggcaagaagattggctctggaggatttggattgatatatttagctttccccacaaataaaccagagaaagatgcaagacatgtagtaaaagtggaatatcaagaaaatggcccgttattttcagaacttaaattttatcagagagttgcaaaaaaagactgtatcaaaaagtggatagaacgcaaacaacttgattatttaggaattcctctgttttatggatctggtctgactgaattcaagggaagaagttacagatttatggtaatggaaagactaggaatagatttacagaagatctcaggccagaatggtacctttaaaaagtcaactgtcctgcaattaggtatccgaatgttggatgtactggaatatatacatgaaaatgaatatgttcatggtgatataaaagcagcaaatctacttttgggttacaaaaatccagaccaggaagttgccttaaagaatagacaagagctgtatgcactacctcctcctccccagttctactcaagccttattgaagagataggaactcttggttgggataaacttgtgtatgcggatacctgcttcagtaccatcaagttaaaagcagaagatgcttctggtagagagcatttaatcactctcaagttgaaggcaaagtatcctgcagaatcaccagattattttgtggattttcctgttccattttgtgcctcctggacacctcagagctccttaataagcatttatagtcagtttttggcagcaatagaatcactaaaggcattctgggatgttatggatgaaatcgatgagaagacctgggtacttgagccagaaaaacctccacggagtgcaacagcacgcagaattgcattaggtaataatgtttccataaatatagaggtagaccccaggcatcctactatgcttcctgagtgcttctttcttggagctgaccatgtggtaaaacccctgggaattaagctgagcaggaacatacatttgtgggatccagaaaatagtgtgttacaaaatttgaaagatgttttagaaattgattttccagctcgtgctatcctggaaaaatctgattttactatggattgtggaatttgttatgcttatcaacttgacggtaccattcctgatcaagtgtgtgataattctcagtgtggacaacctttccatcaaatatgcttatatgagtggctgagaggactactaactagtagacagagttttaacatcatatttggtgaatgtccatattgtagtaagccaattaccttaaaaatgtctggaaggaaacactga

SEQ ID NO: 759 - DNA, 1422 bp, Homo sapiens
atggaaggcaatcagtgggtactgggcaagaagattggctctggaggatttggattgatatatttagctttccccacaaataaaccagagaaagatgcaagacatgtagtaaaagtggaatatcaagaaaatggcccgttattttcagaacttaaattttatcagagagttgcaaaaaaagactgtatcaaaaagtggatagaacgcaaacaacttgattatttaggaattcctctgttttatggatctggtctgactgaattcaagggaagaagttacagatttatggtaatggaaagactaggaatagatttacagaagatctcaggccagaatggtacctttaaaaagtcaactgtcctgcaattaggtatccgaatgttggatgtactggaatatatacatgaaaatgaatatgttcatggtgatataaaagcagcaaatctacttttgggttacaaaaatccagaccagggaagagacttccaccttaggatagtgttgcctgaagatttacaactgaagaatgcaagattattatgtagttggcagctgagaacaatacttagtggataccatcgaatagtacaacagagaatgcagcactctcctgatctaatgagctttatgatggagttgaagatgcttttggaagttgccttaaagaatagacaagagctgtatgcactacctcctcctccccagttctactcaagccttattgaagagataggaactcttggttgggataaacttgtgtatgcggatacctgcttcagtaccatcaagttaaaagcagaagatgcttctggtagagagcatttaatcactctcaagttgaaggcaaagtatcctgcagaatcaccagattattttgtggattttcctgttccattttgtgcctcctggacacctcagagctccttaataagcatttatagtcagtttttggcagcaatagaatcactaaaggcattctgggatgttatggatgaaatcgatgagaagacctgggtacttgagccagaaaaacctccacggagtgcaacagcacgcagaattgcattagtggtaaaacccctgggaattaagctgagcaggaacatacatttgtgggatccagaaaatagtgtgttacaaaatttgaaagatgttttagaaattgattttccagctcgtgctatcctggaaaaatctgattttactatggattgtggaatttgttatgcttatcaacttgacggtaccattcctgatcaagtgtgtgataattctcagtgtggacaacctttccatcaaatatgcttatatgagtggctgagaggactactaactagtagacagagttttaacatcatatttggtgaatgtccatattgtagtaagccaattaccttaaaaatgtctggaaggaaacactga

SEQ ID NO: 760 - DNA, 1245 bp, Homo sapiens
atggaaggcaatcagtgggtactgggcaagaagattggctctggaggatttggattgatatatttagctttccccacaaataaaccagagaaagatgcaagacatgtagtaaaagtggaatatcaagaaaatggcccgttattttcagaacttaaattttatcagagagttgcaaaaaaagactgtatcaaaaagtggatagaacgcaaacaacttgattatttaggaattcctctgttttatggatctggtctgactgaattcaagggaagaagttacagatttatggtaatggaaagactaggaatagatttacagaagatctcaggccagaatggtacctttaaaaagtcaactgtcctgcaattaggtatccgaatgttggatgtactggaatatatacatgaaaatgaatatgttcatggtgatataaaagcagcaaatctacttttgggttacaaaaatccagaccaggaagttgccttaaagaatagacaagagctgtatgcactacctcctcctccccagttctactcaagccttattgaagagataggaactcttggttgggataaacttgtgtatgcggatacctgcttcagtaccatcaagttaaaagcagaagatgcttctggtagagagcatttaatcactctcaagttgaaggcaaagtatcctgcagaatcaccagattattttgtggattttcctgttccattttgtgcctcctggacacctcagagctccttaataagcatttatagtcagtttttggcagcaatagaatcactaaaggcattctgggatgttatggatgaaatcgatgagaagacctgggtacttgagccagaaaaacctccacggagtgcaacagcacgcagaattgcattagtggtaaaacccctgggaattaagctgagcaggaacatacatttgtgggatccagaaaatagtgtgttacaaaatttgaaagatgttttagaaattgattttccagctcgtgctatcctggaaaaatctgattttactatggattgtggaatttgttatgcttatcaacttgacggtaccattcctgatcaagtgtgtgataattctcagtgtggacaacctttccatcaaatatgcttatatgagtggctgagaggactactaactagtagacagagttttaacatcatatttggtgaatgtccatattgtagtaagccaattaccttaaaaatgtctggaaggaaacactga

SEQ ID NO: 761 - DNA, 1506 bp, Homo sapiens
atggaaggcaatcagtgggtactgggcaagaagattggctctggaggatttggattgatatatttagctttccccacaaataaaccagagaaagatgcaagacatgtagtaaaagtggaatatcaagaaaatggcccgttattttcagaacttaaattttatcagagagttgcaaaaaaagactgtatcaaaaagtggatagaacgcaaacaacttgattatttaggaattcctctgttttatggatctggtctgactgaattcaagggaagaagttacagatttatggtaatggaaagactaggaatagatttacagaagatctcaggccagaatggtacctttaaaaagtcaactgtcctgcaattaggtatccgaatgttggatgtactggaatatatacatgaaaatgaatatgttcatggtgatataaaagcagcaaatctacttttgggttacaaaaatccagaccagggaagagacttccaccttaggatagtgttgcctgaagatttacaactgaagaatgcaagattattatgtagttggcagctgagaacaatacttagtggataccatcgaatagtacaacagagaatgcagcactctcctgatctaatgagctttatgatggagttgaagatgcttttggaagttgccttaaagaatagacaagagctgtatgcactacctcctcctccccagttctactcaagccttattgaagagataggaactcttggttgggataaacttgtgtatgcggatacctgcttcagtaccatcaagttaaaagcagaagatgcttctggtagagagcatttaatcactctcaagttgaaggcaaagtatcctgcagaatcaccagattattttgtggattttcctgttccattttgtgcctcctggacacctcagagctccttaataagcatttatagtcagtttttggcagcaatagaatcactaaaggcattctgggatgttatggatgaaatcgatgagaagacctgggtacttgagccagaaaaacctccacggagtgcaacagcacgcagaattgcattaggtaataatgtttccataaatatagaggtagaccccaggcatcctactatgcttcctgagtgcttctttcttggagctgaccatgtggtaaaacccctgggaattaagctgagcaggaacatacatttgtgggatccagaaaatagtgtgttacaaaatttgaaagatgttttagaaattgattttccagctcgtgctatcctggaaaaatctgattttactatggattgtggaatttgttatgcttatcaacttgacggtaccattcctgatcaagtgtgtgataattctcagtgtggacaacctttccatcaaatatgcttatatgagtggctgagaggactactaactagtagacagagttttaacatcatatttggtgaatgtccatattgtagtaagccaattaccttaaaaatgtctggaaggaaacactga

SEQ ID NO: 762 - DNA, 573 bp, Homo sapiens
atgccaccaaaaagaaatgaaaaatacaaacttcctattccatttccagaaggcaaggttctggatgatatggaaggcaatcagtgggtactgggcaagaagattggctctggaggatttggattgatatatttaggtaataatgtttccataaatatagaggtagaccccaggcatcctactatgcttcctgagtgcttctttcttggagctgaccatgtggtaaaacccctgggaattaagctgagcaggaacatacatttgtgggatccagaaaatagtgtgttacaaaatttgaaagatgttttagaaattgattttccagctcgtgctatcctggaaaaatctgattttactatggattgtggaatttgttatgcttatcaacttgacggtaccattcctgatcaagtgtgtgataattctcagtgtggacaacctttccatcaaatatgcttatatgagtggctgagaggactactaactagtagacagagttttaacatcatatttggtgaatgtccatattgtagtaagccaattaccttaaaaatgtctggaaggaaacactga

SEQ ID NO: 763 - DNA, 2061 bp, Homo sapiens
atggaaggcaatcagtgggtactgggcaagaagattggctctggaggatttggattgatatatttagctttccccacaaataaaccagagaaagatgcaagacatgtagtaaaagtggaatatcaagaaaatggcccgttattttcagaacttaaattttatcagagagttgcaaaaaaagactgtatcaaaaagtggatagaacgcaaacaacttgattatttaggaattcctctgttttatggatctggtctgactgaattcaagggaagaagttacagatttatggtaatggaaagactaggaatagatttacagaagatctcaggccagaatggtacctttaaaaagtcaactgtcctgcaattaggtatccgaatgttggatgtactggaatatatacatgaaaatgaatatgttcatggtgatataaaagcagcaaatctacttttgggttacaaaaatccagaccaggtttatcttgcagattatggactttcctacagatattgtcccaatgggaaccacaaacagtatcaggaaaatcctagaaaaggccataatgggacaatagagtttaccagcttggatgcccacaagggagtagccttgtccagacgaagtgacgttgagatcctcggctactgcatgctgcggtggttgtgtgggaaacttccctgggaacagaacctgaaggaccctgtggctgtgcagactgctaaaacaaatctgttggacgagctcccccagtcagtgcttaaatgggctccttctggaagcagttgctgtgaaatagcccaatttttggtatgtgctcatagtttagcatatgatgaaaagccaaactatcaagccctcaagaaaattttgaaccctcatggaatacctttaggaccactggacttttccacaaaaggacagagtataaatgtccatactccaaacagtcaaaaagttgattcacaaaaggctgcaacaaagcaagtcaacaaggcacacaataggttaatcgaaaaaaaagtccacagtgagagaagcgctgagtcctgtgcaacatggaaagtgcagaaagaggagaaactgattggattgatgaacaatgaagcagctcagggaagagacttccaccttaggatagtgttgcctgaagatttacaactgaagaatgcaagattattatgtagttggcagctgagaacaatacttagtggataccatcgaatagtacaacagagaatgcagcactctcctgatctaatgagctttatgatggagttgaagatgcttttggaagttgccttaaagaatagacaagagctgtatgcactacctcctcctccccagttctactcaagccttattgaagagataggaactcttggttgggataaacttgtgtatgcggatacctgcttcagtaccatcaagttaaaagcagaagatgcttctggtagagagcatttaatcactctcaagttgaaggcaaagtatcctgcagaatcaccagattattttgtggattttcctgttccattttgtgcctcctggacacctcagagctccttaataagcatttatagtcagtttttggcagcaatagaatcactaaaggcattctgggatgttatggatgaaatcgatgagaagacctgggtacttgagccagaaaaacctccacggagtgcaacagcacgcagaattgcattagtggtaaaacccctgggaattaagctgagcaggaacatacatttgtgggatccagaaaatagtgtgttacaaaatttgaaagatgttttagaaattgattttccagctcgtgctatcctggaaaaatctgattttactatggattgtggaatttgttatgcttatcaacttgacggtaccattcctgatcaagtgtgtgataattctcagtgtggacaacctttccatcaaatatgcttatatgagtggctgagaggactactaactagtagacagagttttaacatcatatttggtgaatgtccatattgtagtaagccaattaccttaaaaatgtctggaaggaaacactga

SEQ ID NO: 764 - DNA, 1329 bp, Homo sapiens
atggaaggcaatcagtgggtactgggcaagaagattggctctggaggatttggattgatatatttagctttccccacaaataaaccagagaaagatgcaagacatgtagtaaaagtggaatatcaagaaaatggcccgttattttcagaacttaaattttatcagagagttgcaaaaaaagactgtatcaaaaagtggatagaacgcaaacaacttgattatttaggaattcctctgttttatggatctggtctgactgaattcaagggaagaagttacagatttatggtaatggaaagactaggaatagatttacagaagatctcaggccagaatggtacctttaaaaagtcaactgtcctgcaattaggtatccgaatgttggatgtactggaatatatacatgaaaatgaatatgttcatggtgatataaaagcagcaaatctacttttgggttacaaaaatccagaccaggaagttgccttaaagaatagacaagagctgtatgcactacctcctcctccccagttctactcaagccttattgaagagataggaactcttggttgggataaacttgtgtatgcggatacctgcttcagtaccatcaagttaaaagcagaagatgcttctggtagagagcatttaatcactctcaagttgaaggcaaagtatcctgcagaatcaccagattattttgtggattttcctgttccattttgtgcctcctggacacctcagagctccttaataagcatttatagtcagtttttggcagcaatagaatcactaaaggcattctgggatgttatggatgaaatcgatgagaagacctgggtacttgagccagaaaaacctccacggagtgcaacagcacgcagaattgcattaggtaataatgtttccataaatatagaggtagaccccaggcatcctactatgcttcctgagtgcttctttcttggagctgaccatgtggtaaaacccctgggaattaagctgagcaggaacatacatttgtgggatccagaaaatagtgtgttacaaaatttgaaagatgttttagaaattgattttccagctcgtgctatcctggaaaaatctgattttactatggattgtggaatttgttatgcttatcaacttgacggtaccattcctgatcaagtgtgtgataattctcagtgtggacaacctttccatcaaatatgcttatatgagtggctgagaggactactaactagtagacagagttttaacatcatatttggtgaatgtccatattgtagtaagccaattaccttaaaaatgtctggaaggaaacactga

SEQ ID NO: 765 - DNA, 693 bp, Homo sapiens
atggtaatggaaagactaggaatagatttacagaagatctcaggccagaatggtacctttaaaaagtcaactgtcctgcaattaggtatccgaatgttggatgtactggaatatatacatgaaaatgaatatgttcatggtgatataaaagcagcaaatctacttttgggttacaaaaatccagaccagagctccttaataagcatttatagtcagtttttggcagcaatagaatcactaaaggcattctgggatgttatggatgaaatcgatgagaagacctgggtacttgagccagaaaaacctccacggagtgcaacagcacgcagaattgcattagtggtaaaacccctgggaattaagctgagcaggaacatacatttgtgggatccagaaaatagtgtgttacaaaatttgaaagatgttttagaaattgattttccagctcgtgctatcctggaaaaatctgattttactatggattgtggaatttgttatgcttatcaacttgacggtaccattcctgatcaagtgtgtgataattctcagtgtggacaacctttccatcaaatatgcttatatgagtggctgagaggactactaactagtagacagagttttaacatcatatttggtgaatgtccatattgtagtaagccaattaccttaaaaatgtctggaaggaaacactga

SEQ ID NO: 766 - DNA, 2130 bp, Homo sapiens
atgccaccaaaaagaaatgaaaaatacaaacttcctattccatttccagaaggcaaggttctggatgatatggaaggcaatcagtgggtactgggcaagaagattggctctggaggatttggattgatatatttagctttccccacaaataaaccagagaaagatgcaagacatgtagtaaaagtggaatatcaagaaaatggcccgttattttcagaacttaaattttatcagagagttgcaaaaaaagactgtatcaaaaagtggatagaacgcaaacaacttgattatttaggaattcctctgttttatggatctggtctgactgaattcaagggaagaagttacagatttatggtaatggaaagactaggaatagatttacagaagatctcaggccagaatggtacctttaaaaagtcaactgtcctgcaattaggtatccgaatgttggatgtactggaatatatacatgaaaatgaatatgttcatggtgatataaaagcagcaaatctacttttgggttacaaaaatccagaccaggtttatcttgcagattatggactttcctacagatattgtcccaatgggaaccacaaacagtatcaggaaaatcctagaaaaggccataatgggacaatagagtttaccagcttggatgcccacaagggagtagccttgtccagacgaagtgacgttgagatcctcggctactgcatgctgcggtggttgtgtgggaaacttccctgggaacagaacctgaaggaccctgtggctgtgcagactgctaaaacaaatctgttggacgagctcccccagtcagtgcttaaatgggctccttctggaagcagttgctgtgaaatagcccaatttttggtatgtgctcatagtttagcatatgatgaaaagccaaactatcaagccctcaagaaaattttgaaccctcatggaatacctttaggaccactggacttttccacaaaaggacagagtataaatgtccatactccaaacagtcaaaaagttgattcacaaaaggctgcaacaaagcaagtcaacaaggcacacaataggttaatcgaaaaaaaagtccacagtgagagaagcgctgagtcctgtgcaacatggaaagtgcagaaagaggagaaactgattggattgatgaacaatgaagcagctcagggaagagacttccaccttaggatagtgttgcctgaagatttacaactgaagaatgcaagattattatgtagttggcagctgagaacaatacttagtggataccatcgaatagtacaacagagaatgcagcactctcctgatctaatgagctttatgatggagttgaagatgcttttggaagttgccttaaagaatagacaagagctgtatgcactacctcctcctccccagttctactcaagccttattgaagagataggaactcttggttgggataaacttgtgtatgcggatacctgcttcagtaccatcaagttaaaagcagaagatgcttctggtagagagcatttaatcactctcaagttgaaggcaaagtatcctgcagaatcaccagattattttgtggattttcctgttccattttgtgcctcctggacacctcagagctccttaataagcatttatagtcagtttttggcagcaatagaatcactaaaggcattctgggatgttatggatgaaatcgatgagaagacctgggtacttgagccagaaaaacctccacggagtgcaacagcacgcagaattgcattagtggtaaaacccctgggaattaagctgagcaggaacatacatttgtgggatccagaaaatagtgtgttacaaaatttgaaagatgttttagaaattgattttccagctcgtgctatcctggaaaaatctgattttactatggattgtggaatttgttatgcttatcaacttgacggtaccattcctgatcaagtgtgtgataattctcagtgtggacaacctttccatcaaatatgcttatatgagtggctgagaggactactaactagtagacagagttttaacatcatatttggtgaatgtccatattgtagtaagccaattaccttaaaaatgtctggaaggaaacactga

SEQ ID NO: 767 - DNA, 1047 bp, Homo sapiens
atgccaccaaaaagaaatgaaaaatacaaacttcctattccatttccagaaggcaaggttctggatgatatggaaggcaatcagtgggtactgggcaagaagattggctctggaggatttggattgatatatttagctttccccacaaataaaccagagaaagatgcaagacatgtagtaaaagtggaatatcaagaaaatggcccgttattttcagaacttaaattttatcagagagttgcaaaaaaagactgtatcaaaaagtggatagaacgcaaacaacttgattatttaggaattcctctgttttatggatctggtctgactgaattcaagggaagaagttacagatttatggtaatggaaagactaggaatagatttacagaagatctcaggccagaatggtacctttaaaaagtcaactgtcctgcaattaggtatccgaatgttggatgtactggaatatatacatgaaaatgaatatgttcatggtgatataaaagcagcaaatctacttttgggttacaaaaatccagaccagagctccttaataagcatttatagtcagtttttggcagcaatagaatcactaaaggcattctgggatgttatggatgaaatcgatgagaagacctgggtacttgagccagaaaaacctccacggagtgcaacagcacgcagaattgcattagtggtaaaacccctgggaattaagctgagcaggaacatacatttgtgggatccagaaaatagtgtgttacaaaatttgaaagatgttttagaaattgattttccagctcgtgctatcctggaaaaatctgattttactatggattgtggaatttgttatgcttatcaacttgacggtaccattcctgatcaagtgtgtgataattctcagtgtggacaacctttccatcaaatatgcttatatgagtggctgagaggactactaactagtagacagagttttaacatcatatttggtgaatgtccatattgtagtaagccaattaccttaaaaatgtctggaaggaaacactga

SEQ ID NO: 768 - DNA, 1236 bp, Homo sapiens
atggtaatggaaagactaggaatagatttacagaagatctcaggccagaatggtacctttaaaaagtcaactgtcctgcaattaggtatccgaatgttggatgtactggaatatatacatgaaaatgaatatgttcatggtgatataaaagcagcaaatctacttttgggttacaaaaatccagaccagggaagagacttccaccttaggatagtgttgcctgaagatttacaactgaagaatgcaagattattatgtagttggcagctgagaacaatacttagtggataccatcgaatagtacaacagagaatgcagcactctcctgatctaatgagctttatgatggagttgaagatgcttttggaagttgccttaaagaatagacaagagctgtatgcactacctcctcctccccagttctactcaagccttattgaagagataggaactcttggttgggataaacttgtgtatgcggatacctgcttcagtaccatcaagttaaaagcagaagatgcttctggtagagagcatttaatcactctcaagttgaaggcaaagtatcctgcagaatcaccagattattttgtggattttcctgttccattttgtgcctcctggacacctcaggtaaattctcctcagagctccttaataagcatttatagtcagtttttggcagcaatagaatcactaaaggcattctgggatgttatggatgaaatcgatgagaagacctgggtacttgagccagaaaaacctccacggagtgcaacagcacgcagaattgcattaggtaataatgtttccataaatatagaggtagaccccaggcatcctactatgcttcctgagtgcttctttcttggagctgaccatgtggtaaaacccctgggaattaagctgagcaggaacatacatttgtgggatccagaaaatagtgtgttacaaaatttgaaagatgttttagaaattgattttccagctcgtgctatcctggaaaaatctgattttactatggattgtggaatttgttatgcttatcaacttgacggtaccattcctgatcaagtgtgtgataattctcagtgtggacaacctttccatcaaatatgcttatatgagtggctgagaggactactaactagtagacagagttttaacatcatatttggtgaatgtccatattgtagtaagccaattaccttaaaaatgtctggaaggaaacactga

SEQ ID NO: 769 - DNA, 1683 bp, Homo sapiens
atggtaatggaaagactaggaatagatttacagaagatctcaggccagaatggtacctttaaaaagtcaactgtcctgcaattaggtatccgaatgttggatgtactggaatatatacatgaaaatgaatatgttcatggtgatataaaagcagcaaatctacttttgggttacaaaaatccagaccaggtttatcttgcagattatggactttcctacagatattgtcccaatgggaaccacaaacagtatcaggaaaatcctagaaaaggccataatgggacaatagagtttaccagcttggatgcccacaagggagtagccttgtccagacgaagtgacgttgagatcctcggctactgcatgctgcggtggttgtgtgggaaacttccctgggaacagaacctgaaggaccctgtggctgtgcagactgctaaaacaaatctgttggacgagctcccccagtcagtgcttaaatgggctccttctggaagcagttgctgtgaaatagcccaatttttggtatgtgctcatagtttagcatatgatgaaaagccaaactatcaagccctcaagaaaattttgaaccctcatggaatacctttaggaccactggacttttccacaaaaggacagagtataaatgtccatactccaaacagtcaaaaagttgattcacaaaaggctgcaacaaagcaagtcaacaaggcacacaataggttaatcgaaaaaaaagtccacagtgagagaagcgctgagtcctgtgcaacatggaaagtgcagaaagaggagaaactgattggattgatgaacaatgaagcagctcaggaagttgccttaaagaatagacaagagctgtatgcactacctcctcctccccagttctactcaagccttattgaagagataggaactcttggttgggataaacttgtgtatgcggatacctgcttcagtaccatcaagttaaaagcagaagatgcttctggtagagagcatttaatcactctcaagttgaaggcaaagtatcctgcagaatcaccagattattttgtggattttcctgttccattttgtgcctcctggacacctcagagctccttaataagcatttatagtcagtttttggcagcaatagaatcactaaaggcattctgggatgttatggatgaaatcgatgagaagacctgggtacttgagccagaaaaacctccacggagtgcaacagcacgcagaattgcattaggtaataatgtttccataaatatagaggtagaccccaggcatcctactatgcttcctgagtgcttctttcttggagctgaccatgtggtaaaacccctgggaattaagctgagcaggaacatacatttgtgggatccagaaaatagtgtgttacaaaatttgaaagatgttttagaaattgattttccagctcgtgctatcctggaaaaatctgattttactatggattgtggaatttgttatgcttatcaacttgacggtaccattcctgatcaagtgtgtgataattctcagtgtggacaacctttccatcaaatatgcttatatgagtggctgagaggactactaactagtagacagagttttaacatcatatttggtgaatgtccatattgtagtaagccaattaccttaaaaatgtctggaaggaaacactga

SEQ ID NO: 770 - DNA, 1734 bp, Homo sapiens
atgccaccaaaaagaaatgaaaaatacaaacttcctattccatttccagaaggcaaggttctggatgatatggaaggcaatcagtgggtactgggcaagaagattggctctggaggatttggattgatatatttagctttccccacaaataaaccagagaaagatgcaagacatgtagtaaaagtggaatatcaagaaaatggcccgttattttcagaacttaaattttatcagagagttgcaaaaaaagactgtatcaaaaagtggatagaacgcaaacaacttgattatttaggaattcctctgttttatggatctggtctgactgaattcaagggaagaagttacagatttatggtaatggaaagactaggaatagatttacagaagatctcaggccagaatggtacctttaaaaagtcaactgtcctgcaattaggtatccgaatgttggatgtactggaatatatacatgaaaatgaatatgttcatggtgatataaaagcagcaaatctacttttgggttacaaaaatccagaccaggtttatcttgcagattatggactttcctacagatattgtcccaatgggaaccacaaacagtatcaggaaaatcctagaaaaggccataatgggacaatagagtttaccagcttggatgcccacaagggagtagccttgtccagacgaagtgacgttgagatcctcggctactgcatgctgcggtggttgtgtgggaaacttccctgggaacagaacctgaaggaccctgtggctgtgcagactgctaaaacaaatctgttggacgagctcccccagtcagtgcttaaatgggctccttctggaagcagttgctgtgaaatagcccaatttttggtatgtgctcatagtttagcatatgatgaaaagccaaactatcaagccctcaagaaaattttgaaccctcatggaatacctttaggaccactggacttttccacaaaaggacagagtataaatgtccatactccaaacagtcaaaaagttgattcacaaaaggctgcaacaaagcaagtcaacaaggcacacaataggttaatcgaaaaaaaagtccacagtgagagaagcgctgagtcctgtgcaacatggaaagtgcagaaagaggagaaactgattggattgatgaacaatgaagcagctcagagctccttaataagcatttatagtcagtttttggcagcaatagaatcactaaaggcattctgggatgttatggatgaaatcgatgagaagacctgggtacttgagccagaaaaacctccacggagtgcaacagcacgcagaattgcattaggtaataatgtttccataaatatagaggtagaccccaggcatcctactatgcttcctgagtgcttctttcttggagctgaccatgtggtaaaacccctgggaattaagctgagcaggaacatacatttgtgggatccagaaaatagtgtgttacaaaatttgaaagatgttttagaaattgattttccagctcgtgctatcctggaaaaatctgattttactatggattgtggaatttgttatgcttatcaacttgacggtaccattcctgatcaagtgtgtgataattctcagtgtggacaacctttccatcaaatatgcttatatgagtggctgagaggactactaactagtagacagagttttaacatcatatttggtgaatgtccatattgtagtaag

SEQ ID NO: 771 - DNA, 1776 bp, Homo sapiens
atggtaatggaaagactaggaatagatttacagaagatctcaggccagaatggtacctttaaaaagtcaactgtcctgcaattaggtatccgaatgttggatgtactggaatatatacatgaaaatgaatatgttcatggtgatataaaagcagcaaatctacttttgggttacaaaaatccagaccaggtttatcttgcagattatggactttcctacagatattgtcccaatgggaaccacaaacagtatcaggaaaatcctagaaaaggccataatgggacaatagagtttaccagcttggatgcccacaagggagtagccttgtccagacgaagtgacgttgagatcctcggctactgcatgctgcggtggttgtgtgggaaacttccctgggaacagaacctgaaggaccctgtggctgtgcagactgctaaaacaaatctgttggacgagctcccccagtcagtgcttaaatgggctccttctggaagcagttgctgtgaaatagcccaatttttggtatgtgctcatagtttagcatatgatgaaaagccaaactatcaagccctcaagaaaattttgaaccctcatggaatacctttaggaccactggacttttccacaaaaggacagagtataaatgtccatactccaaacagtcaaaaagttgattcacaaaaggctgcaacaaagcaagtcaacaaggcacacaataggttaatcgaaaaaaaagtccacagtgagagaagcgctgagtcctgtgcaacatggaaagtgcagaaagaggagaaactgattggattgatgaacaatgaagcagctcagggaagagacttccaccttaggatagtgttgcctgaagatttacaactgaagaatgcaagattattatgtagttggcagctgagaacaatacttagtggataccatcgaatagtacaacagagaatgcagcactctcctgatctaatgagctttatgatggagttgaagatgcttttggaagttgccttaaagaatagacaagagctgtatgcactacctcctcctccccagttctactcaagccttattgaagagataggaactcttggttgggataaacttgtgtatgcggatacctgcttcagtaccatcaagttaaaagcagaagatgcttctggtagagagcatttaatcactctcaagttgaaggcaaagtatcctgcagaatcaccagattattttgtggattttcctgttccattttgtgcctcctggacacctcagagctccttaataagcatttatagtcagtttttggcagcaatagaatcactaaaggcattctgggatgttatggatgaaatcgatgagaagacctgggtacttgagccagaaaaacctccacggagtgcaacagcacgcagaattgcattagtggtaaaacccctgggaattaagctgagcaggaacatacatttgtgggatccagaaaatagtgtgttacaaaatttgaaagatgttttagaaattgattttccagctcgtgctatcctggaaaaatctgattttactatggattgtggaatttgttatgcttatcaacttgacggtaccattcctgatcaagtgtgtgataattctcagtgtggacaacctttccatcaaatatgcttatatgagtggctgagaggactactaactagtagacagagttttaacatcatatttggtgaatgtccatattgtagtaagccaattaccttaaaaatgtctggaaggaaacactga

SEQ ID NO: 772 - DNA, 1590 bp, Homo sapiens
atgccaccaaaaagaaatgaaaaatacaaacttcctattccatttccagaaggcaaggttctggatgatatggaaggcaatcagtgggtactgggcaagaagattggctctggaggatttggattgatatatttagctttccccacaaataaaccagagaaagatgcaagacatgtagtaaaagtggaatatcaagaaaatggcccgttattttcagaacttaaattttatcagagagttgcaaaaaaagactgtatcaaaaagtggatagaacgcaaacaacttgattatttaggaattcctctgttttatggatctggtctgactgaattcaagggaagaagttacagatttatggtaatggaaagactaggaatagatttacagaagatctcaggccagaatggtacctttaaaaagtcaactgtcctgcaattaggtatccgaatgttggatgtactggaatatatacatgaaaatgaatatgttcatggtgatataaaagcagcaaatctacttttgggttacaaaaatccagaccagggaagagacttccaccttaggatagtgttgcctgaagatttacaactgaagaatgcaagattattatgtagttggcagctgagaacaatacttagtggataccatcgaatagtacaacagagaatgcagcactctcctgatctaatgagctttatgatggagttgaagatgcttttggaagttgccttaaagaatagacaagagctgtatgcactacctcctcctccccagttctactcaagccttattgaagagataggaactcttggttgggataaacttgtgtatgcggatacctgcttcagtaccatcaagttaaaagcagaagatgcttctggtagagagcatttaatcactctcaagttgaaggcaaagtatcctgcagaatcaccagattattttgtggattttcctgttccattttgtgcctcctggacacctcaggtaaattctcctcagagctccttaataagcatttatagtcagtttttggcagcaatagaatcactaaaggcattctgggatgttatggatgaaatcgatgagaagacctgggtacttgagccagaaaaacctccacggagtgcaacagcacgcagaattgcattaggtaataatgtttccataaatatagaggtagaccccaggcatcctactatgcttcctgagtgcttctttcttggagctgaccatgtggtaaaacccctgggaattaagctgagcaggaacatacatttgtgggatccagaaaatagtgtgttacaaaatttgaaagatgttttagaaattgattttccagctcgtgctatcctggaaaaatctgattttactatggattgtggaatttgttatgcttatcaacttgacggtaccattcctgatcaagtgtgtgataattctcagtgtggacaacctttccatcaaatatgcttatatgagtggctgagaggactactaactagtagacagagttttaacatcatatttggtgaatgtccatattgtagtaagccaattaccttaaaaatgtctggaaggaaacactga

SEQ ID NO: 773 - DNA, 1059 bp, Homo sapiens
atggtaatggaaagactaggaatagatttacagaagatctcaggccagaatggtacctttaaaaagtcaactgtcctgcaattaggtatccgaatgttggatgtactggaatatatacatgaaaatgaatatgttcatggtgatataaaagcagcaaatctacttttgggttacaaaaatccagaccaggaagttgccttaaagaatagacaagagctgtatgcactacctcctcctccccagttctactcaagccttattgaagagataggaactcttggttgggataaacttgtgtatgcggatacctgcttcagtaccatcaagttaaaagcagaagatgcttctggtagagagcatttaatcactctcaagttgaaggcaaagtatcctgcagaatcaccagattattttgtggattttcctgttccattttgtgcctcctggacacctcaggtaaattctcctcagagctccttaataagcatttatagtcagtttttggcagcaatagaatcactaaaggcattctgggatgttatggatgaaatcgatgagaagacctgggtacttgagccagaaaaacctccacggagtgcaacagcacgcagaattgcattaggtaataatgtttccataaatatagaggtagaccccaggcatcctactatgcttcctgagtgcttctttcttggagctgaccatgtggtaaaacccctgggaattaagctgagcaggaacatacatttgtgggatccagaaaatagtgtgttacaaaatttgaaagatgttttagaaattgattttccagctcgtgctatcctggaaaaatctgattttactatggattgtggaatttgttatgcttatcaacttgacggtaccattcctgatcaagtgtgtgataattctcagtgtggacaacctttccatcaaatatgcttatatgagtggctgagaggactactaactagtagacagagttttaacatcatatttggtgaatgtccatattgtagtaagccaattaccttaaaaatgtctggaaggaaacactga

SEQ ID NO: 774 - DNA, 2145 bp, Homo sapiens
atggaaggcaatcagtgggtactgggcaagaagattggctctggaggatttggattgatatatttagctttccccacaaataaaccagagaaagatgcaagacatgtagtaaaagtggaatatcaagaaaatggcccgttattttcagaacttaaattttatcagagagttgcaaaaaaagactgtatcaaaaagtggatagaacgcaaacaacttgattatttaggaattcctctgttttatggatctggtctgactgaattcaagggaagaagttacagatttatggtaatggaaagactaggaatagatttacagaagatctcaggccagaatggtacctttaaaaagtcaactgtcctgcaattaggtatccgaatgttggatgtactggaatatatacatgaaaatgaatatgttcatggtgatataaaagcagcaaatctacttttgggttacaaaaatccagaccaggtttatcttgcagattatggactttcctacagatattgtcccaatgggaaccacaaacagtatcaggaaaatcctagaaaaggccataatgggacaatagagtttaccagcttggatgcccacaagggagtagccttgtccagacgaagtgacgttgagatcctcggctactgcatgctgcggtggttgtgtgggaaacttccctgggaacagaacctgaaggaccctgtggctgtgcagactgctaaaacaaatctgttggacgagctcccccagtcagtgcttaaatgggctccttctggaagcagttgctgtgaaatagcccaatttttggtatgtgctcatagtttagcatatgatgaaaagccaaactatcaagccctcaagaaaattttgaaccctcatggaatacctttaggaccactggacttttccacaaaaggacagagtataaatgtccatactccaaacagtcaaaaagttgattcacaaaaggctgcaacaaagcaagtcaacaaggcacacaataggttaatcgaaaaaaaagtccacagtgagagaagcgctgagtcctgtgcaacatggaaagtgcagaaagaggagaaactgattggattgatgaacaatgaagcagctcagggaagagacttccaccttaggatagtgttgcctgaagatttacaactgaagaatgcaagattattatgtagttggcagctgagaacaatacttagtggataccatcgaatagtacaacagagaatgcagcactctcctgatctaatgagctttatgatggagttgaagatgcttttggaagttgccttaaagaatagacaagagctgtatgcactacctcctcctccccagttctactcaagccttattgaagagataggaactcttggttgggataaacttgtgtatgcggatacctgcttcagtaccatcaagttaaaagcagaagatgcttctggtagagagcatttaatcactctcaagttgaaggcaaagtatcctgcagaatcaccagattattttgtggattttcctgttccattttgtgcctcctggacacctcagagctccttaataagcatttatagtcagtttttggcagcaatagaatcactaaaggcattctgggatgttatggatgaaatcgatgagaagacctgggtacttgagccagaaaaacctccacggagtgcaacagcacgcagaattgcattaggtaataatgtttccataaatatagaggtagaccccaggcatcctactatgcttcctgagtgcttctttcttggagctgaccatgtggtaaaacccctgggaattaagctgagcaggaacatacatttgtgggatccagaaaatagtgtgttacaaaatttgaaagatgttttagaaattgattttccagctcgtgctatcctggaaaaatctgattttactatggattgtggaatttgttatgcttatcaacttgacggtaccattcctgatcaagtgtgtgataattctcagtgtggacaacctttccatcaaatatgcttatatgagtggctgagaggactactaactagtagacagagttttaacatcatatttggtgaatgtccatattgtagtaagccaattaccttaaaaatgtctggaaggaaacactga

SEQ ID NO: 775 - DNA, 1293 bp, Homo sapiens
atggaaggcaatcagtgggtactgggcaagaagattggctctggaggatttggattgatatatttagctttccccacaaataaaccagagaaagatgcaagacatgtagtaaaagtggaatatcaagaaaatggcccgttattttcagaacttaaattttatcagagagttgcaaaaaaagactgtatcaaaaagtggatagaacgcaaacaacttgattatttaggaattcctctgttttatggatctggtctgactgaattcaagggaagaagttacagatttatggtaatggaaagactaggaatagatttacagaagatctcaggccagaatggtacctttaaaaagtcaactgtcctgcaattaggtatccgaatgttggatgtactggaatatatacatgaaaatgaatatgttcatggtgatataaaagcagcaaatctacttttgggttacaaaaatccagaccaggaagttgccttaaagaatagacaagagctgtatgcactacctcctcctccccagttctactcaagccttattgaagagataggaactcttggttgggataaacttgtgtatgcggatacctgcttcagtaccatcaagttaaaagcagaagatgcttctggtagagagcatttaatcactctcaagttgaaggcaaagtatcctgcagaatcaccagattattttgtggattttcctgttccattttgtgcctcctggacacctcagagctccttaataagcatttatagtcagtttttggcagcaatagaatcactaaaggcattctgggatgttatggatgaaatcgatgagaagacctgggtacttgagccagaaaaacctccacggagtgcaacagcacgcagaattgcattaggtaataatgtttccataaatatagaggtagaccccaggcatcctactatgcttcctgagtgcttctttcttggagctgaccatgtggtaaaacccctgggaattaagctgagcaggaacatacatttgtgggatccagaaaatagtgtgttacaaaatttgaaagatgttttagaaattgattttccagctcgtgctatcctggaaaaatctgattttactatggattgtggaatttgttatgcttatcaacttgacggtaccattcctgatcaagtgtgtgataattctcagtgtggacaacctttccatcaaatatgcttatatgagtggctgagaggactactaactagtagacagagttttaacatcatatttggtgaatgtccatattgtagtaag

SEQ ID NO: 776 - DNA, 960 bp, Homo sapiens
atggtaatggaaagactaggaatagatttacagaagatctcaggccagaatggtacctttaaaaagtcaactgtcctgcaattaggtatccgaatgttggatgtactggaatatatacatgaaaatgaatatgttcatggtgatataaaagcagcaaatctacttttgggttacaaaaatccagaccaggaagttgccttaaagaatagacaagagctgtatgcactacctcctcctccccagttctactcaagccttattgaagagataggaactcttggttgggataaacttgtgtatgcggatacctgcttcagtaccatcaagttaaaagcagaagatgcttctggtagagagcatttaatcactctcaagttgaaggcaaagtatcctgcagaatcaccagattattttgtggattttcctgttccattttgtgcctcctggacacctcagagctccttaataagcatttatagtcagtttttggcagcaatagaatcactaaaggcattctgggatgttatggatgaaatcgatgagaagacctgggtacttgagccagaaaaacctccacggagtgcaacagcacgcagaattgcattagtggtaaaacccctgggaattaagctgagcaggaacatacatttgtgggatccagaaaatagtgtgttacaaaatttgaaagatgttttagaaattgattttccagctcgtgctatcctggaaaaatctgattttactatggattgtggaatttgttatgcttatcaacttgacggtaccattcctgatcaagtgtgtgataattctcagtgtggacaacctttccatcaaatatgcttatatgagtggctgagaggactactaactagtagacagagttttaacatcatatttggtgaatgtccatattgtagtaagccaattaccttaaaaatgtctggaaggaaacactga

SEQ ID NO: 777 - DNA, 1416 bp, Homo sapiens
atggtaatggaaagactaggaatagatttacagaagatctcaggccagaatggtacctttaaaaagtcaactgtcctgcaattaggtatccgaatgttggatgtactggaatatatacatgaaaatgaatatgttcatggtgatataaaagcagcaaatctacttttgggttacaaaaatccagaccaggtttatcttgcagattatggactttcctacagatattgtcccaatgggaaccacaaacagtatcaggaaaatcctagaaaaggccataatgggacaatagagtttaccagcttggatgcccacaagggagtagccttgtccagacgaagtgacgttgagatcctcggctactgcatgctgcggtggttgtgtgggaaacttccctgggaacagaacctgaaggaccctgtggctgtgcagactgctaaaacaaatctgttggacgagctcccccagtcagtgcttaaatgggctccttctggaagcagttgctgtgaaatagcccaatttttggtatgtgctcatagtttagcatatgatgaaaagccaaactatcaagccctcaagaaaattttgaaccctcatggaatacctttaggaccactggacttttccacaaaaggacagagtataaatgtccatactccaaacagtcaaaaagttgattcacaaaaggctgcaacaaagcaagtcaacaaggcacacaataggttaatcgaaaaaaaagtccacagtgagagaagcgctgagtcctgtgcaacatggaaagtgcagaaagaggagaaactgattggattgatgaacaatgaagcagctcagagctccttaataagcatttatagtcagtttttggcagcaatagaatcactaaaggcattctgggatgttatggatgaaatcgatgagaagacctgggtacttgagccagaaaaacctccacggagtgcaacagcacgcagaattgcattaggtaataatgtttccataaatatagaggtagaccccaggcatcctactatgcttcctgagtgcttctttcttggagctgaccatgtggtaaaacccctgggaattaagctgagcaggaacatacatttgtgggatccagaaaatagtgtgttacaaaatttgaaagatgttttagaaattgattttccagctcgtgctatcctggaaaaatctgattttactatggattgtggaatttgttatgcttatcaacttgacggtaccattcctgatcaagtgtgtgataattctcagtgtggacaacctttccatcaaatatgcttatatgagtggctgagaggactactaactagtagacagagttttaacatcatatttggtgaatgtccatattgtagtaagccaattaccttaaaaatgtctggaaggaaacactga

SEQ ID NO: 778 - DNA, 1407 bp, Homo sapiens
atgccaccaaaaagaaatgaaaaatacaaacttcctattccatttccagaaggcaaggttctggatgatatggaaggcaatcagtgggtactgggcaagaagattggctctggaggatttggattgatatatttagctttccccacaaataaaccagagaaagatgcaagacatgtagtaaaagtggaatatcaagaaaatggcccgttattttcagaacttaaattttatcagagagttgcaaaaaaagactgtatcaaaaagtggatagaacgcaaacaacttgattatttaggaattcctctgttttatggatctggtctgactgaattcaagggaagaagttacagatttatggtaatggaaagactaggaatagatttacagaagatctcaggccagaatggtacctttaaaaagtcaactgtcctgcaattaggtatccgaatgttggatgtactggaatatatacatgaaaatgaatatgttcatggtgatataaaagcagcaaatctacttttgggttacaaaaatccagaccaggtttatcttgcagattatggactttcctacagatattgtcccaatgggaaccacaaacagtatcaggaaaatcctagaaaaggccataatgggacaatagagtttaccagcttggatgcccacaagggagtagccttgtccagacgaagtgacgttgagatcctcggctactgcatgctgcggtggttgtgtgggaaacttccctgggaacagaacctgaaggaccctgtggctgtgcagactgctaaaacaaatctgttggacgagctcccccagtcagtgcttaaatgggctccttctggaagcagttgctgtgaaatagcccaatttttggtatgtgctcatagtttagcatatgatgaaaagccaaactatcaagccctcaagaaaattttgaaccctcatggaatacctttaggaccactggacttttccacaaaaggacagagtataaatgtccatactccaaacagtcaaaaagttgattcacaaaaggctgcaacaaagcaagtcaacaaggcacacaataggttaatcgaaaaaaaagtccacagtgagagaagcgctgagtcctgtgcaacatggaaagtgcagaaagaggagaaactgattggattgatgaacaatgaagcagctcaggattttactatggattgtggaatttgttatgcttatcaacttgacggtaccattcctgatcaagtgtgtgataattctcagtgtggacaacctttccatcaaatatgcttatatgagtggctgagaggactactaactagtagacagagttttaacatcatatttggtgaatgtccatattgtagtaagccaattaccttaaaaatgtctggaaggaaacactga

SEQ ID NO: 779 - DNA, 1617 bp, Homo sapiens
atggaaggcaatcagtgggtactgggcaagaagattggctctggaggatttggattgatatatttagctttccccacaaataaaccagagaaagatgcaagacatgtagtaaaagtggaatatcaagaaaatggcccgttattttcagaacttaaattttatcagagagttgcaaaaaaagactgtatcaaaaagtggatagaacgcaaacaacttgattatttaggaattcctctgttttatggatctggtctgactgaattcaagggaagaagttacagatttatggtaatggaaagactaggaatagatttacagaagatctcaggccagaatggtacctttaaaaagtcaactgtcctgcaattaggtatccgaatgttggatgtactggaatatatacatgaaaatgaatatgttcatggtgatataaaagcagcaaatctacttttgggttacaaaaatccagaccaggtttatcttgcagattatggactttcctacagatattgtcccaatgggaaccacaaacagtatcaggaaaatcctagaaaaggccataatgggacaatagagtttaccagcttggatgcccacaagggagtagccttgtccagacgaagtgacgttgagatcctcggctactgcatgctgcggtggttgtgtgggaaacttccctgggaacagaacctgaaggaccctgtggctgtgcagactgctaaaacaaatctgttggacgagctcccccagtcagtgcttaaatgggctccttctggaagcagttgctgtgaaatagcccaatttttggtatgtgctcatagtttagcatatgatgaaaagccaaactatcaagccctcaagaaaattttgaaccctcatggaatacctttaggaccactggacttttccacaaaaggacagagtataaatgtccatactccaaacagtcaaaaagttgattcacaaaaggctgcaacaaagcaagtcaacaaggcacacaataggttaatcgaaaaaaaagtccacagtgagagaagcgctgagtcctgtgcaacatggaaagtgcagaaagaggagaaactgattggattgatgaacaatgaagcagctcagagctccttaataagcatttatagtcagtttttggcagcaatagaatcactaaaggcattctgggatgttatggatgaaatcgatgagaagacctgggtacttgagccagaaaaacctccacggagtgcaacagcacgcagaattgcattagtggtaaaacccctgggaattaagctgagcaggaacatacatttgtgggatccagaaaatagtgtgttacaaaatttgaaagatgttttagaaattgattttccagctcgtgctatcctggaaaaatctgattttactatggattgtggaatttgttatgcttatcaacttgacggtaccattcctgatcaagtgtgtgataattctcagtgtggacaacctttccatcaaatatgcttatatgagtggctgagaggactactaactagtagacagagttttaacatcatatttggtgaatgtccatattgtagtaagccaattaccttaaaaatgtctggaaggaaacactga

SEQ ID NO: 780 - DNA, 1131 bp, Homo sapiens
atgccaccaaaaagaaatgaaaaatacaaacttcctattccatttccagaaggcaaggttctggatgatatggaaggcaatcagtgggtactgggcaagaagattggctctggaggatttggattgatatatttagctttccccacaaataaaccagagaaagatgcaagacatgtagtaaaagtggaatatcaagaaaatggcccgttattttcagaacttaaattttatcagagagttgcaaaaaaagactgtatcaaaaagtggatagaacgcaaacaacttgattatttaggaattcctctgttttatggatctggtctgactgaattcaagggaagaagttacagatttatggtaatggaaagactaggaatagatttacagaagatctcaggccagaatggtacctttaaaaagtcaactgtcctgcaattaggtatccgaatgttggatgtactggaatatatacatgaaaatgaatatgttcatggtgatataaaagcagcaaatctacttttgggttacaaaaatccagaccagagctccttaataagcatttatagtcagtttttggcagcaatagaatcactaaaggcattctgggatgttatggatgaaatcgatgagaagacctgggtacttgagccagaaaaacctccacggagtgcaacagcacgcagaattgcattaggtaataatgtttccataaatatagaggtagaccccaggcatcctactatgcttcctgagtgcttctttcttggagctgaccatgtggtaaaacccctgggaattaagctgagcaggaacatacatttgtgggatccagaaaatagtgtgttacaaaatttgaaagatgttttagaaattgattttccagctcgtgctatcctggaaaaatctgattttactatggattgtggaatttgttatgcttatcaacttgacggtaccattcctgatcaagtgtgtgataattctcagtgtggacaacctttccatcaaatatgcttatatgagtggctgagaggactactaactagtagacagagttttaacatcatatttggtgaatgtccatattgtagtaagccaattaccttaaaaatgtctggaaggaaacactga

SEQ ID NO: 781 - DNA, 1521 bp, Homo sapiens
atggaaggcaatcagtgggtactgggcaagaagattggctctggaggatttggattgatatatttagctttccccacaaataaaccagagaaagatgcaagacatgtagtaaaagtggaatatcaagaaaatggcccgttattttcagaacttaaattttatcagagagttgcaaaaaaagactgtatcaaaaagtggatagaacgcaaacaacttgattatttaggaattcctctgttttatggatctggtctgactgaattcaagggaagaagttacagatttatggtaatggaaagactaggaatagatttacagaagatctcaggccagaatggtacctttaaaaagtcaactgtcctgcaattaggtatccgaatgttggatgtactggaatatatacatgaaaatgaatatgttcatggtgatataaaagcagcaaatctacttttgggttacaaaaatccagaccagggaagagacttccaccttaggatagtgttgcctgaagatttacaactgaagaatgcaagattattatgtagttggcagctgagaacaatacttagtggataccatcgaatagtacaacagagaatgcagcactctcctgatctaatgagctttatgatggagttgaagatgcttttggaagttgccttaaagaatagacaagagctgtatgcactacctcctcctccccagttctactcaagccttattgaagagataggaactcttggttgggataaacttgtgtatgcggatacctgcttcagtaccatcaagttaaaagcagaagatgcttctggtagagagcatttaatcactctcaagttgaaggcaaagtatcctgcagaatcaccagattattttgtggattttcctgttccattttgtgcctcctggacacctcaggtaaattctcctcagagctccttaataagcatttatagtcagtttttggcagcaatagaatcactaaaggcattctgggatgttatggatgaaatcgatgagaagacctgggtacttgagccagaaaaacctccacggagtgcaacagcacgcagaattgcattaggtaataatgtttccataaatatagaggtagaccccaggcatcctactatgcttcctgagtgcttctttcttggagctgaccatgtggtaaaacccctgggaattaagctgagcaggaacatacatttgtgggatccagaaaatagtgtgttacaaaatttgaaagatgttttagaaattgattttccagctcgtgctatcctggaaaaatctgattttactatggattgtggaatttgttatgcttatcaacttgacggtaccattcctgatcaagtgtgtgataattctcagtgtggacaacctttccatcaaatatgcttatatgagtggctgagaggactactaactagtagacagagttttaacatcatatttggtgaatgtccatattgtagtaagccaattaccttaaaaatgtctggaaggaaacactga

SEQ ID NO: 782 - DNA, 2052 bp, Homo sapiens
atgccaccaaaaagaaatgaaaaatacaaacttcctattccatttccagaaggcaaggttctggatgatatggaaggcaatcagtgggtactgggcaagaagattggctctggaggatttggattgatatatttagctttccccacaaataaaccagagaaagatgcaagacatgtagtaaaagtggaatatcaagaaaatggcccgttattttcagaacttaaattttatcagagagttgcaaaaaaagactgtatcaaaaagtggatagaacgcaaacaacttgattatttaggaattcctctgttttatggatctggtctgactgaattcaagggaagaagttacagatttatggtaatggaaagactaggaatagatttacagaagatctcaggccagaatggtacctttaaaaagtcaactgtcctgcaattaggtatccgaatgttggatgtactggaatatatacatgaaaatgaatatgttcatggtgatataaaagcagcaaatctacttttgggttacaaaaatccagaccaggtttatcttgcagattatggactttcctacagatattgtcccaatgggaaccacaaacagtatcaggaaaatcctagaaaaggccataatgggacaatagagtttaccagcttggatgcccacaagggagtagccttgtccagacgaagtgacgttgagatcctcggctactgcatgctgcggtggttgtgtgggaaacttccctgggaacagaacctgaaggaccctgtggctgtgcagactgctaaaacaaatctgttggacgagctcccccagtcagtgcttaaatgggctccttctggaagcagttgctgtgaaatagcccaatttttggtatgtgctcatagtttagcatatgatgaaaagccaaactatcaagccctcaagaaaattttgaaccctcatggaatacctttaggaccactggacttttccacaaaaggacagagtataaatgtccatactccaaacagtcaaaaagttgattcacaaaaggctgcaacaaagcaagtcaacaaggcacacaataggttaatcgaaaaaaaagtccacagtgagagaagcgctgagtcctgtgcaacatggaaagtgcagaaagaggagaaactgattggattgatgaacaatgaagcagctcaggaagttgccttaaagaatagacaagagctgtatgcactacctcctcctccccagttctactcaagccttattgaagagataggaactcttggttgggataaacttgtgtatgcggatacctgcttcagtaccatcaagttaaaagcagaagatgcttctggtagagagcatttaatcactctcaagttgaaggcaaagtatcctgcagaatcaccagattattttgtggattttcctgttccattttgtgcctcctggacacctcaggtaaattctcctcagagctccttaataagcatttatagtcagtttttggcagcaatagaatcactaaaggcattctgggatgttatggatgaaatcgatgagaagacctgggtacttgagccagaaaaacctccacggagtgcaacagcacgcagaattgcattaggtaataatgtttccataaatatagaggtagaccccaggcatcctactatgcttcctgagtgcttctttcttggagctgaccatgtggtaaaacccctgggaattaagctgagcaggaacatacatttgtgggatccagaaaatagtgtgttacaaaatttgaaagatgttttagaaattgattttccagctcgtgctatcctggaaaaatctgattttactatggattgtggaatttgttatgcttatcaacttgacggtaccattcctgatcaagtgtgtgataattctcagtgtggacaacctttccatcaaatatgcttatatgagtggctgagaggactactaactagtagacagagttttaacatcatatttggtgaatgtccatattgtagtaagccaattaccttaaaaatgtctggaaggaaacactga

SEQ ID NO: 783 - DNA, 1302 bp, Homo sapiens
atggaaggcaatcagtgggtactgggcaagaagattggctctggaggatttggattgatatatttagctttccccacaaataaaccagagaaagatgcaagacatgtagtaaaagtggaatatcaagaaaatggcccgttattttcagaacttaaattttatcagagagttgcaaaaaaagactgtatcaaaaagtggatagaacgcaaacaacttgattatttaggaattcctctgttttatggatctggtctgactgaattcaagggaagaagttacagatttatggtaatggaaagactaggaatagatttacagaagatctcaggccagaatggtacctttaaaaagtcaactgtcctgcaattaggtatccgaatgttggatgtactggaatatatacatgaaaatgaatatgttcatggtgatataaaagcagcaaatctacttttgggttacaaaaatccagaccaggtttatcttgcagattatggactttcctacagatattgtcccaatgggaaccacaaacagtatcaggaaaatcctagaaaaggccataatgggacaatagagtttaccagcttggatgcccacaagggagtagccttgtccagacgaagtgacgttgagatcctcggctactgcatgctgcggtggttgtgtgggaaacttccctgggaacagaacctgaaggaccctgtggctgtgcagactgctaaaacaaatctgttggacgagctcccccagtcagtgcttaaatgggctccttctggaagcagttgctgtgaaatagcccaatttttggtatgtgctcatagtttagcatatgatgaaaagccaaactatcaagccctcaagaaaattttgaaccctcatggaatacctttaggaccactggacttttccacaaaaggacagagtataaatgtccatactccaaacagtcaaaaagttgattcacaaaaggctgcaacaaagcaagtcaacaaggcacacaataggttaatcgaaaaaaaagtccacagtgagagaagcgctgagtcctgtgcaacatggaaagtgcagaaagaggagaaactgattggattgatgaacaatgaagcagctcaggattttactatggattgtggaatttgttatgcttatcaacttgacggtaccattcctgatcaagtgtgtgataattctcagtgtggacaacctttccatcaaatatgcttatatgagtggctgagaggactactaactagtagacagagttttaacatcatatttggtgaatgtccatattgtagtaag

SEQ ID NO: 784 - DNA, 777 bp, Homo sapiens
atggtaatggaaagactaggaatagatttacagaagatctcaggccagaatggtacctttaaaaagtcaactgtcctgcaattaggtatccgaatgttggatgtactggaatatatacatgaaaatgaatatgttcatggtgatataaaagcagcaaatctacttttgggttacaaaaatccagaccagagctccttaataagcatttatagtcagtttttggcagcaatagaatcactaaaggcattctgggatgttatggatgaaatcgatgagaagacctgggtacttgagccagaaaaacctccacggagtgcaacagcacgcagaattgcattaggtaataatgtttccataaatatagaggtagaccccaggcatcctactatgcttcctgagtgcttctttcttggagctgaccatgtggtaaaacccctgggaattaagctgagcaggaacatacatttgtgggatccagaaaatagtgtgttacaaaatttgaaagatgttttagaaattgattttccagctcgtgctatcctggaaaaatctgattttactatggattgtggaatttgttatgcttatcaacttgacggtaccattcctgatcaagtgtgtgataattctcagtgtggacaacctttccatcaaatatgcttatatgagtggctgagaggactactaactagtagacagagttttaacatcatatttggtgaatgtccatattgtagtaagccaattaccttaaaaatgtctggaaggaaacactga

SEQ ID NO: 785 - DNA, 2229 bp, Homo sapiens
atgccaccaaaaagaaatgaaaaatacaaacttcctattccatttccagaaggcaaggttctggatgatatggaaggcaatcagtgggtactgggcaagaagattggctctggaggatttggattgatatatttagctttccccacaaataaaccagagaaagatgcaagacatgtagtaaaagtggaatatcaagaaaatggcccgttattttcagaacttaaattttatcagagagttgcaaaaaaagactgtatcaaaaagtggatagaacgcaaacaacttgattatttaggaattcctctgttttatggatctggtctgactgaattcaagggaagaagttacagatttatggtaatggaaagactaggaatagatttacagaagatctcaggccagaatggtacctttaaaaagtcaactgtcctgcaattaggtatccgaatgttggatgtactggaatatatacatgaaaatgaatatgttcatggtgatataaaagcagcaaatctacttttgggttacaaaaatccagaccaggtttatcttgcagattatggactttcctacagatattgtcccaatgggaaccacaaacagtatcaggaaaatcctagaaaaggccataatgggacaatagagtttaccagcttggatgcccacaagggagtagccttgtccagacgaagtgacgttgagatcctcggctactgcatgctgcggtggttgtgtgggaaacttccctgggaacagaacctgaaggaccctgtggctgtgcagactgctaaaacaaatctgttggacgagctcccccagtcagtgcttaaatgggctccttctggaagcagttgctgtgaaatagcccaatttttggtatgtgctcatagtttagcatatgatgaaaagccaaactatcaagccctcaagaaaattttgaaccctcatggaatacctttaggaccactggacttttccacaaaaggacagagtataaatgtccatactccaaacagtcaaaaagttgattcacaaaaggctgcaacaaagcaagtcaacaaggcacacaataggttaatcgaaaaaaaagtccacagtgagagaagcgctgagtcctgtgcaacatggaaagtgcagaaagaggagaaactgattggattgatgaacaatgaagcagctcagggaagagacttccaccttaggatagtgttgcctgaagatttacaactgaagaatgcaagattattatgtagttggcagctgagaacaatacttagtggataccatcgaatagtacaacagagaatgcagcactctcctgatctaatgagctttatgatggagttgaagatgcttttggaagttgccttaaagaatagacaagagctgtatgcactacctcctcctccccagttctactcaagccttattgaagagataggaactcttggttgggataaacttgtgtatgcggatacctgcttcagtaccatcaagttaaaagcagaagatgcttctggtagagagcatttaatcactctcaagttgaaggcaaagtatcctgcagaatcaccagattattttgtggattttcctgttccattttgtgcctcctggacacctcaggtaaattctcctcagagctccttaataagcatttatagtcagtttttggcagcaatagaatcactaaaggcattctgggatgttatggatgaaatcgatgagaagacctgggtacttgagccagaaaaacctccacggagtgcaacagcacgcagaattgcattaggtaataatgtttccataaatatagaggtagaccccaggcatcctactatgcttcctgagtgcttctttcttggagctgaccatgtggtaaaacccctgggaattaagctgagcaggaacatacatttgtgggatccagaaaatagtgtgttacaaaatttgaaagatgttttagaaattgattttccagctcgtgctatcctggaaaaatctgattttactatggattgtggaatttgttatgcttatcaacttgacggtaccattcctgatcaagtgtgtgataattctcagtgtggacaacctttccatcaaatatgcttatatgagtggctgagaggactactaactagtagacagagttttaacatcatatttggtgaatgtccatattgtagtaagccaattaccttaaaaatgtctggaaggaaacactga

SEQ ID NO: 786 - DNA, 1344 bp, Homo sapiens
atggaaggcaatcagtgggtactgggcaagaagattggctctggaggatttggattgatatatttagctttccccacaaataaaccagagaaagatgcaagacatgtagtaaaagtggaatatcaagaaaatggcccgttattttcagaacttaaattttatcagagagttgcaaaaaaagactgtatcaaaaagtggatagaacgcaaacaacttgattatttaggaattcctctgttttatggatctggtctgactgaattcaagggaagaagttacagatttatggtaatggaaagactaggaatagatttacagaagatctcaggccagaatggtacctttaaaaagtcaactgtcctgcaattaggtatccgaatgttggatgtactggaatatatacatgaaaatgaatatgttcatggtgatataaaagcagcaaatctacttttgggttacaaaaatccagaccaggaagttgccttaaagaatagacaagagctgtatgcactacctcctcctccccagttctactcaagccttattgaagagataggaactcttggttgggataaacttgtgtatgcggatacctgcttcagtaccatcaagttaaaagcagaagatgcttctggtagagagcatttaatcactctcaagttgaaggcaaagtatcctgcagaatcaccagattattttgtggattttcctgttccattttgtgcctcctggacacctcaggtaaattctcctcagagctccttaataagcatttatagtcagtttttggcagcaatagaatcactaaaggcattctgggatgttatggatgaaatcgatgagaagacctgggtacttgagccagaaaaacctccacggagtgcaacagcacgcagaattgcattaggtaataatgtttccataaatatagaggtagaccccaggcatcctactatgcttcctgagtgcttctttcttggagctgaccatgtggtaaaacccctgggaattaagctgagcaggaacatacatttgtgggatccagaaaatagtgtgttacaaaatttgaaagatgttttagaaattgattttccagctcgtgctatcctggaaaaatctgattttactatggattgtggaatttgttatgcttatcaacttgacggtaccattcctgatcaagtgtgtgataattctcagtgtggacaacctttccatcaaatatgcttatatgagtggctgagaggactactaactagtagacagagttttaacatcatatttggtgaatgtccatattgtagtaagccaattaccttaaaaatgtctggaaggaaacactga

SEQ ID NO: 787 - DNA, 2214 bp, Homo sapiens
atgccaccaaaaagaaatgaaaaatacaaacttcctattccatttccagaaggcaaggttctggatgatatggaaggcaatcagtgggtactgggcaagaagattggctctggaggatttggattgatatatttagctttccccacaaataaaccagagaaagatgcaagacatgtagtaaaagtggaatatcaagaaaatggcccgttattttcagaacttaaattttatcagagagttgcaaaaaaagactgtatcaaaaagtggatagaacgcaaacaacttgattatttaggaattcctctgttttatggatctggtctgactgaattcaagggaagaagttacagatttatggtaatggaaagactaggaatagatttacagaagatctcaggccagaatggtacctttaaaaagtcaactgtcctgcaattaggtatccgaatgttggatgtactggaatatatacatgaaaatgaatatgttcatggtgatataaaagcagcaaatctacttttgggttacaaaaatccagaccaggtttatcttgcagattatggactttcctacagatattgtcccaatgggaaccacaaacagtatcaggaaaatcctagaaaaggccataatgggacaatagagtttaccagcttggatgcccacaagggagtagccttgtccagacgaagtgacgttgagatcctcggctactgcatgctgcggtggttgtgtgggaaacttccctgggaacagaacctgaaggaccctgtggctgtgcagactgctaaaacaaatctgttggacgagctcccccagtcagtgcttaaatgggctccttctggaagcagttgctgtgaaatagcccaatttttggtatgtgctcatagtttagcatatgatgaaaagccaaactatcaagccctcaagaaaattttgaaccctcatggaatacctttaggaccactggacttttccacaaaaggacagagtataaatgtccatactccaaacagtcaaaaagttgattcacaaaaggctgcaacaaagcaagtcaacaaggcacacaataggttaatcgaaaaaaaagtccacagtgagagaagcgctgagtcctgtgcaacatggaaagtgcagaaagaggagaaactgattggattgatgaacaatgaagcagctcagggaagagacttccaccttaggatagtgttgcctgaagatttacaactgaagaatgcaagattattatgtagttggcagctgagaacaatacttagtggataccatcgaatagtacaacagagaatgcagcactctcctgatctaatgagctttatgatggagttgaagatgcttttggaagttgccttaaagaatagacaagagctgtatgcactacctcctcctccccagttctactcaagccttattgaagagataggaactcttggttgggataaacttgtgtatgcggatacctgcttcagtaccatcaagttaaaagcagaagatgcttctggtagagagcatttaatcactctcaagttgaaggcaaagtatcctgcagaatcaccagattattttgtggattttcctgttccattttgtgcctcctggacacctcagagctccttaataagcatttatagtcagtttttggcagcaatagaatcactaaaggcattctgggatgttatggatgaaatcgatgagaagacctgggtacttgagccagaaaaacctccacggagtgcaacagcacgcagaattgcattaggtaataatgtttccataaatatagaggtagaccccaggcatcctactatgcttcctgagtgcttctttcttggagctgaccatgtggtaaaacccctgggaattaagctgagcaggaacatacatttgtgggatccagaaaatagtgtgttacaaaatttgaaagatgttttagaaattgattttccagctcgtgctatcctggaaaaatctgattttactatggattgtggaatttgttatgcttatcaacttgacggtaccattcctgatcaagtgtgtgataattctcagtgtggacaacctttccatcaaatatgcttatatgagtggctgagaggactactaactagtagacagagttttaacatcatatttggtgaatgtccatattgtagtaagccaattaccttaaaaatgtctggaaggaaacactga

SEQ ID NO: 788 - DNA, 1599 bp, Homo sapiens
atggtaatggaaagactaggaatagatttacagaagatctcaggccagaatggtacctttaaaaagtcaactgtcctgcaattaggtatccgaatgttggatgtactggaatatatacatgaaaatgaatatgttcatggtgatataaaagcagcaaatctacttttgggttacaaaaatccagaccaggtttatcttgcagattatggactttcctacagatattgtcccaatgggaaccacaaacagtatcaggaaaatcctagaaaaggccataatgggacaatagagtttaccagcttggatgcccacaagggagtagccttgtccagacgaagtgacgttgagatcctcggctactgcatgctgcggtggttgtgtgggaaacttccctgggaacagaacctgaaggaccctgtggctgtgcagactgctaaaacaaatctgttggacgagctcccccagtcagtgcttaaatgggctccttctggaagcagttgctgtgaaatagcccaatttttggtatgtgctcatagtttagcatatgatgaaaagccaaactatcaagccctcaagaaaattttgaaccctcatggaatacctttaggaccactggacttttccacaaaaggacagagtataaatgtccatactccaaacagtcaaaaagttgattcacaaaaggctgcaacaaagcaagtcaacaaggcacacaataggttaatcgaaaaaaaagtccacagtgagagaagcgctgagtcctgtgcaacatggaaagtgcagaaagaggagaaactgattggattgatgaacaatgaagcagctcaggaagttgccttaaagaatagacaagagctgtatgcactacctcctcctccccagttctactcaagccttattgaagagataggaactcttggttgggataaacttgtgtatgcggatacctgcttcagtaccatcaagttaaaagcagaagatgcttctggtagagagcatttaatcactctcaagttgaaggcaaagtatcctgcagaatcaccagattattttgtggattttcctgttccattttgtgcctcctggacacctcagagctccttaataagcatttatagtcagtttttggcagcaatagaatcactaaaggcattctgggatgttatggatgaaatcgatgagaagacctgggtacttgagccagaaaaacctccacggagtgcaacagcacgcagaattgcattagtggtaaaacccctgggaattaagctgagcaggaacatacatttgtgggatccagaaaatagtgtgttacaaaatttgaaagatgttttagaaattgattttccagctcgtgctatcctggaaaaatctgattttactatggattgtggaatttgttatgcttatcaacttgacggtaccattcctgatcaagtgtgtgataattctcagtgtggacaacctttccatcaaatatgcttatatgagtggctgagaggactactaactagtagacagagttttaacatcatatttggtgaatgtccatattgtagtaagccaattaccttaaaaatgtctggaaggaaacactga

SEQ ID NO: 789 - DNA, 1137 bp, Homo sapiens
atggtaatggaaagactaggaatagatttacagaagatctcaggccagaatggtacctttaaaaagtcaactgtcctgcaattaggtatccgaatgttggatgtactggaatatatacatgaaaatgaatatgttcatggtgatataaaagcagcaaatctacttttgggttacaaaaatccagaccagggaagagacttccaccttaggatagtgttgcctgaagatttacaactgaagaatgcaagattattatgtagttggcagctgagaacaatacttagtggataccatcgaatagtacaacagagaatgcagcactctcctgatctaatgagctttatgatggagttgaagatgcttttggaagttgccttaaagaatagacaagagctgtatgcactacctcctcctccccagttctactcaagccttattgaagagataggaactcttggttgggataaacttgtgtatgcggatacctgcttcagtaccatcaagttaaaagcagaagatgcttctggtagagagcatttaatcactctcaagttgaaggcaaagtatcctgcagaatcaccagattattttgtggattttcctgttccattttgtgcctcctggacacctcagagctccttaataagcatttatagtcagtttttggcagcaatagaatcactaaaggcattctgggatgttatggatgaaatcgatgagaagacctgggtacttgagccagaaaaacctccacggagtgcaacagcacgcagaattgcattagtggtaaaacccctgggaattaagctgagcaggaacatacatttgtgggatccagaaaatagtgtgttacaaaatttgaaagatgttttagaaattgattttccagctcgtgctatcctggaaaaatctgattttactatggattgtggaatttgttatgcttatcaacttgacggtaccattcctgatcaagtgtgtgataattctcagtgtggacaacctttccatcaaatatgcttatatgagtggctgagaggactactaactagtagacagagttttaacatcatatttggtgaatgtccatattgtagtaagccaattaccttaaaaatgtctggaaggaaacactga

SEQ ID NO: 790 - DNA, 1647 bp, Homo sapiens
atggtaatggaaagactaggaatagatttacagaagatctcaggccagaatggtacctttaaaaagtcaactgtcctgcaattaggtatccgaatgttggatgtactggaatatatacatgaaaatgaatatgttcatggtgatataaaagcagcaaatctacttttgggttacaaaaatccagaccaggtttatcttgcagattatggactttcctacagatattgtcccaatgggaaccacaaacagtatcaggaaaatcctagaaaaggccataatgggacaatagagtttaccagcttggatgcccacaagggagtagccttgtccagacgaagtgacgttgagatcctcggctactgcatgctgcggtggttgtgtgggaaacttccctgggaacagaacctgaaggaccctgtggctgtgcagactgctaaaacaaatctgttggacgagctcccccagtcagtgcttaaatgggctccttctggaagcagttgctgtgaaatagcccaatttttggtatgtgctcatagtttagcatatgatgaaaagccaaactatcaagccctcaagaaaattttgaaccctcatggaatacctttaggaccactggacttttccacaaaaggacagagtataaatgtccatactccaaacagtcaaaaagttgattcacaaaaggctgcaacaaagcaagtcaacaaggcacacaataggttaatcgaaaaaaaagtccacagtgagagaagcgctgagtcctgtgcaacatggaaagtgcagaaagaggagaaactgattggattgatgaacaatgaagcagctcaggaagttgccttaaagaatagacaagagctgtatgcactacctcctcctccccagttctactcaagccttattgaagagataggaactcttggttgggataaacttgtgtatgcggatacctgcttcagtaccatcaagttaaaagcagaagatgcttctggtagagagcatttaatcactctcaagttgaaggcaaagtatcctgcagaatcaccagattattttgtggattttcctgttccattttgtgcctcctggacacctcagagctccttaataagcatttatagtcagtttttggcagcaatagaatcactaaaggcattctgggatgttatggatgaaatcgatgagaagacctgggtacttgagccagaaaaacctccacggagtgcaacagcacgcagaattgcattaggtaataatgtttccataaatatagaggtagaccccaggcatcctactatgcttcctgagtgcttctttcttggagctgaccatgtggtaaaacccctgggaattaagctgagcaggaacatacatttgtgggatccagaaaatagtgtgttacaaaatttgaaagatgttttagaaattgattttccagctcgtgctatcctggaaaaatctgattttactatggattgtggaatttgttatgcttatcaacttgacggtaccattcctgatcaagtgtgtgataattctcagtgtggacaacctttccatcaaatatgcttatatgagtggctgagaggactactaactagtagacagagttttaacatcatatttggtgaatgtccatattgtagtaag

SEQ ID NO: 791 - DNA, 1968 bp, Homo sapiens
atggaaggcaatcagtgggtactgggcaagaagattggctctggaggatttggattgatatatttagctttccccacaaataaaccagagaaagatgcaagacatgtagtaaaagtggaatatcaagaaaatggcccgttattttcagaacttaaattttatcagagagttgcaaaaaaagactgtatcaaaaagtggatagaacgcaaacaacttgattatttaggaattcctctgttttatggatctggtctgactgaattcaagggaagaagttacagatttatggtaatggaaagactaggaatagatttacagaagatctcaggccagaatggtacctttaaaaagtcaactgtcctgcaattaggtatccgaatgttggatgtactggaatatatacatgaaaatgaatatgttcatggtgatataaaagcagcaaatctacttttgggttacaaaaatccagaccaggtttatcttgcagattatggactttcctacagatattgtcccaatgggaaccacaaacagtatcaggaaaatcctagaaaaggccataatgggacaatagagtttaccagcttggatgcccacaagggagtagccttgtccagacgaagtgacgttgagatcctcggctactgcatgctgcggtggttgtgtgggaaacttccctgggaacagaacctgaaggaccctgtggctgtgcagactgctaaaacaaatctgttggacgagctcccccagtcagtgcttaaatgggctccttctggaagcagttgctgtgaaatagcccaatttttggtatgtgctcatagtttagcatatgatgaaaagccaaactatcaagccctcaagaaaattttgaaccctcatggaatacctttaggaccactggacttttccacaaaaggacagagtataaatgtccatactccaaacagtcaaaaagttgattcacaaaaggctgcaacaaagcaagtcaacaaggcacacaataggttaatcgaaaaaaaagtccacagtgagagaagcgctgagtcctgtgcaacatggaaagtgcagaaagaggagaaactgattggattgatgaacaatgaagcagctcaggaagttgccttaaagaatagacaagagctgtatgcactacctcctcctccccagttctactcaagccttattgaagagataggaactcttggttgggataaacttgtgtatgcggatacctgcttcagtaccatcaagttaaaagcagaagatgcttctggtagagagcatttaatcactctcaagttgaaggcaaagtatcctgcagaatcaccagattattttgtggattttcctgttccattttgtgcctcctggacacctcagagctccttaataagcatttatagtcagtttttggcagcaatagaatcactaaaggcattctgggatgttatggatgaaatcgatgagaagacctgggtacttgagccagaaaaacctccacggagtgcaacagcacgcagaattgcattaggtaataatgtttccataaatatagaggtagaccccaggcatcctactatgcttcctgagtgcttctttcttggagctgaccatgtggtaaaacccctgggaattaagctgagcaggaacatacatttgtgggatccagaaaatagtgtgttacaaaatttgaaagatgttttagaaattgattttccagctcgtgctatcctggaaaaatctgattttactatggattgtggaatttgttatgcttatcaacttgacggtaccattcctgatcaagtgtgtgataattctcagtgtggacaacctttccatcaaatatgcttatatgagtggctgagaggactactaactagtagacagagttttaacatcatatttggtgaatgtccatattgtagtaagccaattaccttaaaaatgtctggaaggaaacactga

SEQ ID NO: 792 - DNA, 1686 bp, Homo sapiens
atgccaccaaaaagaaatgaaaaatacaaacttcctattccatttccagaaggcaaggttctggatgatatggaaggcaatcagtgggtactgggcaagaagattggctctggaggatttggattgatatatttagctttccccacaaataaaccagagaaagatgcaagacatgtagtaaaagtggaatatcaagaaaatggcccgttattttcagaacttaaattttatcagagagttgcaaaaaaagactgtatcaaaaagtggatagaacgcaaacaacttgattatttaggaattcctctgttttatggatctggtctgactgaattcaagggaagaagttacagatttatggtaatggaaagactaggaatagatttacagaagatctcaggccagaatggtacctttaaaaagtcaactgtcctgcaattaggtatccgaatgttggatgtactggaatatatacatgaaaatgaatatgttcatggtgatataaaagcagcaaatctacttttgggttacaaaaatccagaccaggtttatcttgcagattatggactttcctacagatattgtcccaatgggaaccacaaacagtatcaggaaaatcctagaaaaggccataatgggacaatagagtttaccagcttggatgcccacaagggagtagccttgtccagacgaagtgacgttgagatcctcggctactgcatgctgcggtggttgtgtgggaaacttccctgggaacagaacctgaaggaccctgtggctgtgcagactgctaaaacaaatctgttggacgagctcccccagtcagtgcttaaatgggctccttctggaagcagttgctgtgaaatagcccaatttttggtatgtgctcatagtttagcatatgatgaaaagccaaactatcaagccctcaagaaaattttgaaccctcatggaatacctttaggaccactggacttttccacaaaaggacagagtataaatgtccatactccaaacagtcaaaaagttgattcacaaaaggctgcaacaaagcaagtcaacaaggcacacaataggttaatcgaaaaaaaagtccacagtgagagaagcgctgagtcctgtgcaacatggaaagtgcagaaagaggagaaactgattggattgatgaacaatgaagcagctcagagctccttaataagcatttatagtcagtttttggcagcaatagaatcactaaaggcattctgggatgttatggatgaaatcgatgagaagacctgggtacttgagccagaaaaacctccacggagtgcaacagcacgcagaattgcattagtggtaaaacccctgggaattaagctgagcaggaacatacatttgtgggatccagaaaatagtgtgttacaaaatttgaaagatgttttagaaattgattttccagctcgtgctatcctggaaaaatctgattttactatggattgtggaatttgttatgcttatcaacttgacggtaccattcctgatcaagtgtgtgataattctcagtgtggacaacctttccatcaaatatgcttatatgagtggctgagaggactactaactagtagacagagttttaacatcatatttggtgaatgtccatattgtagtaagccaattaccttaaaaatgtctggaaggaaacactga

SEQ ID NO: 793 - DNA, 1062 bp, Homo sapiens
atggaaggcaatcagtgggtactgggcaagaagattggctctggaggatttggattgatatatttagctttccccacaaataaaccagagaaagatgcaagacatgtagtaaaagtggaatatcaagaaaatggcccgttattttcagaacttaaattttatcagagagttgcaaaaaaagactgtatcaaaaagtggatagaacgcaaacaacttgattatttaggaattcctctgttttatggatctggtctgactgaattcaagggaagaagttacagatttatggtaatggaaagactaggaatagatttacagaagatctcaggccagaatggtacctttaaaaagtcaactgtcctgcaattaggtatccgaatgttggatgtactggaatatatacatgaaaatgaatatgttcatggtgatataaaagcagcaaatctacttttgggttacaaaaatccagaccagagctccttaataagcatttatagtcagtttttggcagcaatagaatcactaaaggcattctgggatgttatggatgaaatcgatgagaagacctgggtacttgagccagaaaaacctccacggagtgcaacagcacgcagaattgcattaggtaataatgtttccataaatatagaggtagaccccaggcatcctactatgcttcctgagtgcttctttcttggagctgaccatgtggtaaaacccctgggaattaagctgagcaggaacatacatttgtgggatccagaaaatagtgtgttacaaaatttgaaagatgttttagaaattgattttccagctcgtgctatcctggaaaaatctgattttactatggattgtggaatttgttatgcttatcaacttgacggtaccattcctgatcaagtgtgtgataattctcagtgtggacaacctttccatcaaatatgcttatatgagtggctgagaggactactaactagtagacagagttttaacatcatatttggtgaatgtccatattgtagtaagccaattaccttaaaaatgtctggaaggaaacactga

SEQ ID NO: 794 - DNA, 1017 bp, Homo sapiens
atggtaatggaaagactaggaatagatttacagaagatctcaggccagaatggtacctttaaaaagtcaactgtcctgcaattaggtatccgaatgttggatgtactggaatatatacatgaaaatgaatatgttcatggtgatataaaagcagcaaatctacttttgggttacaaaaatccagaccaggtttatcttgcagattatggactttcctacagatattgtcccaatgggaaccacaaacagtatcaggaaaatcctagaaaaggccataatgggacaatagagtttaccagcttggatgcccacaagggagtagccttgtccagacgaagtgacgttgagatcctcggctactgcatgctgcggtggttgtgtgggaaacttccctgggaacagaacctgaaggaccctgtggctgtgcagactgctaaaacaaatctgttggacgagctcccccagtcagtgcttaaatgggctccttctggaagcagttgctgtgaaatagcccaatttttggtatgtgctcatagtttagcatatgatgaaaagccaaactatcaagccctcaagaaaattttgaaccctcatggaatacctttaggaccactggacttttccacaaaaggacagagtataaatgtccatactccaaacagtcaaaaagttgattcacaaaaggctgcaacaaagcaagtcaacaaggcacacaataggttaatcgaaaaaaaagtccacagtgagagaagcgctgagtcctgtgcaacatggaaagtgcagaaagaggagaaactgattggattgatgaacaatgaagcagctcaggattttactatggattgtggaatttgttatgcttatcaacttgacggtaccattcctgatcaagtgtgtgataattctcagtgtggacaacctttccatcaaatatgcttatatgagtggctgagaggactactaactagtagacagagttttaacatcatatttggtgaatgtccatattgtagtaag

SEQ ID NO: 795 - DNA, 1575 bp, Homo sapiens
atgccaccaaaaagaaatgaaaaatacaaacttcctattccatttccagaaggcaaggttctggatgatatggaaggcaatcagtgggtactgggcaagaagattggctctggaggatttggattgatatatttagctttccccacaaataaaccagagaaagatgcaagacatgtagtaaaagtggaatatcaagaaaatggcccgttattttcagaacttaaattttatcagagagttgcaaaaaaagactgtatcaaaaagtggatagaacgcaaacaacttgattatttaggaattcctctgttttatggatctggtctgactgaattcaagggaagaagttacagatttatggtaatggaaagactaggaatagatttacagaagatctcaggccagaatggtacctttaaaaagtcaactgtcctgcaattaggtatccgaatgttggatgtactggaatatatacatgaaaatgaatatgttcatggtgatataaaagcagcaaatctacttttgggttacaaaaatccagaccagggaagagacttccaccttaggatagtgttgcctgaagatttacaactgaagaatgcaagattattatgtagttggcagctgagaacaatacttagtggataccatcgaatagtacaacagagaatgcagcactctcctgatctaatgagctttatgatggagttgaagatgcttttggaagttgccttaaagaatagacaagagctgtatgcactacctcctcctccccagttctactcaagccttattgaagagataggaactcttggttgggataaacttgtgtatgcggatacctgcttcagtaccatcaagttaaaagcagaagatgcttctggtagagagcatttaatcactctcaagttgaaggcaaagtatcctgcagaatcaccagattattttgtggattttcctgttccattttgtgcctcctggacacctcagagctccttaataagcatttatagtcagtttttggcagcaatagaatcactaaaggcattctgggatgttatggatgaaatcgatgagaagacctgggtacttgagccagaaaaacctccacggagtgcaacagcacgcagaattgcattaggtaataatgtttccataaatatagaggtagaccccaggcatcctactatgcttcctgagtgcttctttcttggagctgaccatgtggtaaaacccctgggaattaagctgagcaggaacatacatttgtgggatccagaaaatagtgtgttacaaaatttgaaagatgttttagaaattgattttccagctcgtgctatcctggaaaaatctgattttactatggattgtggaatttgttatgcttatcaacttgacggtaccattcctgatcaagtgtgtgataattctcagtgtggacaacctttccatcaaatatgcttatatgagtggctgagaggactactaactagtagacagagttttaacatcatatttggtgaatgtccatattgtagtaagccaattaccttaaaaatgtctggaaggaaacactga

SEQ ID NO: 796 - DNA, 357 bp, Homo sapiens
atgtctgatctccgaataactgaggcgtttctgtacatggattatctgtgttttagagcactttgctgcaagggaccaccacctgcacgaccagaatatgacctggtttgcataggcctcacaggttctggcaaaaccagtctgttgtccaaactctgcagtgaaagccccgataacgtcgtgtcgaccacaggttttagtattaaagcagtgccattccagaatgccatcttgaatgtaaaagaacttggaggatggagctatgacattgaagagaggaaggttccaaaacccaagtccaagtcttatggtgcaaacttttcttggaacaaaagaacaagagtatccacaaaatag

SEQ ID NO: 797 - DNA, 399 bp, Homo sapiens
atgtctgatctccgaataactgaggcgtttctgtacatggattatctggatatcactactttaactggagttccagaagagcatataaaaactagaaaagtcaggatctttgttcctgctcgcaataacatgcagtctggagtaaacaacacaaagaaatggaagatggagtttgataccagagagcgatgggaaaatcctttgatgggttgggcatcaacggctgatcccttatccaacatggttctaaccttcagtactaaagaagatgcagtttcctttgcagaaaaaaatggatggagctatgacattgaagagaggaaggttccaaaacccaagtccaagtcttatggtgcaaacttttcttggaacaaaagaacaagagtatccacaaaatag

SEQ ID NO: 798 - DNA, 297 bp, Homo sapiens
atgtctgatctccgaataactgaggcgtttctgtacatggattatctgtgttttagagcactttgctgcaagggaccaccacctgcacgaccagaatatgacctggtttgcataggcctcacaggttctggcaaaaccagtctgttgtccaaactctgcagtgaaagccccgataacgtcgtgtcgaccacaggatggagctatgacattgaagagaggaaggttccaaaacccaagtccaagtcttatggtgcaaacttttcttggaacaaaagaacaagagtatccacaaaatag

SEQ ID NO: 799 - DNA, 813 bp, Homo sapiens
atgtctgatctccgaataactgaggcgtttctgtacatggattatctgtgttttagagcactttgctgcaagggaccaccacctgcacgaccagaatatgacctggtttgcataggcctcacaggttctggcaaaaccagtctgttgtccaaactctgcagtgaaagccccgataacgtcgtgtcgaccacaggttttagtattaaagcagtgccattccagaatgccatcttgaatgtaaaagaacttggaggggctgataacatccggaaatactggagccgctactaccaaggatctcaaggggtaatatttgtattagacagtgcctcttcagaggatgatttagaagctgctagaaatgagctgcactcagctcttcagcatccacagttatgcactttaccctttttaatattggccaatcatcaagacaagccagcagctcgctcagtacaagaggatatcactactttaactggagttccagaagagcatataaaaactagaaaagtcaggatctttgttcctgctcgcaataacatgcagtctggagtaaacaacacaaagaaatggaagatggagtttgataccagagagcgatgggaaaatcctttgatgggttgggcatcaacggctgatcccttatccaacatggttctaaccttcagtactaaagaagatgcagtttcctttgcagaaaaaaatggatggagctatgacattgaagagaggaaggttccaaaacccaagtccaagtcttatggtgcaaacttttcttggaacaaaagaacaagagtatccacaaaatag

SEQ ID NO: 800-812 - skipped (13 entries)

SEQ ID NO: 813 - DNA, 288 bp, Homo sapiens
atggcggttgagcagatgccaaaaaaggattggtacagcatcctgggagcagacccatctgcaaatatatcagacctaaaacaaaaatatcaaaaactcatattaatggtgccaatgggtcatgtttggttagaaggtgacaatctacagaattctacagattccaggtgctatggacctattccatatggactaataagaggacgaatcttctttaagatttggcctctgagtgattttggatttttacgtgccagccctaatggccacagattttctgatgattag

SEQ ID NO: 814 - DNA, 5175 bp, Homo sapiens
atggagctggatctgtctccacctcatcttagcagctctccggaagacctttgcccagcccctgggacccctcctgggactccccggccccctgatacccctctgcctgaggaggtaaagaggtcccagcctctcctcatcccaaccaccggcaggaaacttcgagaggaggagaggcgtgccacctccctcccctctatccccaaccccttccctgagctctgcagtcctccctcacagagcccaattctcgggggcccctccagtgcaagggggctgctcccccgcgatgccagccgcccccatgtagtaaaggtgtacagtgaggatggggcctgcaggtctgtggaggtggcagcaggtgccacagctcgccacgtgtgtgaaatgctggtgcagcgagctcacgccttgagcgacgagacctgggggctggtggagtgccacccccacctagcactggagcggggtttggaggaccacgagtccgtggtggaagtgcaggctgcctggcccgtgggcggagatagccgcttcgtcttccggaaaaacttcgccaagtacgaactgttcaagagctccccacactccctgttcccagaaaaaatggtctccagctgtctcgatgcacacactggtatatcccatgaagacctcatccagaacttcctgaatgctggcagctttcctgagatccagggctttctgcagctgcggggttcaggacggaagctttggaaacgctttttctgcttcttgcgccgatctggcctctattactccaccaagggcacctctaaggatccgaggcacctgcagtacgtggcagatgtgaacgagtccaacgtgtacgtggtgacgcagggccgcaagctctacgggatgcccactgacttcggtttctgtgtcaagcccaacaagcttcgaaatggccacaaggggcttcggatcttctgcagtgaagatgagcagagccgcacctgctggctggctgccttccgcctcttcaagtacggggtgcagctgtacaagaattaccagcaggcacagtctcgccatctgcatccatcttgtttgggctccccacccttgagaagtgcctcagataataccctggtggccatggacttctctggccatgctgggcgtgtcattgagaacccccgggaggctctgagtgtggccctggaggaggcccaggcctggaggaagaagacaaaccaccgcctcagcctgcccatgccagcctccggcacgagcctcagtgcagccatccaccgcacccaactctggttccacgggcgcatttcccgtgaggagagccagcggcttattggacagcagggcttggtagacggcctgttcctggtccgggagagtcagcggaacccccagggctttgtcctctctttgtgccacctgcagaaagtgaagcattatctcatcctgccgatgccccgggggtcctggaagccacaagtgtgcaccggcacagacatgaagctgcggctccctgccagtcccgagacccacctggacatgctccgccacctctaccagggctgccaggtggtgcagggaaacctggaactcacctacctgcccaccaatgccagcctgtccttcctgcaggatatccaggaggtgcagggctacgtgctcatcgctcacaaccaagtgaggcaggtcccactgcagaggctgcggattgtgcgaggcacccagctctttgaggacaactatgccctggccgtgctagacaatggagacccgctgaacaataccacccctgtcacaggggcctccccaggaggcctgcgggagctgcagcttcgaagcctcacagagatcttgaaaggaggggtcttgatccagcggaacccccagctctgctaccaggacacgattttgtggaaggacatcttccacaagaacaaccagctggctctcacactgatagacaccaaccgctctcgggcctgccacccctgttctccgatgtgtaagggctcccgctgctggggagagagttctgaggattgtcagagcctgacgcgcactgtctgtgccggtggctgtgcccgctgcaaggggccactgcccactgactgctgccatgagcagtgtgctgccggctgcacgggccccaagcactctgactgcctggcctgcctccacttcaaccacagtggcatctgtgagctgcactgcccagccctggtcacctacaacacagacacgtttgagtccatgcccaatcccgagggccggtatacattcggcgccagctgtgtgactgcctgtccctacaactacctttctacggacgtgggatcctgcaccctcgtctgccccctgcacaaccaagaggtgacagcagaggatggaacacagcggtgtgagaagtgcagcaagccctgtgcccgagtgtgctatggtctgggcatggagcacttgcgagaggtgagggcagttaccagtgccaatatccaggagtttgctggctgcaagaagatctttgggagcctggcatttctgccggagagctttgatggggacccagcctccaacactgccccgctccagccagagcagctccaagtgtttgagactctggaagagatcacaggttacctatacatctcagcatggccggacagcctgcctgacctcagcgtcttccagaacctgcaagtaatccggggacgaattctgcacaatggcgcctactcgctgaccctgcaagggctgggcatcagctggctggggctgcgctcactgagggaactgggcagtggactggccctcatccaccataacacccacctctgcttcgtgcacacggtgccctgggaccagctctttcggaacccgcaccaagctctgctccacactgccaaccggccagaggacgagtgtgtgggcgagggcctggcctgccaccagctgtgcgcccgagggcactgctggggtccagggcccacccagtgtgtcaactgcagccagttccttcggggccaggagtgcgtggaggaatgccgagtactgcaggggctccccagggagtatgtgaatgccaggcactgtttgccgtgccaccctgagtgtcagccccagaatggctcagtgacctgttttggaccggaggctgaccagtgtgtggcctgtgcccactataaggaccctcccttctgcgtggcccgctgccccagcggtgtgaaacctgacctctcctacatgcccatctggaagtttccagatgaggagggcgcatgccagccttgccccatcaactgcacccactcctgtgtggacctggatgacaagggctgccccgccgagcagagagccagccctctgacgtccatcatctctgcggtggttggcattctgctggtcgtggtcttgggggtggtctttgggatcctcatcaagcgacggcagcagaagatccggaagtacacgatgcggagactgctgcaggaaacggagctggtggagccgctgacacctagcggagcgatgcccaaccaggcgcagatgcggatcctgaaagagacggagctgaggaaggtgaaggtgcttggatctggcgcttttggcacagtctacaagggcatctggatccctgatggggagaatgtgaaaattccagtggccatcaaagtgttgagggaaaacacatcccccaaagccaacaaagaaatcttagacgaagcatacgtgatggctggtgtgggctccccatatgtctcccgccttctgggcatctgcctgacatccacggtgcagctggtgacacagcttatgccctatggctgcctcttagaccatgtccgggaaaaccgcggacgcctgggctcccaggacctgctgaactggtgtatgcagattgccaaggggatgagctacctggaggatgtgcggctcgtacacagggacttggccgctcggaacgtgctggtcaagagtcccaaccatgtcaaaattacagacttcgggctggctcggctgctggacattgacgagacagagtaccatgcagatgggggcaaggtgcccatcaagtggatggcgctggagtccattctccgccggcggttcacccaccagagtgatgtgtggagttatggtgtgactgtgtgggagctgatgacttttggggccaaaccttacgatgggatcccagcccgggagatccctgacctgctggaaaagggggagcggctgccccagccccccatctgcaccattgatgtctacatgatcatggtcaaatgttggatgattgactctgaatgtcggccaagattccgggagttggtgtctgaattctcccgcatggccagggacccccagcgctttgtggtcatccagaatgaggacttgggcccagccagtcccttggacagcaccttctaccgctcactgctggaggacgatgacatgggggacctggtggatgctgaggagtatctggtaccccagcagggcttcttctgtccagaccctgccccgggcgctgggggcatggtccaccacaggcaccgcagctcatctaccaggagtggcggtggggacctgacactagggctggagccctctgaagaggaggcccccaggtctccactggcaccctccgaaggggctggctccgatgtatttgatggtgacctgggaatgggggcagccaaggggctgcaaagcctccccacacatgaccccagccctctacagcggtacagtgaggaccccacagtacccctgccctctgagactgatggctacgttgcccccctgacctgcagcccccagcctgaatatgtgaaccagccagatgttcggccccagcccccttcgccccgagagggccctctgcctgctgcccgacctgctggtgccactctggaaaggcccaagactctctccccagggaagaatggggtcgtcaaagacgtttttgcctttgggggtgccgtggagaaccccgagtacttgacaccccagggaggagctgcccctcagccccaccctcctcctgccttcagcccagccttcgacaacctctattactgggaccaggacccaccagagcggggggctccacccagcaccttcaaagggacacctacggcagagaacccagagtacctgggtctggacgtgccagtgtga

SEQ ID NO: 815 - DNA, 3723 bp, Homo sapiens
atgccccgggggtcctggaagccacaagtgtgcaccggcacagacatgaagctgcggctccctgccagtcccgagacccacctggacatgctccgccacctctaccagggctgccaggtggtgcagggaaacctggaactcacctacctgcccaccaatgccagcctgtccttcctgcaggatatccaggaggtgcagggctacgtgctcatcgctcacaaccaagtgaggcaggtcccactgcagaggctgcggattgtgcgaggcacccagctctttgaggacaactatgccctggccgtgctagacaatggagacccgctgaacaataccacccctgtcacaggggcctccccaggaggcctgcgggagctgcagcttcgaagcctcacagagatcttgaaaggaggggtcttgatccagcggaacccccagctctgctaccaggacacgattttgtggaaggacatcttccacaagaacaaccagctggctctcacactgatagacaccaaccgctctcgggcctgccacccctgttctccgatgtgtaagggctcccgctgctggggagagagttctgaggattgtcagagcctgacgcgcactgtctgtgccggtggctgtgcccgctgcaaggggccactgcccactgactgctgccatgagcagtgtgctgccggctgcacgggccccaagcactctgactgcctggcctgcctccacttcaaccacagtggcatctgtgagctgcactgcccagccctggtcacctacaacacagacacgtttgagtccatgcccaatcccgagggccggtatacattcggcgccagctgtgtgactgcctgtccctacaactacctttctacggacgtgggatcctgcaccctcgtctgccccctgcacaaccaagaggtgacagcagaggatggaacacagcggtgtgagaagtgcagcaagccctgtgcccgagtgtgctatggtctgggcatggagcacttgcgagaggtgagggcagttaccagtgccaatatccaggagtttgctggctgcaagaagatctttgggagcctggcatttctgccggagagctttgatggggacccagcctccaacactgccccgctccagccagagcagctccaagtgtttgagactctggaagagatcacaggttacctatacatctcagcatggccggacagcctgcctgacctcagcgtcttccagaacctgcaagtaatccggggacgaattctgcacaatggcgcctactcgctgaccctgcaagggctgggcatcagctggctggggctgcgctcactgagggaactgggcagtggactggccctcatccaccataacacccacctctgcttcgtgcacacggtgccctgggaccagctctttcggaacccgcaccaagctctgctccacactgccaaccggccagaggacgagtgtgtgggcgagggcctggcctgccaccagctgtgcgcccgagggcactgctggggtccagggcccacccagtgtgtcaactgcagccagttccttcggggccaggagtgcgtggaggaatgccgagtactgcaggggctccccagggagtatgtgaatgccaggcactgtttgccgtgccaccctgagtgtcagccccagaatggctcagtgacctgttttggaccggaggctgaccagtgtgtggcctgtgcccactataaggaccctcccttctgcgtggcccgctgccccagcggtgtgaaacctgacctctcctacatgcccatctggaagtttccagatgaggagggcgcatgccagccttgccccatcaactgcacccactcctgtgtggacctggatgacaagggctgccccgccgagcagagagccagccctctgacgtccatcatctctgcggtggttggcattctgctggtcgtggtcttgggggtggtctttgggatcctcatcaagcgacggcagcagaagatccggaagtacacgatgcggagactgctgcaggaaacggagctggtggagccgctgacacctagcggagcgatgcccaaccaggcgcagatgcggatcctgaaagagacggagctgaggaaggtgaaggtgcttggatctggcgcttttggcacagtctacaagggcatctggatccctgatggggagaatgtgaaaattccagtggccatcaaagtgttgagggaaaacacatcccccaaagccaacaaagaaatcttagacgaagcatacgtgatggctggtgtgggctccccatatgtctcccgccttctgggcatctgcctgacatccacggtgcagctggtgacacagcttatgccctatggctgcctcttagaccatgtccgggaaaaccgcggacgcctgggctcccaggacctgctgaactggtgtatgcagattgccaaggggatgagctacctggaggatgtgcggctcgtacacagggacttggccgctcggaacgtgctggtcaagagtcccaaccatgtcaaaattacagacttcgggctggctcggctgctggacattgacgagacagagtaccatgcagatgggggcaaggtgcccatcaagtggatggcgctggagtccattctccgccggcggttcacccaccagagtgatgtgtggagttatggtgtgactgtgtgggagctgatgacttttggggccaaaccttacgatgggatcccagcccgggagatccctgacctgctggaaaagggggagcggctgccccagccccccatctgcaccattgatgtctacatgatcatggtcaaatgttggatgattgactctgaatgtcggccaagattccgggagttggtgtctgaattctcccgcatggccagggacccccagcgctttgtggtcatccagaatgaggacttgggcccagccagtcccttggacagcaccttctaccgctcactgctggaggacgatgacatgggggacctggtggatgctgaggagtatctggtaccccagcagggcttcttctgtccagaccctgccccgggcgctgggggcatggtccaccacaggcaccgcagctcatctaccaggagtggcggtggggacctgacactagggctggagccctctgaagaggaggcccccaggtctccactggcaccctccgaaggggctggctccgatgtatttgatggtgacctgggaatgggggcagccaaggggctgcaaagcctccccacacatgaccccagccctctacagcggtacagtgaggaccccacagtacccctgccctctgagactgatggctacgttgcccccctgacctgcagcccccagcctgaatatgtgaaccagccagatgttcggccccagcccccttcgccccgagagggccctctgcctgctgcccgacctgctggtgccactctggaaaggcccaagactctctccccagggaagaatggggtcgtcaaagacgtttttgcctttgggggtgccgtggagaaccccgagtacttgacaccccagggaggagctgcccctcagccccaccctcctcctgccttcagcccagccttcgacaacctctattactgggaccaggacccaccagagcggggggctccacccagcaccttcaaagggacacctacggcagagaacccagagtacctgggtctggacgtgccagtgtga

SEQ ID NO: 816 - DNA, 2631 bp, Homo sapiens
atggagctggatctgtctccacctcatcttagcagctctccggaagacctttgcccagcccctgggacccctcctgggactccccggccccctgatacccctctgcctgaggaggtaaagaggtcccagcctctcctcatcccaaccaccggcaggaaacttcgagaggaggagaggcgtgccacctccctcccctctatccccaaccccttccctgagctctgcagtcctccctcacagagcccaattctcgggggcccctccagtgcaagggggctgctcccccgcgatgccagccgcccccatgtagtaaaggtgtacagtgaggatggggcctgcaggtctgtggaggtggcagcaggtgccacagctcgccacgtgtgtgaaatgctggtgcagcgagctcacgccttgagcgacgagacctgggggctggtggagtgccacccccacctagcactggagcggggtttggaggaccacgagtccgtggtggaagtgcaggctgcctggcccgtgggcggagatagccgcttcgtcttccggaaaaacttcgccaagtacgaactgttcaagagctccccacactccctgttcccagaaaaaatggtctccagctgtctcgatgcacacactggtatatcccatgaagacctcatccagaacttcctgaatgctggcagctttcctgagatccagggctttctgcagctgcggggttcaggacggaagctttggaaacgctttttctgcttcttgcgccgatctggcctctattactccaccaagggcacctctaaggatccgagccctctgacgtccatcatctctgcggtggttggcattctgctggtcgtggtcttgggggtggtctttgggatcctcatcaagcgacggcagcagaagatccggaagtacacgatgcggagactgctgcaggaaacggagctggtggagccgctgacacctagcggagcgatgcccaaccaggcgcagatgcggatcctgaaagagacggagctgaggaaggtgaaggtgcttggatctggcgcttttggcacagtctacaagggcatctggatccctgatggggagaatgtgaaaattccagtggccatcaaagtgttgagggaaaacacatcccccaaagccaacaaagaaatcttagacgaagcatacgtgatggctggtgtgggctccccatatgtctcccgccttctgggcatctgcctgacatccacggtgcagctggtgacacagcttatgccctatggctgcctcttagaccatgtccgggaaaaccgcggacgcctgggctcccaggacctgctgaactggtgtatgcagattgccaaggggatgagctacctggaggatgtgcggctcgtacacagggacttggccgctcggaacgtgctggtcaagagtcccaaccatgtcaaaattacagacttcgggctggctcggctgctggacattgacgagacagagtaccatgcagatgggggcaaggtgcccatcaagtggatggcgctggagtccattctccgccggcggttcacccaccagagtgatgtgtggagttatggtgtgactgtgtgggagctgatgacttttggggccaaaccttacgatgggatcccagcccgggagatccctgacctgctggaaaagggggagcggctgccccagccccccatctgcaccattgatgtctacatgatcatggtcaaatgttggatgattgactctgaatgtcggccaagattccgggagttggtgtctgaattctcccgcatggccagggacccccagcgctttgtggtcatccagaatgaggacttgggcccagccagtcccttggacagcaccttctaccgctcactgctggaggacgatgacatgggggacctggtggatgctgaggagtatctggtaccccagcagggcttcttctgtccagaccctgccccgggcgctgggggcatggtccaccacaggcaccgcagctcatctaccaggagtggcggtggggacctgacactagggctggagccctctgaagaggaggcccccaggtctccactggcaccctccgaaggggctggctccgatgtatttgatggtgacctgggaatgggggcagccaaggggctgcaaagcctccccacacatgaccccagccctctacagcggtacagtgaggaccccacagtacccctgccctctgagactgatggctacgttgcccccctgacctgcagcccccagcctgaatatgtgaaccagccagatgttcggccccagcccccttcgccccgagagggccctctgcctgctgcccgacctgctggtgccactctggaaaggcccaagactctctccccagggaagaatggggtcgtcaaagacgtttttgcctttgggggtgccgtggagaaccccgagtacttgacaccccagggaggagctgcccctcagccccaccctcctcctgccttcagcccagccttcgacaacctctattactgggaccaggacccaccagagcggggggctccacccagcaccttcaaagggacacctacggcagagaacccagagtacctgggtctggacgtgccagtgtga

SEQ ID NO: 817 - DNA, 3332 bp, Homo sapiens
atggagctggatctgtctccacctcatcttagcagctctccggaagacctttgcccagcccctgggacccctcctgggactccccggccccctgatacccctctgcctgaggaggtaaagaggtcccagcctctcctcatcccaaccaccggcagatgtgtaagggctcccgctgctggggagagagttctgaggattgtcagagcctgacgcgcactgtctgtgccggtggctgtgcccgctgcaaggggccactgcccactgactgctgccatgagcagtgtgctgccggctgcacgggccccaagcactctgactgcctggcctgcctccacttcaaccacagtggcatctgtgagctgcactgcccagccctggtcacctacaacacagacacgtttgagtccatgcccaatcccgagggccggtatacattcggcgccagctgtgtgactgcctgtccctacaactacctttctacggacgtgggatcctgcaccctcgtctgccccctgcacaaccaagaggtgacagcagaggatggaacacagcggtgtgagaagtgcagcaagccctgtgcccgagtgtgctatggtctgggcatggagcacttgcgagaggtgagggcagttaccagtgccaatatccaggagtttgctggctgcaagaagatctttgggagcctggcatttctgccggagagctttgatggggacccagcctccaacactgccccgctccagccagagcagctccaagtgtttgagactctggaagagatcacaggttacctatacatctcagcatggccggacagcctgcctgacctcagcgtcttccagaacctgcaagtaatccggggacgaattctgcacaatggcgcctactcgctgaccctgcaagggctgggcatcagctggctggggctgcgctcactgagggaactgggcagtggactggccctcatccaccataacacccacctctgcttcgtgcacacggtgccctgggaccagctctttcggaacccgcaccaagctctgctccacactgccaaccggccagaggacgagtgtgtgggcgagggcctggcctgccaccagctgtgcgcccgagggcactgctggggtccagggcccacccagtgtgtcaactgcagccagttccttcggggccaggagtgcgtggaggaatgccgagtactgcaggggctccccagggagtatgtgaatgccaggcactgtttgccgtgccaccctgagtgtcagccccagaatggctcagtgacctgttttggaccggaggctgaccagtgtgtggcctgtgcccactataaggaccctcccttctgcgtggcccgctgccccagcggtgtgaaacctgacctctcctacatgcccatctggaagtttccagatgaggagggcgcatgccagccttgccccatcaactgcacccactcctgtgtggacctggatgacaagggctgccccgccgagcagagagccagccctctgacgtccatcatctctgcggtggttggcattctgctggtcgtggtcttgggggtggtctttgggatcctcatcaagcgacggcagcagaagatccggaagtacacgatgcggagactgctgcaggaaacggagctggtggagccgctgacacctagcggagcgatgcccaaccaggcgcagatgcggatcctgaaagagacggagctgaggaaggtgaaggtgcttggatctggcgcttttggcacagtctacaagggcatctggatccctgatggggagaatgtgaaaattccagtggccatcaaagtgttgagggaaaacacatcccccaaagccaacaaagaaatcttagacgaagcatacgtgatggctggtgtgggctccccatatgtctcccgccttctgggcatctgcctgacatccacggtgcagctggtgacacagcttatgccctatggctgcctcttagaccatgtccgggaaaaccgcggacgcctgggctcccaggacctgctgaactggtgtatgcagattgccaaggggatgagctacctggaggatgtgcggctcgtacacagggacttggccgctcggaacgtgctggtcaagagtcccaaccatgtcaaaattacagacttcgggctggctcggctgctggacattgacgagacagagtaccatgcagatgggggcaaggtgcccatcaagtggatggcgctggagtccattctccgccggcggttcacccaccagagtgatgtgtggagttatggtgtgactgtgtgggagctgatgacttttggggccaaaccttacgatgggatcccagcccgggagatccctgacctgctggaaaagggggagcggctgccccagccccccatctgcaccattgatgtctacatgatcatggtcaaatgttggatgattgactctgaatgtcggccaagattccgggagttggtgtctgaattctcccgcatggccagggacccccagcgctttgtggtcatccagaatgaggacttgggcccagccagtcccttggacagcaccttctaccgctcactgctggaggacgatgacatgggggacctggtggatgctgaggagtatctggtaccccagcagggcttcttctgtccagaccctgccccgggcgctgggggcatggtccaccacaggcaccgcagctcatctaccaggagtggcggtggggacctgacactagggctggagccctctgaagaggaggcccccaggtctccactggcaccctccgaaggggctggctccgatgtatttgatggtgacctgggaatgggggcagccaaggggctgcaaagcctccccacacatgaccccagccctctacagcggtacagtgaggaccccacagtacccctgccctctgagactgatggctacgttgcccccctgacctgcagcccccagcctgaatatgtgaaccagccagatgttcggccccagcccccttcgccccgagagggccctctgcctgctgcccgacctgctggtgccactctggaaaggcccaagactctctccccagggaagaatggggtcgtcaaagacgtttttgcctttgggggtgccgtggagaaccccgagtacttgacaccccagggaggagctgcccctcagccccaccctcctcctgccttcagcccagccttcgacaacctctattactgggaccaggacccaccagagcggggggctccacccagcaccttcaaagggacacctacggcagagaacccagagtacctgggtctggacgtgccagtgtga

SEQ ID NO: 818 - DNA, 3177 bp, Homo sapiens
atgtgtaagggctcccgctgctggggagagagttctgaggattgtcagagcctgacgcgcactgtctgtgccggtggctgtgcccgctgcaaggggccactgcccactgactgctgccatgagcagtgtgctgccggctgcacgggccccaagcactctgactgcctggcctgcctccacttcaaccacagtggcatctgtgagctgcactgcccagccctggtcacctacaacacagacacgtttgagtccatgcccaatcccgagggccggtatacattcggcgccagctgtgtgactgcctgtccctacaactacctttctacggacgtgggatcctgcaccctcgtctgccccctgcacaaccaagaggtgacagcagaggatggaacacagcggtgtgagaagtgcagcaagccctgtgcccgagtgtgctatggtctgggcatggagcacttgcgagaggtgagggcagttaccagtgccaatatccaggagtttgctggctgcaagaagatctttgggagcctggcatttctgccggagagctttgatggggacccagcctccaacactgccccgctccagccagagcagctccaagtgtttgagactctggaagagatcacaggttacctatacatctcagcatggccggacagcctgcctgacctcagcgtcttccagaacctgcaagtaatccggggacgaattctgcacaatggcgcctactcgctgaccctgcaagggctgggcatcagctggctggggctgcgctcactgagggaactgggcagtggactggccctcatccaccataacacccacctctgcttcgtgcacacggtgccctgggaccagctctttcggaacccgcaccaagctctgctccacactgccaaccggccagaggacgagtgtgtgggcgagggcctggcctgccaccagctgtgcgcccgagggcactgctggggtccagggcccacccagtgtgtcaactgcagccagttccttcggggccaggagtgcgtggaggaatgccgagtactgcaggggctccccagggagtatgtgaatgccaggcactgtttgccgtgccaccctgagtgtcagccccagaatggctcagtgacctgttttggaccggaggctgaccagtgtgtggcctgtgcccactataaggaccctcccttctgcgtggcccgctgccccagcggtgtgaaacctgacctctcctacatgcccatctggaagtttccagatgaggagggcgcatgccagccttgccccatcaactgcacccactcctgtgtggacctggatgacaagggctgccccgccgagcagagagccagccctctgacgtccatcatctctgcggtggttggcattctgctggtcgtggtcttgggggtggtctttgggatcctcatcaagcgacggcagcagaagatccggaagtacacgatgcggagactgctgcaggaaacggagctggtggagccgctgacacctagcggagcgatgcccaaccaggcgcagatgcggatcctgaaagagacggagctgaggaaggtgaaggtgcttggatctggcgcttttggcacagtctacaagggcatctggatccctgatggggagaatgtgaaaattccagtggccatcaaagtgttgagggaaaacacatcccccaaagccaacaaagaaatcttagacgaagcatacgtgatggctggtgtgggctccccatatgtctcccgccttctgggcatctgcctgacatccacggtgcagctggtgacacagcttatgccctatggctgcctcttagaccatgtccgggaaaaccgcggacgcctgggctcccaggacctgctgaactggtgtatgcagattgccaaggggatgagctacctggaggatgtgcggctcgtacacagggacttggccgctcggaacgtgctggtcaagagtcccaaccatgtcaaaattacagacttcgggctggctcggctgctggacattgacgagacagagtaccatgcagatgggggcaaggtgcccatcaagtggatggcgctggagtccattctccgccggcggttcacccaccagagtgatgtgtggagttatggtgtgactgtgtgggagctgatgacttttggggccaaaccttacgatgggatcccagcccgggagatccctgacctgctggaaaagggggagcggctgccccagccccccatctgcaccattgatgtctacatgatcatggtcaaatgttggatgattgactctgaatgtcggccaagattccgggagttggtgtctgaattctcccgcatggccagggacccccagcgctttgtggtcatccagaatgaggacttgggcccagccagtcccttggacagcaccttctaccgctcactgctggaggacgatgacatgggggacctggtggatgctgaggagtatctggtaccccagcagggcttcttctgtccagaccctgccccgggcgctgggggcatggtccaccacaggcaccgcagctcatctaccaggagtggcggtggggacctgacactagggctggagccctctgaagaggaggcccccaggtctccactggcaccctccgaaggggctggctccgatgtatttgatggtgacctgggaatgggggcagccaaggggctgcaaagcctccccacacatgaccccagccctctacagcggtacagtgaggaccccacagtacccctgccctctgagactgatggctacgttgcccccctgacctgcagcccccagcctgaatatgtgaaccagccagatgttcggccccagcccccttcgccccgagagggccctctgcctgctgcccgacctgctggtgccactctggaaaggcccaagactctctccccagggaagaatggggtcgtcaaagacgtttttgcctttgggggtgccgtggagaaccccgagtacttgacaccccagggaggagctgcccctcagccccaccctcctcctgccttcagcccagccttcgacaacctctattactgggaccaggacccaccagagcggggggctccacccagcaccttcaaagggacacctacggcagagaacccagagtacctgggtctggacgtgccagtgtga

SEQ ID NO: 819 - DNA, 3878 bp, Homo sapiens
atggagctggatctgtctccacctcatcttagcagctctccggaagacctttgcccagcccctgggacccctcctgggactccccggccccctgatacccctctgcctgaggaggtaaagaggtcccagcctctcctcatcccaaccaccggcagatgccccgggggtcctggaagccacaagtgtgcaccggcacagacatgaagctgcggctccctgccagtcccgagacccacctggacatgctccgccacctctaccagggctgccaggtggtgcagggaaacctggaactcacctacctgcccaccaatgccagcctgtccttcctgcaggatatccaggaggtgcagggctacgtgctcatcgctcacaaccaagtgaggcaggtcccactgcagaggctgcggattgtgcgaggcacccagctctttgaggacaactatgccctggccgtgctagacaatggagacccgctgaacaataccacccctgtcacaggggcctccccaggaggcctgcgggagctgcagcttcgaagcctcacagagatcttgaaaggaggggtcttgatccagcggaacccccagctctgctaccaggacacgattttgtggaaggacatcttccacaagaacaaccagctggctctcacactgatagacaccaaccgctctcgggcctgccacccctgttctccgatgtgtaagggctcccgctgctggggagagagttctgaggattgtcagagcctgacgcgcactgtctgtgccggtggctgtgcccgctgcaaggggccactgcccactgactgctgccatgagcagtgtgctgccggctgcacgggccccaagcactctgactgcctggcctgcctccacttcaaccacagtggcatctgtgagctgcactgcccagccctggtcacctacaacacagacacgtttgagtccatgcccaatcccgagggccggtatacattcggcgccagctgtgtgactgcctgtccctacaactacctttctacggacgtgggatcctgcaccctcgtctgccccctgcacaaccaagaggtgacagcagaggatggaacacagcggtgtgagaagtgcagcaagccctgtgcccgagtgtgctatggtctgggcatggagcacttgcgagaggtgagggcagttaccagtgccaatatccaggagtttgctggctgcaagaagatctttgggagcctggcatttctgccggagagctttgatggggacccagcctccaacactgccccgctccagccagagcagctccaagtgtttgagactctggaagagatcacaggttacctatacatctcagcatggccggacagcctgcctgacctcagcgtcttccagaacctgcaagtaatccggggacgaattctgcacaatggcgcctactcgctgaccctgcaagggctgggcatcagctggctggggctgcgctcactgagggaactgggcagtggactggccctcatccaccataacacccacctctgcttcgtgcacacggtgccctgggaccagctctttcggaacccgcaccaagctctgctccacactgccaaccggccagaggacgagtgtgtgggcgagggcctggcctgccaccagctgtgcgcccgagggcactgctggggtccagggcccacccagtgtgtcaactgcagccagttccttcggggccaggagtgcgtggaggaatgccgagtactgcaggggctccccagggagtatgtgaatgccaggcactgtttgccgtgccaccctgagtgtcagccccagaatggctcagtgacctgttttggaccggaggctgaccagtgtgtggcctgtgcccactataaggaccctcccttctgcgtggcccgctgccccagcggtgtgaaacctgacctctcctacatgcccatctggaagtttccagatgaggagggcgcatgccagccttgccccatcaactgcacccactcctgtgtggacctggatgacaagggctgccccgccgagcagagagccagccctctgacgtccatcatctctgcggtggttggcattctgctggtcgtggtcttgggggtggtctttgggatcctcatcaagcgacggcagcagaagatccggaagtacacgatgcggagactgctgcaggaaacggagctggtggagccgctgacacctagcggagcgatgcccaaccaggcgcagatgcggatcctgaaagagacggagctgaggaaggtgaaggtgcttggatctggcgcttttggcacagtctacaagggcatctggatccctgatggggagaatgtgaaaattccagtggccatcaaagtgttgagggaaaacacatcccccaaagccaacaaagaaatcttagacgaagcatacgtgatggctggtgtgggctccccatatgtctcccgccttctgggcatctgcctgacatccacggtgcagctggtgacacagcttatgccctatggctgcctcttagaccatgtccgggaaaaccgcggacgcctgggctcccaggacctgctgaactggtgtatgcagattgccaaggggatgagctacctggaggatgtgcggctcgtacacagggacttggccgctcggaacgtgctggtcaagagtcccaaccatgtcaaaattacagacttcgggctggctcggctgctggacattgacgagacagagtaccatgcagatgggggcaaggtgcccatcaagtggatggcgctggagtccattctccgccggcggttcacccaccagagtgatgtgtggagttatggtgtgactgtgtgggagctgatgacttttggggccaaaccttacgatgggatcccagcccgggagatccctgacctgctggaaaagggggagcggctgccccagccccccatctgcaccattgatgtctacatgatcatggtcaaatgttggatgattgactctgaatgtcggccaagattccgggagttggtgtctgaattctcccgcatggccagggacccccagcgctttgtggtcatccagaatgaggacttgggcccagccagtcccttggacagcaccttctaccgctcactgctggaggacgatgacatgggggacctggtggatgctgaggagtatctggtaccccagcagggcttcttctgtccagaccctgccccgggcgctgggggcatggtccaccacaggcaccgcagctcatctaccaggagtggcggtggggacctgacactagggctggagccctctgaagaggaggcccccaggtctccactggcaccctccgaaggggctggctccgatgtatttgatggtgacctgggaatgggggcagccaaggggctgcaaagcctccccacacatgaccccagccctctacagcggtacagtgaggaccccacagtacccctgccctctgagactgatggctacgttgcccccctgacctgcagcccccagcctgaatatgtgaaccagccagatgttcggccccagcccccttcgccccgagagggccctctgcctgctgcccgacctgctggtgccactctggaaaggcccaagactctctccccagggaagaatggggtcgtcaaagacgtttttgcctttgggggtgccgtggagaaccccgagtacttgacaccccagggaggagctgcccctcagccccaccctcctcctgccttcagcccagccttcgacaacctctattactgggaccaggacccaccagagcggggggctccacccagcaccttcaaagggacacctacggcagagaacccagagtacctgggtctggacgtgccagtgtga

SEQ ID NO: 820 - DNA, 3723 bp, Homo sapiens; identical to SEQ ID NO: 815

SEQ ID NO: 821 - DNA, 3723 bp, Homo sapiens; identical to SEQ ID NO: 815

SEQ ID NO: 822 - DNA, 3723 bp, Homo sapiens; identical to SEQ ID NO: 815

SEQ ID NO: 823 - DNA, 3723 bp, Homo sapiens; identical to SEQ ID NO: 815

SEQ ID NO: 824 - DNA, 3177 bp, Homo sapiens; identical to SEQ ID NO: 818

SEQ ID NO: 825 - DNA, 366 bp, Homo sapiens; identical to SEQ ID NO: 319

SEQ ID NO: 826 - DNA, 366 bp, Homo sapiens; identical to SEQ ID NO: 319

SEQ ID NO: 827 - DNA, 366 bp, Homo sapiens; identical to SEQ ID NO: 319

SEQ ID NO: 828 - DNA, 366 bp, Homo sapiens; identical to SEQ ID NO: 319

SEQ ID NO: 829 - DNA, 624 bp, Homo sapiens; identical to SEQ ID NO: 62

SEQ ID NO: 830 - DNA, 510 bp, Homo sapiens; identical to SEQ ID NO: 61

SEQ ID NO: 831 - DNA, 510 bp, Homo sapiens; identical to SEQ ID NO: 61

SEQ ID NO: 832 - DNA, 510 bp, Homo sapiens; identical to SEQ ID NO: 61

SEQ ID NO: 833 - DNA, 510 bp, Homo sapiens; identical to SEQ ID NO: 61

SEQ ID NO: 834 - DNA, 624 bp, Homo sapiens; identical to SEQ ID NO: 62

SEQ ID NO: 835 - DNA, 624 bp, Homo sapiens; identical to SEQ ID NO: 62

SEQ ID NO: 836 - DNA, 459 bp, Homo sapiens
atgctacgctccactggcttcttccgggccattgactgcccctattggtctggggcgcccggggggccctgccggcggccctactgccacttccggcaccgcggggcccggggctccggcgcgcccggtgacggcggagaggcgccccccgcagcaggggaacgcccttttgcttgtgactggcagggctgcgacaagaagttcgcccgctccgacgagctggcccgccaccaccggacgcacacgggcgagaagcgcttctcctgccctctgtgctccaagcgcttcacccgcagtgaccacctggccaagcacgcccgccgccaccccggcttccacccggacctgctccggcgccctggtgcccgcagtacctcccccagcgactcgctgccctgcagcctggccgggagccctgcgcccagccccgcgcccagcccagcccccgcaggcctgtag

SEQ ID NO: 837 - DNA, 964 bp, Homo sapiens
atggagttgagctgcagcgaagcacctctttacgggcagatgatgatctatgcgaagtttgacaaaaatgtgtatcttcctgaagatgctgagttttactttacttatgacggatctcatcagcgacatgtcatgattgcagagcgcatcgaggataacgttctccagtccagcgtcccaggccatgggcttcaggagacggtgacggtatctgtgtgcctctgctcggaaggttactctccggtgaccatgggctctggctcagtgacctacgtggacaacatggcttgcaggctggctcgtctgctggtgacgcaggccaatcgcctcacagcctgcagccaccagaccctgctgaccccatttgccttgacggcaggagcactgcctgccttggatgaggagctcgtgctggctctgacccatctggaattgcctctagagtggactgtgttgggaagttcttcacttgaagatgaaagaaacaatcatgaaccaggaaaaactcgccaaactgcaggcacaagtgcgcattggtgggaaaggaactgctcgcagaaagaagaaggtggttcatagaacagccacagcagatgacaaaaaacttcagttctccttaaagaagttaggggtaaacaatatctctggtattgaagaggtgaatatgtttacaaaccaaggaacagtgatccactttaacaaccctaaagttcaggcatctctggcagcgaacactttcaccattacaggccatgctgagacaaagcagctgacagaaatgctacccagcatcttaaaccagcttggtgcggatagtctgactagtttaaggagactggccgaagctctgcccaaacaatctgtggatggaaaagcaccacttgctactggagaggatgatgatgatgaagttccagatcttgtggagaattttgatgaggcttccaagaatgaggcaaactga

SEQ ID NO: 838 - DNA, 453 bp, Homo sapiens
atggagttgagctgcagcgaagcacctctttacggaactgctcgcagaaagaagaaggtggttcatagaacagccacagcagatgacaaaaaacttcagttctccttaaagaagttaggggtaaacaatatctctggtattgaagaggtgaatatgtttacaaaccaaggaacagtgatccactttaacaaccctaaagttcaggcatctctggcagcgaacactttcaccattacaggccatgctgagacaaagcagctgacagaaatgctacccagcatcttaaaccagcttggtgcggatagtctgactagtttaaggagactggccgaagctctgcccaaacaatctgtggatggaaaagcaccacttgctactggagaggatgatgatgatgaagttccagatcttgtggagaattttgatgaggcttccaagaatgaggcaaactga

SEQ ID NO: 839 - DNA, 489 bp, Homo sapiens
atgaaagaaacaatcatgaaccaggaaaaactcgccaaactgcaggcacaagtgcgcattggtgggaaaggaactgctcgcagaaagaagaaggtggttcatagaacagccacagcagatgacaaaaaacttcagttctccttaaagaagttaggggtaaacaatatctctggtattgaagaggtgaatatgtttacaaaccaaggaacagtgatccactttaacaaccctaaagttcaggcatctctggcagcgaacactttcaccattacaggccatgctgagacaaagcagctgacagaaatgctacccagcatcttaaaccagcttggtgcggatagtctgactagtttaaggagactggccgaagctctgcccaaacaatctgtggatggaaaagcaccacttgctactggagaggatgatgatgatgaagttccagatcttgtggagaattttgatgaggcttccaagaatgaggcaaactga

SEQ ID NO: 840 - DNA, 522 bp, Homo sapiens
atggagttgagctgcagcgaagcacctctttacatgaaagaaacaatcatgaaccaggaaaaactcgccaaactgcaggcacaagtgcgcattggtgggaaaggaactgctcgcagaaagaagaaggtggttcatagaacagccacagcagatgacaaaaaacttcagttctccttaaagaagttaggggtaaacaatatctctggtattgaagaggtgaatatgtttacaaaccaaggaacagtgatccactttaacaaccctaaagttcaggcatctctggcagcgaacactttcaccattacaggccatgctgagacaaagcagctgacagaaatgctacccagcatcttaaaccagcttggtgcggatagtctgactagtttaaggagactggccgaagctctgcccaaacaatctgtggatggaaaagcaccacttgctactggagaggatgatgatgatgaagttccagatcttgtggagaattttgatgaggcttccaagaatgaggcaaactga

SEQ ID NO: 841 - DNA, 396 bp, Homo sapiens; identical to SEQ ID NO: 533

SEQ ID NO: 842 - DNA, 546 bp, Homo sapiens; identical to SEQ ID NO: 532

SEQ ID NO: 843 - DNA, 1302 bp, Homo sapiens
atgcctgtggccggctcggagctgccgcgccggcccttgccccccgccgcacaggagcgggacgccgagccgcgtccgccgcacggggagctgcagtacctggggcagatccaacacatcctccgctgcggcgtcaggaaggacgaccgcacgggcaccggcaccctgtcggtattcggcatgcaggcgcgctacagcctgagagatgaattccctctgctgacaaccaaacgtgtgttctggaagggtgttttggaggagttgctgtggtttatcaagggatccacaaatgctaaagagctgtcttccaagggagtgaaaatctgggatgccaatggatcccgagactttttggacagcctgggattctccaccagagaagaaggggacttgggcccagtttatggcttccagtggaggcattttggggcagaatacagagatatggaatcagggcagagcggcttgggtaaatccaccttaatcaacaccctcttcaaatccaaaatcagccggaagtcggtgcagcccacctcagaggagcgcatccccaagaccatcgagatcaagtccatcacgcacgatattgaggagaaaggcgtccggatgaagctgacagtgattgacacaccagggttcggggaccacatcaacaacgagaactgctggcagcccatcatgaagttcatcaatgaccagtacgagaaatacctgcaggaggaggtcaacatcaaccgcaagaagcgcatcccggacacccgcgtccactgctgcctctacttcatccccgccaccggccactccctcaggcccctggacatcgagtttatgaaacgcctgagcaaggtggtcaacatcgtccctgtcatcgccaaggcggacacactcaccctggaggagagggtccacttcaaacagcggatcaccgcagacctgctgtccaacggcatcgacgtgtacccccagaaggaatttgatgaggactcggaggaccggctggtgaacgagaagttccgggagatgatcccatttgctgtggtgggcagtgaccacgagtaccaggtcaacggcaagaggatccttgggaggaagaccaagtggggtaccatcgaagttgaaaacaccacacactgtgagtttgcctacctgcgggaccttctcatcaggacgcacatgcagaacatcaaggacatcaccagcagcatccacttcgaggcgtaccgtgtgaagcgcctcaacgagggcagcagcgccatggccaacggcatggaggagaaggagccagaagccccggagatgtag

SEQ ID NO: 844 - DNA, 405 bp, Homo sapiens
atgcggcagaaggcggtatcgcttttcttgtgctacctgctgctcttcacttgcagtggggtggaggcaggtgagaatgcgggtaagaaaaagtgctcggagagctcggacagcggctccgggttctggaaggccctgaccttcatggccgtcggaggaggactcgcagtcgccgggctgcccgcgctgggcttcaccggcgccggcatcgcggccaactcggtggctgcctcgctgatgagctggtctgcgatcctgaatgggggcggcgtgcccgccggggggctagtggccacgctgcagagcctcggggctggtggcagcagcgtcgtcataggtaatattggtgccctgatgggctacgccacccacaagtatctcgatagtgaggaggatgaggagtag

SEQ ID NO: 845-1000 - skipped (156 entries)

SEQ ID NO: 1001 - DNA, 1356 bp, Homo sapiens
cccggagcggcgcgggcggcctggagccccgggagcggcgcgcgcggtcccggcccagcggctctcctggcctcgcgctgcacattctctcctggcggcggcgccacctgcagtagcgttcgcccgaacatggcgacacggagcagcaggagggagtcgcgactcccgttcctattcaccctggtcgcactgctgccgcccggagctctctgcgaagtctggacgcagaggctgcacggcggcagcgcgcccttgccccaggaccggggcttcctcgtggtgcagggcgacccgcgcgagctgcggctgtgggcgcgcggggatgccaggggggcgagccgcgcggacgagaagccgctccggaggaaacggagcgctgccctgcagcccgagcccatcaaggtgtacggacaggttagtctgaatgattcccacaatcagatggtggtgcactgggctggagagaaaagcaacgtgatcgtggccttggcccgagatagcctggcattggcgaggcccaagagcagtgatgtgtacgtgtcttacgactatggaaaatcattcaagaaaatttcagacaagttaaactttggcttgggaaataggagtgaagctgttatcgcccagttctaccacagccctgcggacaacaagcggtacatctttgcagacgcttatgcccagtacctctggatcacgtttgacttctgcaacactcttcaaggcttttccatcccatttcgggcagctgatctcctcctacacagtaaggcctccaaccttctcttgggctttgacaggtcccaccccaacaagcagctgtggaagtcagatgactttggccagacctggatcatgattcaggaacatgtcaagtccttttcttggtgtcagaacctcaaagataacaccattggcatcgaggagaatgcagtctccctgacctgtcgctttcacgtcaccgtctttaaattcataggggattacgacgaagttcaccttcactgtgcagtgtcactctgcgactcagaaaagtactcctgtaaaatcacttgcccacacaattccaggattgccacagattacacaaaagagcccaaagaacagatcatttcagtgggacctattaggagaaaaaggctggactggtgtgaggacaatggagggtgtgagcagatttgcacgagccgggtggatgggcctctctgcagctgtgtaacaggaaccctgcaggaggacggcaagagctgcagagcctctaattcttcaatggaacttcaagtctggacgcttcttctcatcatgatccagatttcattatggcattttgtctataaatcaggcacgacctcataa

SEQ ID NO: 1002 - DNA, 2283 bp, Homo sapiens
cccggagcggcgcgggcggcctggagccccgggagcggcgcgcgcggtcccggcccagcggctctcctggcctcgcgctgcacattctctcctggcggcggcgccacctgcagtagcgttcgcccgaacatggcgacacggagcagcaggagggagtcgcgactcccgttcctattcaccctggtcgcactgctgccgcccggagctctctgcgaagtctggacgcagaggctgcacggcggcagcgcgcccttgccccaggaccggggcttcctcgtggtgcagggcgacccgcgcgagctgcggctgtgggcgcgcggggatgccaggggggcgagccgcgcggacgagaagccgctccggaggaaacggagcgctgccctgcagcccgagcccatcaaggtgtacggacaggttagtctgaatgattcccacaatcagatggtggtgcactgggctggagagaaaagcaacgtgatcgtggccttggcccgagatagcctggcattggcgaggcccaagagcagtgatgtgtacgtgtcttacgactatggaaaatcattcaagaaaatttcagacaagttaaactttggcttgggaaataggagtgaagctgttatcgcccagttctaccacagccctgcggacaacaagcggtacatctttgcagacgcttatgcccagtacctctggatcacgtttgacttctgcaacactcttcaaggcttttccatcccatttcgggcagctgatctcctcctacacagtaaggcctccaaccttctcttgggctttgacaggtcccaccccaacaagcagctgtggaagtcagatgactttggccagacctggatcatgattcaggaacatgtcaagtccttttcttggggaattgatccctatgacaaaccaaataccatctacattgaacgacatgaaccctctggctactccactgtcttccgaagtacagatttcttccagtcccgggaaaaccaggaagtgatccttgaggaagtgagagattttcagcttcgggacaagtacatgtttgctacaaaggtggtgcatctcttgggcagtgaacagcagtcttctgtccagctctgggtctcctttggccggaagcccatgagagcagcccagtttgtcacaagacatcctattaatgaatattacatcgcagatgcctccgaggaccaggtgtttgtgtgtgtcagccacagtaacaaccgcaccaatttatacatctcagaggcagaggggctgaagttctccctgtccttggagaacgtgctctattacagcccaggaggggccggcagtgacaccttggtgaggtattttgcaaatgaaccatttgctgacttccaccgagtggaaggattgcaaggagtctacattgctactctgattaatggttctatgaatgaggagaacatgagatcggtcatcacctttgacaaagggggaacctgggagtttcttcaggctccagccttcacgggatatggagagaaaatcaattgtgagctttcccagggctgttcccttcatctggctcagcgcctcagtcagctcctcaacctccagctccggagaatgcccatcctgtccaaggagtcggctccaggcctcatcatcgccactggctcagtgggaaagaacttggctagcaagacaaacgtgtacatctctagcagtgctggagccaggtggcgagaggcacttcctggacctcactactacacatggggagaccacggcggaatcatcacggctattgcccagggcatggaaaccaacgagctaaagtgtcagaacctcaaagataacaccattggcatcgaggagaatgcagtctccctgacctgtcgctttcacgtcaccgtctttaaattcataggggattacgacgaagttcaccttcactgtgcagtgtcactctgcgactcagaaaagtactcctgtaaaatcacttgcccacacaattccaggattgccacagattacacaaaagagcccaaagaacagatcatttcagtgggacctattaggagaaaaaggctggactggtgtgaggacaatggagggtgtgagcagatttgcacgagccgggtggatgggcctctctgcagctgtgtaacaggaaccctgcaggaggacggcaagagctgcagagcctctaattcttcaatggaacttcaagtctggacgcttcttctcatcatgatccagatttcattatggcattttgtctataaatcaggcacgacctcataa

SEQ ID NO: 1003 - DNA, 6927 bp, Homo sapiens
cccggagcggcgcgggcggcctggagccccgggagcggcgcgcgcggtcccggcccagcggctctcctggcctcgcgctgcacattctctcctggcggcggcgccacctgcagtagcgttcgcccgaacatggcgacacggagcagcaggagggagtcgcgactcccgttcctattcaccctggtcgcactgctgccgcccggagctctctgcgaagtctggacgcagaggctgcacggcggcagcgcgcccttgccccaggaccggggcttcctcgtggtgcagggcgacccgcgcgagctgcggctgtgggcgcgcggggatgccaggggggcgagccgcgcggacgagaagccgctccggaggaaacggagcgctgccctgcagcccgagcccatcaaggtgtacggacaggttagtctgaatgattcccacaatcagatggtggtgcactgggctggagagaaaagcaacgtgatcgtggccttggcccgagatagcctggcattggcgaggcccaagagcagtgatgtgtacgtgtcttacgactatggaaaatcattcaagaaaatttcagacaagttaaactttggcttgggaaataggagtgaagctgttatcgcccagttctaccacagccctgcggacaacaagcgggtcaataacaacggagttgtttccttcaatgtgctagtgagccagttcacgccagaatcctttcccctgacagatgggagagccttcgtcgccccattttgggcagatgtgcacaatggaattcgaggcgagatctattacagagagaccatggagcctgccatcttgaaaagagccaccaaggacatcaggaagtacttcaaagacatggcaaccttctctgccacttgggttttcattgtgacatgggaggaagtcacgttttatggaggcagcagcaccacacctgtgaacaccttccaggccgtcctagtgtccgatggctcctatacattcaccctcttcaattattacgaaatcaactggaccacggggacggcgagtggcggcgaccccctgacaggtcttggtggagtgatggcacaggcaggatttaatggtggaaacctcaccaatttcttcagcctcccggggtcaagaacccccgagatcgtgaatatccaggagaccacaaacgtcaatgttccaggccgctgggcatttaaagttgatggaaaggaaattgacccagccaatggctgcacctcaaggggacaattccttcggcgaggggaggtgttttgggatgacttgaactgcaccgtcaagtgccgctgtctggatttcaacaatgagatctactgccaggaggcttcctgtagcccctacgaggtgtgcgaacccaaaggcaaattcttctactgcagcgctgtggagaccagcacatgcgtggtgtttggggagccacactaccacacttttgacggcttcctcttccacttccaaggctcctgtgcctacttgctggcccgacagtgtttgcagacttccagcctccctttcttcagtgtggaggccaagaatgaacaccgcagaggttcagccgtctcctgggtgaaggagctctcagtggaggtgaatggctacaagattctcatccccaaaggaagctatggaagagtcaaggttaatgacctagtgacttctttgcctgtcaccttagacttggggacagtgaaaatctaccagagtggcatatctactgccgtggaaacagattttgggctcttagtgacttttgatggccagcactacgcctccatttccgtcccaggctcctatataaactccacctgtggactctgtggaaactataataaaaacccactggatgacttcctccgcccggatggcaggccggccatgtctgtcctggatctgggagagagctggcgtgtgtaccacgcagactggaagtgcgactccggctgcgtcgacaactgcacccagtgcgacgctgccactgaagccctctactttggctctgactactgcggcttcctcaacaagacagacggccctctgtgggagtgtggcactgtcgtggaccccactgcttttgtgcacagctgcgtgtatgacctgtgcagtgtgagggacaatggcacgctcctctgccaagccatccaggcctatgctcttgtgtgccaagcccttggcattccaattggagactggcgaacccagactgggtgtgtgtccacagtgcagtgcccgagcttcagccactactccgtgtgcacaagcagctgccccgacacatgctccgacctgacggcctcgcggaactgcgccacgccgtgcacagagggctgcgagtgcaaccagggcttcgtcctcagcaccagccagtgcgtccctctgcacaagtgcggctgcgacttcgacggccactactacaccatgggggagttcttctgggccacggccaactgcactgtgcaatgcctgtgcgaggagggcggggacgtctactgcttcaacaagacctgcggcagcggggaggtgtgcgccgtggaggacggctaccagggctgcttccccaagcgggagaccgtgtgcctgctcagccagaaccaggtgctgcacacctttgacggcgcctcctacgccttcccctccgagttctcctacaccctcctgaagacctgccctgagcgcccagagtacttggaaatcgacatcaacaagaagaagcccgatgcaggacctgcttggctgcggggacttcggatcctggtggccgaccaggaggtcaagataggaggcatcggggcttcggaagtcaagttgaatggtcaggaagtggaattgccttttttccatccttcggggaagctggaaatttatcgaaacaaaaacagtacgacagtggagtccaagggcgtggtgactgtccagtactcagacataggtctattgtacatccggctgtccaccacatacttcaattgcacagggggcttgtgcggcttctacaatgccaacgccagtgacgagttctgtctccccaacggcaagtgcacggacaacctggcagtgttcctggaaagctggacaactttcgaggagatctgcaatggagagtgtggggacctgctgaaggcctgcaacaatgactcggagctgctcaagttttatcgaagccgctccaggtgcggcatcatcaacgacccctccaacagctccttcctggagtgccatggggtggtgaacgtcactgcctattaccgcacctgccttttccgcctgtgccagagtgggggcaatgagtcagagctctgtgactctgtggcccggtatgcaagcgcctgcaagaatgcggacgtggaggtggggccctggcggacctatgacttctgcccactggagtgcccagagaacagccactttgaggagtgcatcacatgtacagagacctgtgagacccttaccctgggccccatctgcgtggatagctgctctgagggatgtcagtgtgatgagggctatgctctactgggcagccagtgtgtcacgcggagtgagtgtggctgcaactttgaggggcaccaacttgccaccaatgagaccttctgggtggacctggactgccagatcttctgctattgcagtggcacagacaacagggtccactgcgagaccattccctgcaaggatgatgagtactgcatggaggaaggtggcctgtactactgccaagcccgcaccgacgcctcctgcatcgtctcaggctacggccactacctcacctttgatggcttcccctttgacttccagaccagctgcccactcatcctgtgcaccacaggaagcaggccaagctcagactctttccccaagtttgttgtcacagccaagaatgaggaccgggacccgtcactggccttgtgggttaagcaggtggacgtgaccgtgtttggctacagcatcgtgatccaccgagcttacaagcacactgtgctggtcaacagtgaacggctctatctgcccctgaagctggggcaagggaagataaatatcttttcctttggcttccacgtggtggtggaaactgattttggcctgaaggttgtatatgactggaagaccttcctgtccatcacagtccctcggagcatgcagaacagcacctatggtctgtgtggccgctacaacggcaaccctgatgatgacctggagatgcccatgggtctgcttgcatcgagtgtcaatgagtttgggcagagctgggtgaagagggacaccttctgccaggtgggctgtggggaccgctgtccgtcctgtgccaaggtggaaggtttctccaaagtgcagcagctgtgcagcctgatccccaaccagaacgctgccttctccaagtgtcacagcaaagttaaccccaccttcttctataagaactgcctgtttgactcttgcatcgatgggggcgcggtgcagaccgcctgcagctggctgcagaactacgccagcacctgccagactcaggggattacggtgactggctggaggaattacacgtcctgcactgtcacctgccctccaaacagccattacgagagctgcgtgagtgtctgccagccccgctgcgccgccatccgcctgaagagtgactgcagccactactgcgtggagggctgtcactgcgacgctggctacgtcctcaacggcaagagctgcatcctgccccacagctgcggctgctactccgatggcaaatattacgagcccaagcagctattttggaacagcgactgcacgcggcgctgccgctgtttccgtcgcaacgtgattcagtgcgacccgcgccaatgcaagtcagacgaggagtgtgcgctgcgcaacggggtgcgcggctgcttcagcaccaagacctcctactgcctggcggccggcggcggcgtcttccgcaccttcgacggcgccttcctgcgcttcccagccaactgcgccttcgtgctgtccaccatctgccagaaactgcccgacatctccttccagcttatcatcaacttcgacaagtggtcggcccccaacctcaccatcatttcgcccgtctacttctacattaacgaagagcagattctcatcaacgaccggaacacggtcaaggtgaatggcacacaagtgaatgttccatttataactggtttggcaaccaaaatctacagcagtgaggggtttctggtgattgacaccagcccagacatccagatatactacaatggtttcaacgtcattaaaatcagcatcagcgagaggctgcagaacaaagtgtgcggtctctgtggcaacttcaacggggacctaacagatgattatgtgaccttgcgagggaagccggtggtaagcagcgtggtgctggcccagagctggaaaaccaatggcatgcagaagagacctcttgcccccagctgcaacgagctgcagttctcacagtatgcagccatgtgtgacaatgtgcacatccagaagatgcagggtgatggctactgcctgaagctcaccgacatgaagggcttcttccagccctgctatgggcttctcgatcccctcccattctacgagtcctgctacctggacggctgctacagccacaagaagttccagctgtgcggctccctggccgcctacggggaggcctgccgctccttcgggatccttagcaccgagtggattgagaaggagaattgctcaggagtggttgaagatccctgtgtgggggcggactgtcccaaccgaacttgcgagctgggcaatggcagggagctgtgtggctgcatcgagccacccccctatggaaataactcacatgacattatcgatgcagaggtgacctgcaaagcagcccaaatggaagtgtccatatctaagtgcaagctcttccagctcggttttgagagggagggcgtgaggatcaatgacagacagtgcaccggcatcgagggggaagattttatctcctttcagatcaacaacaccaaagggaattgtggaaacattgtgcagtccaatggcacgcatatcatgtataaaaacacactctggatcgaaagcgccaacaacactggcaacatcatcaccagggaccgcacgatcaatgtggaattttcatgtgcttatgagctggatatcaagatctccttggattctgttgtgaagcctatgctaagtgtaattaacctgacagttccaacccaagaaggcagcttcatcaccaagatggctctctacaaaaacgcctcctacaaacatccttaccgccagggtgaagtagtgttgacgactcgagatgtgctgtatgtaggggtttttgtggttggagctgacgccacacatttaatcctaacactcaacaaatgctatgccacacccacccgagatagcaatgataagctccgatatttcatcattgaaggagggtgtcagaacctcaaagataacaccattggcatcgaggagaatgcagtctccctgacctgtcgctttcacgtcaccgtctttaaattcataggggattacgacgaagttcaccttcactgtgcagtgtcactctgcgactcagaaaagtactcctgtaaaatcacttgcccacacaattccaggattgccacagattacacaaaagagcccaaagaacagatcatttcagtgggacctattaggagaaaaaggctggactggtgtgaggacaatggagggtgtgagcagatttgcacgagccgggtggatgggcctctctgcagctgtgtaacaggaaccctgcaggaggacggcaagagctgcagagcctctaattcttcaatggaacttcaagtctggacgcttcttctcatcatgatccagatttcattatggcattttgtctataaatcaggcacgacctcataa

SEQ ID NO: 1004 - DNA, 6639 bp, Homo sapiens
cccggagcggcgcgggcggcctggagccccgggagcggcgcgcgcggtcccggcccagcggctctcctggcctcgcgctgcacattctctcctggcggcggcgccacctgcagtagcgttcgcccgaacatggcgacacggagcagcaggagggagtcgcgactcccgttcctattcaccctggtcgcactgctgccgcccggagctctctgcgaagtctggacgcagaggctgcacggcggcagcgcgcccttgccccaggaccggggcttcctcgtggtgcagggcgacccgcgcgagctgcggctgtgggcgcgcggggatgccaggggggcgagccgcgcggacgagaagccgctccggaggaaacggagcgctgccctgcagcccgagcccatcaaggtgtacggacaggttagtctgaatgattcccacaatcagatggtggtgcactgggctggagagaaaagcaacgtgatcgtggccttggcccgagatagcctggcattggcgaggcccaagagcagtgatgtgtacgtgtcttacgactatggaaaatcattcaagaaaatttcagacaagttaaactttggcttgggaaataggagtgaagctgttatcgcccagttctaccacagccctgcggacaacaagcgggtgaacaccttccaggccgtcctagtgtccgatggctcctatacattcaccctcttcaattattacgaaatcaactggaccacggggacggcgagtggcggcgaccccctgacaggtcttggtggagtgatggcacaggcaggatttaatggtggaaacctcaccaatttcttcagcctcccggggtcaagaacccccgagatcgtgaatatccaggagaccacaaacgtcaatgttccaggccgctgggcatttaaagttgatggaaaggaaattgacccagccaatggctgcacctcaaggggacaattccttcggcgaggggaggtgttttgggatgacttgaactgcaccgtcaagtgccgctgtctggatttcaacaatgagatctactgccaggaggcttcctgtagcccctacgaggtgtgcgaacccaaaggcaaattcttctactgcagcgctgtggagaccagcacatgcgtggtgtttggggagccacactaccacacttttgacggcttcctcttccacttccaaggctcctgtgcctacttgctggcccgacagtgtttgcagacttccagcctccctttcttcagtgtggaggccaagaatgaacaccgcagaggttcagccgtctcctgggtgaaggagctctcagtggaggtgaatggctacaagattctcatccccaaaggaagctatggaagagtcaaggttaatgacctagtgacttctttgcctgtcaccttagacttggggacagtgaaaatctaccagagtggcatatctactgccgtggaaacagattttgggctcttagtgacttttgatggccagcactacgcctccatttccgtcccaggctcctatataaactccacctgtggactctgtggaaactataataaaaacccactggatgacttcctccgcccggatggcaggccggccatgtctgtcctggatctgggagagagctggcgtgtgtaccacgcagactggaagtgcgactccggctgcgtcgacaactgcacccagtgcgacgctgccactgaagccctctactttggctctgactactgcggcttcctcaacaagacagacggccctctgtgggagtgtggcactgtcgtggaccccactgcttttgtgcacagctgcgtgtatgacctgtgcagtgtgagggacaatggcacgctcctctgccaagccatccaggcctatgctcttgtgtgccaagcccttggcattccaattggagactggcgaacccagactgggtgtgtgtccacagtgcagtgcccgagcttcagccactactccgtgtgcacaagcagctgccccgacacatgctccgacctgacggcctcgcggaactgcgccacgccgtgcacagagggctgcgagtgcaaccagggcttcgtcctcagcaccagccagtgcgtccctctgcacaagtgcggctgcgacttcgacggccactactacaccatgggggagttcttctgggccacggccaactgcactgtgcaatgcctgtgcgaggagggcggggacgtctactgcttcaacaagacctgcggcagcggggaggtgtgcgccgtggaggacggctaccagggctgcttccccaagcgggagaccgtgtgcctgctcagccagaaccaggtgctgcacacctttgacggcgcctcctacgccttcccctccgagttctcctacaccctcctgaagacctgccctgagcgcccagagtacttggaaatcgacatcaacaagaagaagcccgatgcaggacctgcttggctgcggggacttcggatcctggtggccgaccaggaggtcaagataggaggcatcggggcttcggaagtcaagttgaatggtcaggaagtggaattgccttttttccatccttcggggaagctggaaatttatcgaaacaaaaacagtacgacagtggagtccaagggcgtggtgactgtccagtactcagacataggtctattgtacatccggctgtccaccacatacttcaattgcacagggggcttgtgcggcttctacaatgccaacgccagtgacgagttctgtctccccaacggcaagtgcacggacaacctggcagtgttcctggaaagctggacaactttcgaggagatctgcaatggagagtgtggggacctgctgaaggcctgcaacaatgactcggagctgctcaagttttatcgaagccgctccaggtgcggcatcatcaacgacccctccaacagctccttcctggagtgccatggggtggtgaacgtcactgcctattaccgcacctgccttttccgcctgtgccagagtgggggcaatgagtcagagctctgtgactctgtggcccggtatgcaagcgcctgcaagaatgcggacgtggaggtggggccctggcggacctatgacttctgcccactggagtgcccagagaacagccactttgaggagtgcatcacatgtacagagacctgtgagacccttaccctgggccccatctgcgtggatagctgctctgagggatgtcagtgtgatgagggctatgctctactgggcagccagtgtgtcacgcggagtgagtgtggctgcaactttgaggggcaccaacttgccaccaatgagaccttctgggtggacctggactgccagatcttctgctattgcagtggcacagacaacagggtccactgcgagaccattccctgcaaggatgatgagtactgcatggaggaaggtggcctgtactactgccaagcccgcaccgacgcctcctgcatcgtctcaggctacggccactacctcacctttgatggcttcccctttgacttccagaccagctgcccactcatcctgtgcaccacaggaagcaggccaagctcagactctttccccaagtttgttgtcacagccaagaatgaggaccgggacccgtcactggccttgtgggttaagcaggtggacgtgaccgtgtttggctacagcatcgtgatccaccgagcttacaagcacactgtgctggtcaacagtgaacggctctatctgcccctgaagctggggcaagggaagataaatatcttttcctttggcttccacgtggtggtggaaactgattttggcctgaaggttgtatatgactggaagaccttcctgtccatcacagtccctcggagcatgcagaacagcacctatggtctgtgtggccgctacaacggcaaccctgatgatgacctggagatgcccatgggtctgcttgcatcgagtgtcaatgagtttgggcagagctgggtgaagagggacaccttctgccaggtgggctgtggggaccgctgtccgtcctgtgccaaggtggaaggtttctccaaagtgcagcagctgtgcagcctgatccccaaccagaacgctgccttctccaagtgtcacagcaaagttaaccccaccttcttctataagaactgcctgtttgactcttgcatcgatgggggcgcggtgcagaccgcctgcagctggctgcagaactacgccagcacctgccagactcaggggattacggtgactggctggaggaattacacgtcctgcactgtcacctgccctccaaacagccattacgagagctgcgtgagtgtctgccagccccgctgcgccgccatccgcctgaagagtgactgcagccactactgcgtggagggctgtcactgcgacgctggctacgtcctcaacggcaagagctgcatcctgccccacagctgcggctgctactccgatggcaaatattacgagcccaagcagctattttggaacagcgactgcacgcggcgctgccgctgtttccgtcgcaacgtgattcagtgcgacccgcgccaatgcaagtcagacgaggagtgtgcgctgcgcaacggggtgcgcggctgcttcagcaccaagacctcctactgcctggcggccggcggcggcgtcttccgcaccttcgacggcgccttcctgcgcttcccagccaactgcgccttcgtgctgtccaccatctgccagaaactgcccgacatctccttccagcttatcatcaacttcgacaagtggtcggcccccaacctcaccatcatttcgcccgtctacttctacattaacgaagagcagattctcatcaacgaccggaacacggtcaaggtgaatggcacacaagtgaatgttccatttataactggtttggcaaccaaaatctacagcagtgaggggtttctggtgattgacaccagcccagacatccagatatactacaatggtttcaacgtcattaaaatcagcatcagcgagaggctgcagaacaaagtgtgcggtctctgtggcaacttcaacggggacctaacagatgattatgtgaccttgcgagggaagccggtggtaagcagcgtggtgctggcccagagctggaaaaccaatggcatgcagaagagacctcttgcccccagctgcaacgagctgcagttctcacagtatgcagccatgtgtgacaatgtgcacatccagaagatgcagggtgatggctactgcctgaagctcaccgacatgaagggcttcttccagccctgctatgggcttctcgatcccctcccattctacgagtcctgctacctggacggctgctacagccacaagaagttccagctgtgcggctccctggccgcctacggggaggcctgccgctccttcgggatccttagcaccgagtggattgagaaggagaattgctcaggagtggttgaagatccctgtgtgggggcggactgtcccaaccgaacttgcgagctgggcaatggcagggagctgtgtggctgcatcgagccacccccctatggaaataactcacatgacattatcgatgcagaggtgacctgcaaagcagcccaaatggaagtgtccatatctaagtgcaagctcttccagctcggttttgagagggagggcgtgaggatcaatgacagacagtgcaccggcatcgagggggaagattttatctcctttcagatcaacaacaccaaagggaattgtggaaacattgtgcagtccaatggcacgcatatcatgtataaaaacacactctggatcgaaagcgccaacaacactggcaacatcatcaccagggaccgcacgatcaatgtggaattttcatgtgcttatgagctggatatcaagatctccttggattctgttgtgaagcctatgctaagtgtaattaacctgacagttccaacccaagaaggcagcttcatcaccaagatggctctctacaaaaacgcctcctacaaacatccttaccgccagggtgaagtagtgttgacgactcgagatgtgctgtatgtaggggtttttgtggttggagctgacgccacacatttaatcctaacactcaacaaatgctatgccacacccacccgagatagcaatgataagctccgatatttcatcattgaaggagggtgtcagaacctcaaagataacaccattggcatcgaggagaatgcagtctccctgacctgtcgctttcacgtcaccgtctttaaattcataggggattacgacgaagttcaccttcactgtgcagtgtcactctgcgactcagaaaagtactcctgtaaaatcacttgcccacacaattccaggattgccacagattacacaaaagagcccaaagaacagatcatttcagtgggacctattaggagaaaaaggctggactggtgtgaggacaatggagggtgtgagcagatttgcacgagccgggtggatgggcctctctgcagctgtgtaacaggaaccctgcaggaggacggcaagagctgcagagcctctaattcttcaatggaacttcaagtctggacgcttcttctcatcatgatccagatttcattatggcattttgtctataaatcaggcacgacctcataa

SEQ ID NO: 1005 - DNA, 1809 bp, Homo sapiens
cccggagcggcgcgggcggcctggagccccgggagcggcgcgcgcggtcccggcccagcggctctcctggcctcgcgctgcacattctctcctggcggcggcgccacctgcagtagcgttcgcccgaacatggcgacacggagcagcaggagggagtcgcgactcccgttcctattcaccctggtcgcactgctgccgcccggagctctctgcgaagtctggacgcagaggctgcacggcggcagcgcgcccttgccccaggaccggggcttcctcgtggtgcagggcgacccgcgcgagctgcggctgtgggcgcgcggggatgccaggggggcgagccgcgcggacgagaagccgctccggaggaaacggagcgctgccctgcagcccgagcccatcaaggtgtacggacaggttagtctgaatgattcccacaatcagatggtggtgcactgggctggagagaaaagcaacgtgatcgtggccttggcccgagatagcctggcattggcgaggcccaagagcagtgatgtgtacgtgtcttacgactatggaaaatcattcaagaaaatttcagacaagttaaactttggcttgggaaataggagtgaagctgttatcgcccagttctaccacagccctgcggacaacaagcggtacatctttgcagacgcttatgcccagtacctctggatcacgtttgacttctgcaacactcttcaaggcttttccatcccatttcgggcagctgatctcctcctacacagtaaggcctccaaccttctcttgggctttgacaggtcccaccccaacaagcagctgtggaagtcagatgactttggccagacctggatcatgattcaggaacatgtcaagtccttttcttggggaattgatccctatgacaaaccaaataccatctacattgaacgacatgaaccctctggctactccactgtcttccgaagtacagatttcttccagtcccgggaaaaccaggaagtgatccttgaggaagtgagagattttcagcttcgggacaagtacatgtttgctacaaaggtggtgcatctcttgggcagtgaacagcagtcttctgtccagctctgggtctcctttggccggaagcccatgagagcagcccagtttgtcacaagacatcctattaatgaatattacatcgcagatgcctccgaggaccaggtgtttgtgtgtgtcagccacagtaacaaccgcaccaatttatacatctcagaggcagaggggctgaagttctccctgtccttggagaacgtgctctattacagcccaggaggggccggcagtgacaccttggtgaggtgtcagaacctcaaagataacaccattggcatcgaggagaatgcagtctccctgacctgtcgctttcacgtcaccgtctttaaattcataggggattacgacgaagttcaccttcactgtgcagtgtcactctgcgactcagaaaagtactcctgtaaaatcacttgcccacacaattccaggattgccacagattacacaaaagagcccaaagaacagatcatttcagtgggacctattaggagaaaaaggctggactggtgtgaggacaatggagggtgtgagcagatttgcacgagccgggtggatgggcctctctgcagctgtgtaacaggaaccctgcaggaggacggcaagagctgcagagcctctaattcttcaatggaacttcaagtctggacgcttcttctcatcatgatccagatttcattatggcattttgtctataaatcaggcacgacctcataa

SEQ ID NO: 1006 - DNA, 7382 bp, Homo sapiens
ggccgggtagggggttcgcctgcggccgcgtctgctcggggcctgaggcctcgaagaccccagcccaagcccccaggttgatgccggcccaggatggatcagacctgtgaactacccagaagaaattgtctgctgcccttttccaatccagtgaatttagatgcccctgaagacaaggacagccctttcggatgatccagattccagtaccagtacattaggaaacatgctagaattacctggaacttcatcatcatctacttcacaggaattgccattttgtcaacctaagaaaaagtctacgccactgaagtatgaagttggagatctcatctgggcaaaattcaagagacgcccatggtggccctgcaggatttgttctgatccgttgattaacacacattcaaaaatgaaagtttccaaccggaggccctatcggcagtactacgtggaggcttttggagatccttctgagagagcctgggtggctggaaaagcaatcgtcatgtttgaaggcagacatcaattcgaagagctacctgtccttaggagaagagggaaacagaaagaaaaaggatataggcataaggttcctcagaaaattttgagtaaatgggaagccagtgttggacttgcagaacagtatgatgttcccaaggggtcaaagaaccgaaaatgtattcctggttcaatcaagttggacagtgaagaagatatgccatttgaagactgcacaaatgatcctgagtcagaacatgacctgttgcttaatggctgtttgaaatcactggcttttgattctgaacattctgcagatgagaaggaaaagccttgcgctaaatctcgagccagaaagagctctgataatccaaaaaggactagtgtgaaaaagggccacatacaatttgaagcacataaagatgaacggaggggaaagattccagagaaccttggcctaaactttatctctggggatatatctgatacgcaggcctctaatgaactttccaggatagcaaatagcctcacagggtccaacactgccccaggaagttttctgttttcttcctgtggaaaaaacactgcaaagaaagaatttgagacttcaaatggtgactctttattgggcttgcctgagggtgctttgatctcaaagtgttctcgagagaagaataaaccccaacgaagcctggtgtgtggttcaaaagtgaagctctgctatattggagcaggtgatgaggaaaagcgaagtgattccattagtatctgtaccacttctgatgatggaagcagtgacctggatcccatagaacacagctcagagtctgataacagtgtccttgaaattccagatgctttcgatagaacagagaacatgttatctatgcagaaaaatgaaaagataaagtattctaggtttgctgccacaaacactagggtaaaagcaaaacagaagcctctcattagtaactcacatacagaccacttaatgggttgtactaagagtgcagagcctggaaccgagacgtctcaggttaatctctctgatctgaaggcatctactcttgttcacaaaccccagtcagattttacaaatgatgctctctctccaaaattcaacctgtcatcaagcatatccagtgagaactcgttaataaagggtggggcagcaaatcaagctctattacattcgaaaagcaaacagcccaagttccgaagtataaagtgcaaacacaaagaaaatccagttatggcagaacccccagttataaatgaggagtgcagtttgaaatgctgctcttctgataccaaaggctctcctttggccagcatttctaaaagtgggaaagtggatggtctaaaactactgaacaatatgcatgagaaaaccagggattcaagtgacatagaaacagcagtggtgaaacatgttttatccgagttgaaggaactctcttacagatccttaggtgaggatgtcagtgactctggaacatcaaagccatcaaaaccattacttttctcttctgcttctagtcagaatcacatacctattgaaccagactacaaattcagtacattgctaatgatgttgaaagatatgcatgatagtaagacgaaggagcagcggttgatgactgctcaaaacctggtctcttaccggagtcctggtcgtggggactgttctactaatagtcctgtaggagtctctaaggttttggtttcaggaggctccacacacaattcagagaaaaagggagatggcactcagaactccgccaatcctagccctagtgggggtgactctgcattatctggcgagttgtctgcttccctacctggcttactgtccgacaagagagacctccctgcttctggtaaaagtcgttcagactgtgttactaggcgcaactgtggacgatcaaagccttcatccaaattgcgagatgctttttcagcccaaatggtaaagaacacagtgaaccgtaaagccttaaagaccgagcgcaaaagaaaactgaatcagcttccaagtgtgactcttgatgctgtactgcagggagaccgagaacgtggaggttcattgagaggtggggcagaagatcctagtaaagaggatccccttcagataatgggccacttaacaagtgaagatggtgaccatttttctgatgtgcatttcgatagcaaggttaagcaatctgatcctggtaaaatttctgaaaaaggactctcttttgaaaacggaaaaggcccagagctggactctgtaatgaacagtgagaatgatgaactcaatggtgtaaatcaagtggtgcctaaaaagcggtggcagcgtttaaaccaaaggcgcactaaacctcgtaagcgcatgaacagatttaaagagaaagaaaactctgagtgtgcctttagggtcttacttcctagtgaccctgtgcaggaggggcgggatgagtttccagagcatagaactccttcagcaagcatacttgaggaaccactgacagagcaaaatcatgctgactgcttagattcagctgggccacggttaaatgtttgtgataaatccagtgccagcattggtgacatggaaaaggagccaggaattcccagtttgacaccacaggctgagctccctgaaccagctgtgcggtcagagaagaaacgccttaggaagccaagcaagtggcttttggaatatacagaagaatatgatcagatatttgctcctaagaaaaaacaaaagaaggtacaggagcaggtgcacaaggtaagttcccgctgtgaagaggaaagccttctagcccgaggtcgatctagtgctcagaacaagcaggtggacgagaattctttgatttcaaccaaagaagagcctccagttcttgaaagggaggctccgtttttggagggccccttggctcagtcagaacttggaggtggacatgctgagttgccgcagctgaccttgtctgtgcctgtggctccggaagtctctccacggcctgcccttgagtctgaggaattgctagttaaaacgccaggaaattatgaaagtaaacgtcaaagaaaaccaactaagaaacttcttgaatccaatgatttagaccctggatttatgcccaagaagggggaccttggcctttctaaaaagtgctatgaagctggtcacctggagaatggcataactgaatcttgtgccacatcttattcaaaagattttggtggaggcactaccaagatatttgacaagccaaggaagcgaaaacgacagaggcatgctgcagccaagatgcagtgtaaaaaagtgaaaaatgatgactcgtcaaaagagattccaggctcagagggagaactaatgcctcacaggacggccacaagccccaaggagactgttgaggaaggtgtagaacacgatcccgggatgcctgcctctaaaaaaatgcagggtgaacgcggtggaggagctgcactcaaggagaatgtctgtcagaattgtgaaaaattgggtgagctgctgttatgtgaggctcagtgctgtggggctttccacctggagtgccttggattgactgagatgccaagaggaaaatttatctgcaatgaatgtcgcacaggaatccatacctgttttgtatgtaagcagagtggggaagatgttaaaaggtgccttctacccttgtgtggaaagttttaccatgaagagtgtgtccagaagtacccacccactgttatgcagaacaagggcttccggtgctccctccacatctgtataacctgtcatgctgctaatccagccaatgtttctgcatctaaaggtcggttgatgcgctgtgtccgctgtcctgtggcataccacgccaatgacttttgcctggctgctgggtcaaagatccttgcatctaatagtatcatctgccctaatcactttacccctaggcggggctgccgaaatcatgagcatgttaatgttagctggtgctttgtgtgctcagaaggaggcagccttctgtgctgtgattcttgccctgctgcttttcatcgtgaatgcctgaacattgatatccctgaaggaaactggtattgcaatgactgtaaagcaggcaaaaagccacactacagggagattgtctgggtaaaagttggacgatacaggtggtggccagctgagatctgccatcctcgagctgttccttccaacattgataagatgagacatgatgtgggagagttcccagtcctcttttttggatctaatgactatttgtggactcaccaggcccgagtcttcccttacatggagggtgacgtgagcagcaaggataagatgggcaaaggagtggatgggacatataaaaaagtggagcacatgatccagaagaaccaatgtctcttcaccaacacccagtgtaaggtttgctgcgccttgcttatttctgagtcccagaagctggcacattaccagagcaaaaaacatgccaacaaagtgaagagatacctagcaatccatggaatggagacattaaagggggaaacgaagaagctagactcagatcagaagagcagcagaagcaaagacaagaaccagtgctgccccatctgtaacatgaccttttcctcccctgtcgtggcccagtcgcactacctggggaagacccacgcaaagaacttaaagctgaagcagcagtccactaaggtggaagccttgcaccagaatagagagatgatagacccagacaagttctgcagcctctgccatgcaactttcaacgaccctgtcatggctcaacaacattatgtgggcaagaaacacagaaaacaggagaccaagctcaaactaatggcacgctatgggcggctggcggaccctgctgtcactgactttccagctggaaagggctacccctgcaaaacatgtaagatagtgctgaactccatagaacagtaccaagctcatgtcagcggcttcaaacacaagaaccagtcaccaaaaacagtggcatcatccctgggccagattccaatgcaaaggcaacccattcagaaagactcaaccaccttggaagactagagctaggggtggccgtgtcacagtctggccaaggaaatgaaattgggagttgctgtgtggaaactcaactctctggaacttcttccttcctcctgcctctgcacaaatgtgacggcagcagctgaagccaacatcttgcgaccatgagagaaaaacctggagaacggacgagtcctcaaccctgacttcagaccaacctacacccacctctggacgtggggctaagtgagagatggatacactgtttcatttaggccctgctcacttaggtttctgttattcacaccccaacgaaaccctccatggtccagggcaccgggcaaagtacagaagggcacgagtttacttcccgcttccctggagaccaccaaccctctcacccttccagcccagcctctgccacttcccagctgtcggtcctcctccaaacagacgtgcatgccaacacccggtgggtgtgaggcttgtaggcccaagtctagagaggctgagtctggcaaagcctgaaagcccctgtcctagcaagccaggccacaggtctagagtatccgagaccagtgaataaggggacggggggtgctactgaggctgtgagaagccccaggaccagcccagggtagttagaactgagtgaggttagccgggactaacctcactcagatccctcctccccagttcccctccatccactttggtttggaagcctccccagagctctcccaggctgtcatcagctctaaactctctgcctccacaaaaatgccctgggcaacctgtaactcacagccctgctgtcttcagagtataaactggagacagatgtacccagaattgaggacgggtgggaaatgaggagaaatgaaggctgaggaggggtcattctcacagtccctccctttcggtcacaggagggtgttgcccatgcttttgggtgggtcccaggcccatagctgcaaatattcatattggctactcttcagtgagcaaggggtatatgccaggcactggcattgtgcttgacatacatcatcatactgagtcctcacggaagatgtattattcccatttcacagaagatgaaactgaggcttgaggttaagtgatttgtccgtgaccacaaagagttttcgggactcaaacccagatctgtcactgggcaaggtggctcacacctataatcccagccctttgggagactgaggccagcagatctcctgtggccaggagttcaagcctggccaacaatggcaaaaccccgtctctaccaaaaatacaaaaattagctgggcgtggtggcacacacccgtaatcccagctactcaggtggctgaggcaggagaatcacttgaacccaggaggtggtggttgcagtgagcctagatcgtgccactgcattccagcctgagcgacagagtaagactctgtctccaaaaaaaacccagatctgtccgactctgacacccaacctttaatcactcactttctgtcaatgtcacctccgttttgaccagccaagctagacctccctggagcctgtggagaagccaaggtagaaaagggttggaaaagaatgataaaataggccaggtgcggtggctcaagcctgtactcccagcacttttggaggccgagacaggcagattgcttgagcccaggagttcaagaccagcctgggcaacataatgagaccctgtttcaacttaaaaaaaagaaatggtaatgaacaattgtcaattctgagcagctgggtatggtatgaccctgtgtactttttctgtattttaaaatgttctcaaaataaaacttgttt

SEQ ID NO: 1007 - DNA, 3454 bp, Homo sapiens
gttgatgccggcccaggatggatcagacctgtgaactacccagaagaaattgtctgctgcccttttccaatccagtgaatttagatgcccctgaagacaaggacagccctttcggatgatccagattccagtaccagtacattaggaaacatgctagaattacctggaacttcatcatcatctacttcacaggaattgccatttctggaatctcactccgttgcccaggctggaatgcagtggtaagatcttggctcactgcaacctccgcctcccaggttcaagcgattcttctgcctcaacctcccaagtagctgggattacaggcacacaccaccatgctcggctaatctttgtatttttagtagagatggggtttcaccatgtttgccaggctggtcttgaactcctgacctccagtgattctcccaccttggcctcccaaagtgctgggattacaggcatgagccaccgcacccagcctgtgacttaacctttttgagcctcagtttctttatctgcaaaatcgagataatgctgtcttgtaaggttgtgagggtgtcaacctaagaaaaagtctacgccactgaagtatgaagttggagatctcatctgggcaaaattcaagagacgcccatggtggccctgcaggatttgttctgatccgttgattaacacacattcaaaaatgaaagtggagcacatgatccagaagaaccaatgtctcttcaccaacacccagtgtaaggtttgctgcgccttgcttatttctgagtcccagaagctggcacattaccagagcagcagaagcaaagacaagaaccagtgctgccccatctgtaacatgaccttttcctcccctgtcgtggcccagtcgcactacctggggaagacccacgcaaagaacttaaagctgaagcagcagtccactaaggtggaagccttgcaccagaatagagagatgatagacccagacaagttctgcagcctctgccatgcaactttcaacgaccctgtcatggctcaacaacattatgtgggcaagaaacacagaaaacaggagaccaagctcaaactaatggcacgctatgggcggctggcggaccctgctgtcactgactttccagctggaaagggctacccctgcaaaacatgtaagatagtgctgaactccatagaacagtaccaagctcatgtcagcggcttcaaacacaagaaccagtcaccaaaaacagtggcatcatccctgggccagattccaatgcaaaggcaacccattcagaaagactcaaccaccttggaagactagaggtgattctgcccagcatcccatattgggccagccatgagccagcttcccgtgactgctcagcccttggctccctcttgctcgttgttctcaccaggaaagtacacgggcctgaggcaggattgggccacagacagcctctcattggtccgggctaattcactcctgctgctcccctttggcaggggtcctgtaggtcatgacaggggaggcaagggtattgagagactcggggtctcgcggggtggtagtttggagggtggctttccccatttcccaacccctctgggccttaggtgctgaggcccctgccacctgtctttcctctaaaggtcagttttgggccagttcttgcaactaaagagcagagatctctctgggccctagacatttccagcaaaacctggaactttcatgccaaacctggggcagggcaggaaacagaggaaatggctgcaacatgggagcttggagctaatacgacactctgccttcccccagaaggtgcaggctttcctgagtcttagaccagatatggccagttgcgcaggtttctgccaactgtgaagtatcctcctggagcagtgacacaatcttggcggagcattgctacccccgctgccccctccacagttcctgaatggtgctaaggatctgcagcagttggcaacgagctggggctgggggcggcctccatgtccactgagatcataggacactccaatggggatgggacctttcccctcctccatcagaggtgctctgaccctaggttacacgggaaagtgccccacatgcaagtctccctgagggttctgcccctaaaggcagactgcctcatgcccgctagctgtgaggttcattgctaccctcggccctactagccctctcttcccccttgtgcagcggaccacttgcccagtttgctgtggtgctagccttccccatcatccaccgggtgatttctgggtcccagggaaagaaagagagagctgatgcaggtttctacagtgaggaacaggcgtttcccaggccccacacccagatttctctatctttgctgtgttttatggcctgggactgagtccacacggatagatttttccttgtaaccttgagacgagaattccaaggagtgtcaccatcagaggcttctcttcattgtgtcaaagaagcccctagctgctctcgtggcctccttcccccactccctatcccttcacctgtgaaatgcctttgctttgcatattgtgtgtggatgtgtgtgtgtgtgtgtgtgtgtttgtgtgtatgtgtgtgcttctgtgtgtgcctaatgctctgtctcttggtcactgaagcatccaaataaagaatttccctcatgggccagactacaacttaacagacctagggttttgagccatattgccattggatctagtatgtctgtcttgacccctcacccccaccccattcagacctcagtagtccccagtagtcactttaggagttgggacagagtcgagcaccctgtgaaagtctcccttgagttcaggtgccctgaactcagtacagcctcatcttctcatccaccaccttctcctgcttctcctgtcacatagggcctcatgaaggtctttaaagggtttaagctggggatctgctttatgtttgagagaactgttctggctgttatgtaaaggagtgcagggaggggcaggaaaggagacaaggaggccagtatggacactgtgtccagtatggctttccaggctaatcacttagggcagagacccagccttattcatctctacttcctgatgtccatagtggtgtgtcatgaatttttattgaatgaacaaatgaggtgtatgaggagagatggttttctcctgctcagctcttacacagtgataggtttgttccatgggacttatcataggcctggtgattcttgaaagagcatttttcatgactcaaaaatgagctgagaaggagtgttatggccaggtgcggcgtcatgcacctatagtcccagctgctcaggaggctaaggcagaaagaccattcaagcccaggagttccagcctgaagtatgctgtgatcatgcctgtgaataaccactgcactccagccagggcaacataacaagactctatctaa

SEQ ID NO: 1008 - DNA, 3960 bp, Homo sapiens
gacgcggggggaggggggtgcggcgagcggccccgctctctccccaccgctccgctcgcaccccagtgtaatgagggtcaccccctccccccagctggcccgggagggggcgcggggcacggttgatgccggcccaggatggatcagacctgtgaactacccagaagaaattgtctgctgcccttttccaatccagtgaatttagatgcccctgaagacaaggacagccctttcggtaatggtcaatccaatttttctgagccacttaatgggtgtactatgcagttatcgactgtcagtggaacatcccaaaatgcttatggacaagattctccatcttgttacattccactgcggagactacaggatttggcctccatgatcaatgtagagtatttaaatgggtctgctgatggatcagaatcctttcaagaccctgaaaaaagtgattcaagagctcagacgccaattgtttgcacttccttgagtcctggtggtcctacagcacttgctatgaaacaggaaccctcttgtaataactcccctgaactccaggtaaaagtaacaaagactatcaagaatggctttctgcactttgagaattttacttgtgtggacgatgcagatgtagattctgaaatggacccagaacagccagtcacagaggatgagagtatagaggagatctttgaggaaactcagaccaatgccacctgcaattatgagactaaatcagagaatggtgtaaaagtggccatgggaagtgaacaagacagcacaccagagagtagacacggtgcagtcaaatcgccattcttgccattagctcctcagactgaaacacagaaaaataagcaaagaaatgaagtggacggcagcaatgaaaaagcagcccttctcccagcccccttttcactaggagacacaaacattacaatagaagagcaattaaactcaataaatttatcttttcaggatgatccagattccagtaccagtacattaggaaacatgctagaattacctggaacttcatcatcatctacttcacaggaattgccattttgtcaacctaagaaaaagtctacgccactgaagtatgaagttggagatctcatctgggcaaaattcaagagacgcccatggtggccctgcaggatttgttctgatccgttgattaacacacattcaaaaatgaaagtggagcacatgatccagaagaaccaatgtctcttcaccaacacccagtgtaaggtttgctgcgccttgcttatttctgagtcccagaagctggcacattaccagagcagcagaagcaaagacaagaaccagtgctgccccatctgtaacatgaccttttcctcccctgtcgtggcccagtcgcactacctggggaagacccacgcaaagaacttaaagctgaagcagcagtccactaaggtggaagccttgcaccagaatagagagatgatagacccagacaagttctgcagcctctgccatgcaactttcaacgaccctgtcatggctcaacaacattatgtgggcaagaaacacagaaaacaggagaccaagctcaaactaatggcacgctatgggcggctggcggaccctgctgtcactgactttccagctggaaagggctacccctgcaaaacatgtaagatagtgctgaactccatagaacagtaccaagctcatgtcagcggcttcaaacacaagaaccagtcaccaaaaacagtggcatcatccctgggccagattccaatgcaaaggcaacccattcagaaagactcaaccaccttggaagactagaggtgattctgcccagcatcccatattgggccagccatgagccagcttcccgtgactgctcagcccttggctccctcttgctcgttgttctcaccaggaaagtacacgggcctgaggcaggattgggccacagacagcctctcattggtccgggctaattcactcctgctgctcccctttggcaggggtcctgtaggtcatgacaggggaggcaagggtattgagagactcggggtctcgcggggtggtagtttggagggtggctttccccatttcccaacccctctgggccttaggtgctgaggcccctgccacctgtctttcctctaaaggtcagttttgggccagttcttgcaactaaagagcagagatctctctgggccctagacatttccagcaaaacctggaactttcatgccaaacctggggcagggcaggaaacagaggaaatggctgcaacatgggagcttggagctaatacgacactctgccttcccccagaaggtgcaggctttcctgagtcttagaccagatatggccagttgcgcaggtttctgccaactgtgaagtatcctcctggagcagtgacacaatcttggcggagcattgctacccccgctgccccctccacagttcctgaatggtgctaaggatctgcagcagttggcaacgagctggggctgggggcggcctccatgtccactgagatcataggacactccaatggggatgggacctttcccctcctccatcagaggtgctctgaccctaggttacacgggaaagtgccccacatgcaagtctccctgagggttctgcccctaaaggcagactgcctcatgcccgctagctgtgaggttcattgctaccctcggccctactagccctctcttcccccttgtgcagcggaccacttgcccagtttgctgtggtgctagccttccccatcatccaccgggtgatttctgggtcccagggaaagaaagagagagctgatgcaggtttctacagtgaggaacaggcgtttcccaggccccacacccagatttctctatctttgctgtgttttatggcctgggactgagtccacacggatagatttttccttgtaaccttgagacgagaattccaaggagtgtcaccatcagaggcttctcttcattgtgtcaaagaagcccctagctgctctcgtggcctccttcccccactccctatcccttcacctgtgaaatgcctttgctttgcatattgtgtgtggatgtgtgtgtgtgtgtgtgtgtgtttgtgtgtatgtgtgtgcttctgtgtgtgcctaatgctctgtctcttggtcactgaagcatccaaataaagaatttccctcatgggccagactacaacttaacagacctagggttttgagccatattgccattggatctagtatgtctgtcttgacccctcacccccaccccattcagacctcagtagtccccagtagtcactttaggagttgggacagagtcgagcaccctgtgaaagtctcccttgagttcaggtgccctgaactcagtacagcctcatcttctcatccaccaccttctcctgcttctcctgtcacatagggcctcatgaaggtctttaaagggtttaagctggggatctgctttatgtttgagagaactgttctggctgttatgtaaaggagtgcagggaggggcaggaaaggagacaaggaggccagtatggacactgtgtccagtatggctttccaggctaatcacttagggcagagacccagccttattcatctctacttcctgatgtccatagtggtgtgtcatgaatttttattgaatgaacaaatgaggtgtatgaggagagatggttttctcctgctcagctcttacacagtgataggtttgttccatgggacttatcataggcctggtgattcttgaaagagcatttttcatgactcaaaaatgagctgagaaggagtgttatggccaggtgcggcgtcatgcacctatagtcccagctgctcaggaggctaaggcagaaagaccattcaagcccaggagttccagcctgaagtatgctgtgatcatgcctgtgaataaccactgcactccagccagggcaacataacaagactctatctaa

SEQ ID NO: 1009 - skipped

SEQ ID NO: 1010 - DNA, 7232 bp, Homo sapiens
gttgatgccggcccaggatggatcagacctgtgaactacccagaagaaattgtctgctgcccttttccaatccagtgaatttagatgcccctgaagacaaggacagccctttcggtaatggtcaatccaatttttctgagccacttaatgggtgtactatgcagttatcgactgtcagtggaacatcccaaaatgcttatggacaagattctccatcttgttacattccactgcggagactacaggatttggcctccatgatcaatgtagagtatttaaatgggtctgctgatggatcagaatcctttcaagaccctgaaaaaagtgattcaagagctcagacgccaattgtttgcacttccttgagtcctggtggtcctacagcacttgctatgaaacaggaaccctcttgtaataactcccctgaactccaggtaaaagtaacaaagactatcaagaatggctttctgcactttgagaattttacttgtgtggacgatgcagatgtagattctgaaatggacccagaacagccagtcacagaggatgagagtatagaggagatctttgaggaaactcagaccaatgccacctgcaattatgagactaaatcagagaatggtgtaaaagtggccatgggaagtgaacaagacagcacaccagagagtagacacggtgcagtcaaatcgccattcttgccattagctcctcagactgaaacacagaaaaataagcaaagaaatgaagtggacggcagcaatgaaaaagcagcccttctcccagcccccttttcactaggagacacaaacattacaatagaagagcaattaaactcaataaatttatcttttcaggatgatccagattccagtaccagtacattaggaaacatgctagaattacctggaacttcatcatcatctacttcacaggaattgccatttgttcctcagaaaattttgagtaaatgggaagccagtgttggacttgcagaacagtatgatgttcccaaggggtcaaagaaccgaaaatgtattcctggttcaatcaagttggacagtgaagaagatatgccatttgaagactgcacaaatgatcctgagtcagaacatgacctgttgcttaatggctgtttgaaatcactggcttttgattctgaacattctgcagatgagaaggaaaagccttgcgctaaatctcgagccagaaagagctctgataatccaaaaaggactagtgtgaaaaagggccacatacaatttgaagcacataaagatgaacggaggggaaagattccagagaaccttggcctaaactttatctctggggatatatctgatacgcaggcctctaatgaactttccaggatagcaaatagcctcacagggtccaacactgccccaggaagttttctgttttcttcctgtggaaaaaacactgcaaagaaagaatttgagacttcaaatggtgactctttattgggcttgcctgagggtgctttgatctcaaagtgttctcgagagaagaataaaccccaacgaagcctggtgtgtggttcaaaagtgaagctctgctatattggagcaggtgatgaggaaaagcgaagtgattccattagtatctgtaccacttctgatgatggaagcagtgacctggatcccatagaacacagctcagagtctgataacagtgtccttgaaattccagatgctttcgatagaacagagaacatgttatctatgcagaaaaatgaaaagataaagtattctaggtttgctgccacaaacactagggtaaaagcaaaacagaagcctctcattagtaactcacatacagaccacttaatgggttgtactaagagtgcagagcctggaaccgagacgtctcaggttaatctctctgatctgaaggcatctactcttgttcacaaaccccagtcagattttacaaatgatgctctctctccaaaattcaacctgtcatcaagcatatccagtgagaactcgttaataaagggtggggcagcaaatcaagctctattacattcgaaaagcaaacagcccaagttccgaagtataaagtgcaaacacaaagaaaatccagttatggcagaacccccagttataaatgaggagtgcagtttgaaatgctgctcttctgataccaaaggctctcctttggccagcatttctaaaagtgggaaagtggatggtctaaaactactgaacaatatgcatgagaaaaccagggattcaagtgacatagaaacagcagtggtgaaacatgttttatccgagttgaaggaactctcttacagatccttaggtgaggatgtcagtgactctggaacatcaaagccatcaaaaccattacttttctcttctgcttctagtcagaatcacatacctattgaaccagactacaaattcagtacattgctaatgatgttgaaagatatgcatgatagtaagacgaaggagcagcggttgatgactgctcaaaacctggtctcttaccggagtcctggtcgtggggactgttctactaatagtcctgtaggagtctctaaggttttggtttcaggaggctccacacacaattcagagaaaaagggagatggcactcagaactccgccaatcctagccctagtgggggtgactctgcattatctggcgagttgtctgcttccctacctggcttactgtccgacaagagagacctccctgcttctggtaaaagtcgttcagactgtgttactaggcgcaactgtggacgatcaaagccttcatccaaattgcgagatgctttttcagcccaaatggtaaagaacacagtgaaccgtaaagccttaaagaccgagcgcaaaagaaaactgaatcagcttccaagtgtgactcttgatgctgtactgcagggagaccgagaacgtggaggttcattgagaggtggggcagaagatcctagtaaagaggatccccttcagataatgggccacttaacaagtgaagatggtgaccatttttctgatgtgcatttcgatagcaaggttaagcaatctgatcctggtaaaatttctgaaaaaggactctcttttgaaaacggaaaaggcccagagctggactctgtaatgaacagtgagaatgatgaactcaatggtgtaaatcaagtggtgcctaaaaagcggtggcagcgtttaaaccaaaggcgcactaaacctcgtaagcgcatgaacagatttaaagagaaagaaaactctgagtgtgcctttagggtcttacttcctagtgaccctgtgcaggaggggcgggatgagtttccagagcatagaactccttcagcaagcatacttgaggaaccactgacagagcaaaatcatgctgactgcttagattcagctgggccacggttaaatgtttgtgataaatccagtgccagcattggtgacatggaaaaggagccaggaattcccagtttgacaccacaggctgagctccctgaaccagctgtgcggtcagagaagaaacgccttaggaagccaagcaagtggcttttggaatatacagaagaatatgatcagatatttgctcctaagaaaaaacaaaagaaggtacaggagcaggtgcacaaggtaagttcccgctgtgaagaggaaagccttctagcccgaggtcgatctagtgctcagaacaagcaggtggacgagaattctttgatttcaaccaaagaagagcctccagttcttgaaagggaggctccgtttttggagggccccttggctcagtcagaacttggaggtggacatgctgagttgccgcagctgaccttgtctgtgcctgtggctccggaagtctctccacggcctgcccttgagtctgaggaattgctagttaaaacgccaggaaattatgaaagtaaacgtcaaagaaaaccaactaagaaacttcttgaatccaatgatttagaccctggatttatgcccaagaagggggaccttggcctttctaaaaagtgctatgaagctggtcacctggagaatggcataactgaatcttgtgccacatcttattcaaaagattttggtggaggcactaccaagatatttgacaagccaaggaagcgaaaacgacagaggcatgctgcagccaagatgcagtgtaaaaaagtgaaaaatgatgactcgtcaaaagagattccaggctcagagggagaactaatgcctcacaggacggccacaagccccaaggagactgttgaggaaggtgtagaacacgatcccgggatgcctgcctctaaaaaaatgcagggtgaacgcggtggaggagctgcactcaaggagaatgtctgtcagaattgtgaaaaattgggtgagctgctgttatgtgaggctcagtgctgtggggctttccacctggagtgccttggattgactgagatgccaagaggaaaatttatctgcaatgaatgtcgcacagtggagcacatgatccagaagaaccaatgtctcttcaccaacacccagtgtaaggtttgctgcgccttgcttatttctgagtcccagaagctggcacattaccagagcagcagaagcaaagacaagaaccagtgctgccccatctgtaacatgaccttttcctcccctgtcgtggcccagtcgcactacctggggaagacccacgcaaagaacttaaagctgaagcagcagtccactaaggtggaagccttgcaccagaatagagagatgatagacccagacaagttctgcagcctctgccatgcaactttcaacgaccctgtcatggctcaacaacattatgtgggcaagaaacacagaaaacaggagaccaagctcaaactaatggcacgctatgggcggctggcggaccctgctgtcactgactttccagctggaaagggctacccctgcaaaacatgtaagatagtgctgaactccatagaacagtaccaagctcatgtcagcggcttcaaacacaagaaccagtcaccaaaaacagtggcatcatccctgggccagattccaatgcaaaggcaacccattcagaaagactcaaccaccttggaagactagaggtgattctgcccagcatcccatattgggccagccatgagccagcttcccgtgactgctcagcccttggctccctcttgctcgttgttctcaccaggaaagtacacgggcctgaggcaggattgggccacagacagcctctcattggtccgggctaattcactcctgctgctcccctttggcaggggtcctgtaggtcatgacaggggaggcaagggtattgagagactcggggtctcgcggggtggtagtttggagggtggctttccccatttcccaacccctctgggccttaggtgctgaggcccctgccacctgtctttcctctaaaggtcagttttgggccagttcttgcaactaaagagcagagatctctctgggccctagacatttccagcaaaacctggaactttcatgccaaacctggggcagggcaggaaacagaggaaatggctgcaacatgggagcttggagctaatacgacactctgccttcccccagaaggtgcaggctttcctgagtcttagaccagatatggccagttgcgcaggtttctgccaactgtgaagtatcctcctggagcagtgacacaatcttggcggagcattgctacccccgctgccccctccacagttcctgaatggtgctaaggatctgcagcagttggcaacgagctggggctgggggcggcctccatgtccactgagatcataggacactccaatggggatgggacctttcccctcctccatcagaggtgctctgaccctaggttacacgggaaagtgccccacatgcaagtctccctgagggttctgcccctaaaggcagactgcctcatgcccgctagctgtgaggttcattgctaccctcggccctactagccctctcttcccccttgtgcagcggaccacttgcccagtttgctgtggtgctagccttccccatcatccaccgggtgatttctgggtcccagggaaagaaagagagagctgatgcaggtttctacagtgaggaacaggcgtttcccaggccccacacccagatttctctatctttgctgtgttttatggcctgggactgagtccacacggatagatttttccttgtaaccttgagacgagaattccaaggagtgtcaccatcagaggcttctcttcattgtgtcaaagaagcccctagctgctctcgtggcctccttcccccactccctatcccttcacctgtgaaatgcctttgctttgcatattgtgtgtggatgtgtgtgtgtgtgtgtgtgtgtttgtgtgtatgtgtgtgcttctgtgtgtgcctaatgctctgtctcttggtcactgaagcatccaaataaagaatttccctcatgggccagactacaacttaacagacctagggttttgagccatattgccattggatctagtatgtctgtcttgacccctcacccccaccccattcagacctcagtagtccccagtagtcactttaggagttgggacagagtcgagcaccctgtgaaagtctcccttgagttcaggtgccctgaactcagtacagcctcatcttctcatccaccaccttctcctgcttctcctgtcacatagggcctcatgaaggtctttaaagggtttaagctggggatctgctttatgtttgagagaactgttctggctgttatgtaaaggagtgcagggaggggcaggaaaggagacaaggaggccagtatggacactgtgtccagtatggctttccaggctaatcacttagggcagagacccagccttattcatctctacttcctgatgtccatagtggtgtgtcatgaatttttattgaatgaacaaatgaggtgtatgaggagagatggttttctcctgctcagctcttacacagtgataggtttgttccatgggacttatcataggcctggtgattcttgaaagagcatttttcatgactcaaaaatgagctgagaaggagtgttatggccaggtgcggcgtcatgcacctatagtcccagctgctcaggaggctaaggcagaaagaccattcaagcccaggagttccagcctgaagtatgctgtgatcatgcctgtgaataaccactgcactccagccagggcaacataacaagactctatctaa

SEQ ID NO: 1011 - DNA, 6993 bp, Homo sapiens
gttgatgccggcccaggatggatcagacctgtgaactacccagaagaaattgtctgctgcccttttccaatccagtgaatttagatgcccctgaagacaaggacagccctttcggtaatggtcaatccaatttttctgagccacttaatgggtgtactatgcagttatcgactgtcagtggaacatcccaaaatgcttatggacaagattctccatcttgttacattccactgcggagactacaggatttggcctccatgatcaatgtagagtatttaaatgggtctgctgatggatcagaatcctttcaagaccctgaaaaaagtgattcaagagctcagacgccaattgtttgcacttccttgagtcctggtggtcctacagcacttgctatgaaacaggaaccctcttgtaataactcccctgaactccaggtaaaagtaacaaagactatcaagaatggctttctgcactttgagaattttacttgtgtggacgatgcagatgtagattctgaaatggacccagaacagccagtcacagaggatgagagtatagaggagatctttgaggaaactcagaccaatgccacctgcaattatgagactaaatcagagaatggtgtaaaagtggccatgggaagtgaacaagacagcacaccagagagtagacacggtgcagtcaaatcgccattcttgccattagctcctcagactgaaacacagaaaaataagcaaagaaatgaagtggacggcagcaatgaaaaagcagcccttctcccagcccccttttcactaggagacacaaacattacaatagaagagcaattaaactcaataaatttatcttttcaggatgatccagattccagtaccagtacattaggaaacatgctagaattacctggaacttcatcatcatctacttcacaggaattgccatttgttcctcagaaaattttgagtaaatgggaagccagtgttggacttgcagaacagtatgatgttcccaaggggtcaaagaaccgaaaatgtattcctggttcaatcaagttggacagtgaagaagatatgccatttgaagactgcacaaatgatcctgagtcagaacatgacctgttgcttaatggctgtttgaaatcactggcttttgattctgaacattctgcagatgagaaggaaaagccttgcgctaaatctcgagccagaaagagctctgataatccaaaaaggactagtgtgaaaaagggccacatacaatttgaagcacataaagatgaacggaggggaaagattccagagaaccttggcctaaactttatctctggggatatatctgatacgcaggcctctaatgaactttccaggatagcaaatagcctcacagggtccaacactgccccaggaagttttctgttttcttcctgtggaaaaaacactgcaaagaaagaatttgagacttcaaatggtgactctttattgggcttgcctgagggtgctttgatctcaaagtgttctcgagagaagaataaaccccaacgaagcctggtgtgtggttcaaaagtgaagctctgctatattggagcaggtgatgaggaaaagcgaagtgattccattagtatctgtaccacttctgatgatggaagcagtgacctggatcccatagaacacagctcagagtctgataacagtgtccttgaaattccagatgctttcgatagaacagagaacatgttatctatgcagaaaaatgaaaagataaagtattctaggtttgctgccacaaacactagggtaaaagcaaaacagaagcctctcattagtaactcacatacagaccacttaatgggttgtactaagagtgcagagcctggaaccgagacgtctcaggttaatctctctgatctgaaggcatctactcttgttcacaaaccccagtcagattttacaaatgatgctctctctccaaaattcaacctgtcatcaagcatatccagtgagaactcgttaataaagggtggggcagcaaatcaagctctattacattcgaaaagcaaacagcccaagttccgaagtataaagtgcaaacacaaagaaaatccagttatggcagaacccccagttataaatgaggagtgcagtttgaaatgctgctcttctgataccaaaggctctcctttggccagcatttctaaaagtgggaaagtggatggtctaaaactactgaacaatatgcatgagaaaaccagggattcaagtgacatagaaacagcagtggtgaaacatgttttatccgagttgaaggaactctcttacagatccttaggtgaggatgtcagtgactctggaacatcaaagccatcaaaaccattacttttctcttctgcttctagtcagaatcacatacctattgaaccagactacaaattcagtacattgctaatgatgttgaaagatatgcatgatagtaagacgaaggagcagcggttgatgactgctcaaaacctggtctcttaccggagtcctggtcgtggggactgttctactaatagtcctgtaggagtctctaaggttttggtttcaggaggctccacacacaattcagagaaaaagggagatggcactcagaactccgccaatcctagccctagtgggggtgactctgcattatctggcgagttgtctgcttccctacctggcttactgtccgacaagagagacctccctgcttctggtaaaagtcgttcagactgtgttactaggcgcaactgtggacgatcaaagccttcatccaaattgcgagatgctttttcagcccaaatggtaaagaacacagtgaaccgtaaagccttaaagaccgagcgcaaaagaaaactgaatcagcttccaagtgtgactcttgatgctgtactgcagggagaccgagaacgtggaggttcattgagaggtggggcagaagatcctagtaaagaggatccccttcagataatgggccacttaacaagtgaagatggtgaccatttttctgatgtgcatttcgatagcaaggttaagcaatctgatcctggtaaaatttctgaaaaaggactctcttttgaaaacggaaaaggcccagagctggactctgtaatgaacagtgagaatgatgaactcaatggtgtaaatcaagtggtgcctaaaaagcggtggcagcgtttaaaccaaaggcgcactaaacctcgtaagcgcatgaacagatttaaagagaaagaaaactctgagtgtgcctttagggtcttacttcctagtgaccctgtgcaggaggggcgggatgagtttccagagcatagaactccttcagcaagcatacttgaggaaccactgacagagcaaaatcatgctgactgcttagattcagctgggccacggttaaatgtttgtgataaatccagtgccagcattggtgacatggaaaaggagccaggaattcccagtttgacaccacaggctgagctccctgaaccagctgtgcggtcagagaagaaacgccttaggaagccaagcaagtggcttttggaatatacagaagaatatgatcagatatttgctcctaagaaaaaacaaaagaaggtacaggagcaggtgcacaaggtaagttcccgctgtgaagaggaaagccttctagcccgaggtcgatctagtgctcagaacaagcaggtggacgagaattctttgatttcaaccaaagaagagcctccagttcttgaaagggaggctccgtttttggagggccccttggctcagtcagaacttggaggtggacatgctgagttgccgcagctgaccttgtctgtgcctgtggctccggaagtctctccacggcctgcccttgagtctgaggaattgctagttaaaacgccaggaaattatgaaagtaaacgtcaaagaaaaccaactaagaaacttcttgaatccaatgatttagaccctggatttatgcccaagaagggggaccttggcctttctaaaaagtgctatgaagctggtcacctggagaatggcataactgaatcttgtgccacatcttattcaaaagattttggtggaggcactaccaagatatttgacaagccaaggaagcgaaaacgacagaggcatgctgcagccaagatgcagtgtaaaaaagtgaaaaatgatgactcgtcaaaagagattccaggctcagagggagaactaatgcctcacaggacggccacaagccccaaggagactgttgaggaaggtgtagaacacgatcccgggatgcctgcctctaaaaaaatgcagggtgaacgcggtggaggagctgcactcaaggagaatgtctgtcagaattgtgaaaaattgggtgagctgctgttatgtgaggctcagtgctgtggggctttccacctggagtgccttggattgactgagatgccaagaggaaaatttatctgcaatgaatgtcgcacagtggagcacatgatccagaagaaccaatgtctcttcaccaacacccagtgtaaggtttgctgcgccttgcttatttctgagtcccagaagctggcacattaccagagcaaaaaacatgccaacaaagtgaagagatacctagcaatccatggaatggagacattaaagggggaaacgaagaagctagactcagatcagaagagcagcagaagcaaagacaagaaccagtgctgccccatctgtaacatgaccttttcctcccctgtcgtggcccagtcgcactacctggggaagacccacgcaaagaacttaaagctgaagcagcagtccactaaggtggaagccttgcaccagaatagagagatgatagacccagacaagttctgcagcctctgccatgcaactttcaacgaccctgtcatggctcaacaacattatgtgggcaagaaacacagaaaacaggagaccaagctcaaactaatggcacgctatgggcggctggcggaccctgctgtcactgactttccagctggaaagggctacccctgcaaaacatgtaagatagtgctgaactccatagaacagtaccaagctcatgtcagcggcttcaaacacaagaaccagtcaccaaaaacagtggcatcatccctgggccagattccaatgcaaaggcaacccattcagaaagactcaaccaccttggaagactagagctaggggtggccgtgtcacagtctggccaaggaaatgaaattgggagttgctgtgtggaaactcaactctctggaacttcttccttcctcctgcctctgcacaaatgtgacggcagcagctgaagccaacatcttgcgaccatgagagaaaaacctggagaacggacgagtcctcaaccctgacttcagaccaacctacacccacctctggacgtggggctaagtgagagatggatacactgtttcatttaggccctgctcacttaggtttctgttattcacaccccaacgaaaccctccatggtccagggcaccgggcaaagtacagaagggcacgagtttacttcccgcttccctggagaccaccaaccctctcacccttccagcccagcctctgccacttcccagctgtcggtcctcctccaaacagacgtgcatgccaacacccggtgggtgtgaggcttgtaggcccaagtctagagaggctgagtctggcaaagcctgaaagcccctgtcctagcaagccaggccacaggtctagagtatccgagaccagtgaataaggggacggggggtgctactgaggctgtgagaagccccaggaccagcccagggtagttagaactgagtgaggttagccgggactaacctcactcagatccctcctccccagttcccctccatccactttggtttggaagcctccccagagctctcccaggctgtcatcagctctaaactctctgcctccacaaaaatgccctgggcaacctgtaactcacagccctgctgtcttcagagtataaactggagacagatgtacccagaattgaggacgggtgggaaatgaggagaaatgaaggctgaggaggggtcattctcacagtccctccctttcggtcacaggagggtgttgcccatgcttttgggtgggtcccaggcccatagctgcaaatattcatattggctactcttcagtgagcaaggggtatatgccaggcactggcattgtgcttgacatacatcatcatactgagtcctcacggaagatgtattattcccatttcacagaagatgaaactgaggcttgaggttaagtgatttgtccgtgaccacaaagagttttcgggactcaaacccagatctgtcactgggcaaggtggctcacacctataatcccagccctttgggagactgaggccagcagatctcctgtggccaggagttcaagcctggccaacaatggcaaaaccccgtctctaccaaaaatacaaaaattagctgggcgtggtggcacacacccgtaatcccagctactcaggtggctgaggcaggagaatcacttgaacccaggaggtggtggttgcagtgagcctagatcgtgccactgcattccagcctgagcgacagagtaagactctgtctccaaaaaaaacccagatctgtccgactctgacacccaacctttaatcactcactttctgtcaatgtcacctccgttttgaccagccaagctagacctccctggagcctgtggagaagccaaggtagaaaagggttggaaaagaatgataaaataggccaggtgcggtggctcaagcctgtactcccagcacttttggaggccgagacaggcagattgcttgagcccaggagttcaagaccagcctgggcaacataatgagaccctgtttcaacttaaaaaaaagaaatggtaatgaacaattgtcaattctgagcagctgggtatggtatgaccctgtgtactttttctgtattttaaaatgttctcaaaataaaacttgttt

SEQ ID NO: 1012 - DNA, 7662 bp, Homo sapiens
gacgcggggggaggggggtgcggcgagcggccccgctctctccccaccgctccgctcgcaccccagtgtaatgagggtcaccccctccccccagctggcccgggagggggcgcggggcacggttgatgccggcccaggatggatcagacctgtgaactacccagaagaaattgtctgctgcccttttccaatccagtgaatttagatgcccctgaagacaaggacagccctttcggtaatggtcaatccaatttttctgagccacttaatgggtgtactatgcagttatcgactgtcagtggaacatcccaaaatgcttatggacaagattctccatcttgttacattccactgcggagactacaggatttggcctccatgatcaatgtagagtatttaaatgggtctgctgatggatcagaatcctttcaagaccctgaaaaaagtgattcaagagctcagacgccaattgtttgcacttccttgagtcctggtggtcctacagcacttgctatgaaacaggaaccctcttgtaataactcccctgaactccaggtaaaagtaacaaagactatcaagaatggctttctgcactttgagaattttacttgtgtggacgatgcagatgtagattctgaaatggacccagaacagccagtcacagaggatgagagtatagaggagatctttgaggaaactcagaccaatgccacctgcaattatgagactaaatcagagaatggtgtaaaagtggccatgggaagtgaacaagacagcacaccagagagtagacacggtgcagtcaaatcgccattcttgccattagctcctcagactgaaacacagaaaaataagcaaagaaatgaagtggacggcagcaatgaaaaagcagcccttctcccagcccccttttcactaggagacacaaacattacaatagaagagcaattaaactcaataaatttatcttttcaggatgatccagattccagtaccagtacattaggaaacatgctagaattacctggaacttcatcatcatctacttcacaggaattgccattttgtcaacctaagaaaaagtctacgccactgaagtatgaagttggagatctcatctgggcaaaattcaagagacgcccatggtggccctgcaggatttgttctgatccgttgattaacacacattcaaaaatgaaagtttccaaccggaggccctatcggcagtactacgtggaggcttttggagatccttctgagagagcctgggtggctggaaaagcaatcgtcatgtttgaaggcagacatcaattcgaagagctacctgtccttaggagaagagggaaacagaaagaaaaaggatataggcataaggttcctcagaaaattttgagtaaatgggaagccagtgttggacttgcagaacagtatgatgttcccaaggggtcaaagaaccgaaaatgtattcctggttcaatcaagttggacagtgaagaagatatgccatttgaagactgcacaaatgatcctgagtcagaacatgacctgttgcttaatggctgtttgaaatcactggcttttgattctgaacattctgcagatgagaaggaaaagccttgcgctaaatctcgagccagaaagagctctgataatccaaaaaggactagtgtgaaaaagggccacatacaatttgaagcacataaagatgaacggaggggaaagattccagagaaccttggcctaaactttatctctggggatatatctgatacgcaggcctctaatgaactttccaggatagcaaatagcctcacagggtccaacactgccccaggaagttttctgttttcttcctgtggaaaaaacactgcaaagaaagaatttgagacttcaaatggtgactctttattgggcttgcctgagggtgctttgatctcaaagtgttctcgagagaagaataaaccccaacgaagcctggtgtgtggttcaaaagtgaagctctgctatattggagcaggtgatgaggaaaagcgaagtgattccattagtatctgtaccacttctgatgatggaagcagtgacctggatcccatagaacacagctcagagtctgataacagtgtccttgaaattccagatgctttcgatagaacagagaacatgttatctatgcagaaaaatgaaaagataaagtattctaggtttgctgccacaaacactagggtaaaagcaaaacagaagcctctcattagtaactcacatacagaccacttaatgggttgtactaagagtgcagagcctggaaccgagacgtctcaggttaatctctctgatctgaaggcatctactcttgttcacaaaccccagtcagattttacaaatgatgctctctctccaaaattcaacctgtcatcaagcatatccagtgagaactcgttaataaagggtggggcagcaaatcaagctctattacattcgaaaagcaaacagcccaagttccgaagtataaagtgcaaacacaaagaaaatccagttatggcagaacccccagttataaatgaggagtgcagtttgaaatgctgctcttctgataccaaaggctctcctttggccagcatttctaaaagtgggaaagtggatggtctaaaactactgaacaatatgcatgagaaaaccagggattcaagtgacatagaaacagcagtggtgaaacatgttttatccgagttgaaggaactctcttacagatccttaggtgaggatgtcagtgactctggaacatcaaagccatcaaaaccattacttttctcttctgcttctagtcagaatcacatacctattgaaccagactacaaattcagtacattgctaatgatgttgaaagatatgcatgatagtaagacgaaggagcagcggttgatgactgctcaaaacctggtctcttaccggagtcctggtcgtggggactgttctactaatagtcctgtaggagtctctaaggttttggtttcaggaggctccacacacaattcagagaaaaagggagatggcactcagaactccgccaatcctagccctagtgggggtgactctgcattatctggcgagttgtctgcttccctacctggcttactgtccgacaagagagacctccctgcttctggtaaaagtcgttcagactgtgttactaggcgcaactgtggacgatcaaagccttcatccaaattgcgagatgctttttcagcccaaatggtaaagaacacagtgaaccgtaaagccttaaagaccgagcgcaaaagaaaactgaatcagcttccaagtgtgactcttgatgctgtactgcagggagaccgagaacgtggaggttcattgagaggtggggcagaagatcctagtaaagaggatccccttcagataatgggccacttaacaagtgaagatggtgaccatttttctgatgtgcatttcgatagcaaggttaagcaatctgatcctggtaaaatttctgaaaaaggactctcttttgaaaacggaaaaggcccagagctggactctgtaatgaacagtgagaatgatgaactcaatggtgtaaatcaagtggtgcctaaaaagcggtggcagcgtttaaaccaaaggcgcactaaacctcgtaagcgcatgaacagatttaaagagaaagaaaactctgagtgtgcctttagggtcttacttcctagtgaccctgtgcaggaggggcgggatgagtttccagagcatagaactccttcagcaagcatacttgaggaaccactgacagagcaaaatcatgctgactgcttagattcagctgggccacggttaaatgtttgtgataaatccagtgccagcattggtgacatggaaaaggagccaggaattcccagtttgacaccacaggctgagctccctgaaccagctgtgcggtcagagaagaaacgccttaggaagccaagcaagtggcttttggaatatacagaagaatatgatcagatatttgctcctaagaaaaaacaaaagaaggtacaggagcaggtgcacaaggtaagttcccgctgtgaagaggaaagccttctagcccgaggtcgatctagtgctcagaacaagcaggtggacgagaattctttgatttcaaccaaagaagagcctccagttcttgaaagggaggctccgtttttggagggccccttggctcagtcagaacttggaggtggacatgctgagttgccgcagctgaccttgtctgtgcctgtggctccggaagtctctccacggcctgcccttgagtctgaggaattgctagttaaaacgccaggaaattatgaaagtaaacgtcaaagaaaaccaactaagaaacttcttgaatccaatgatttagaccctggatttatgcccaagaagggggaccttggcctttctaaaaagtgctatgaagctggtcacctggagaatggcataactgaatcttgtgccacatcttattcaaaagattttggtggaggcactaccaagatatttgacaagccaaggaagcgaaaacgacagaggcatgctgcagccaagatgcagtgtaaaaaagtgaaaaatgatgactcgtcaaaagagattccaggctcagagggagaactaatgcctcacaggacggccacaagccccaaggagactgttgaggaaggtgtagaacacgatcccgggatgcctgcctctaaaaaaatgcagggtgaacgcggtggaggagctgcactcaaggagaatgtctgtcagaattgtgaaaaattgggtgagctgctgttatgtgaggctcagtgctgtggggctttccacctggagtgccttggattgactgagatgccaagaggaaaatttatctgcaatgaatgtcgcacagtggagcacatgatccagaagaaccaatgtctcttcaccaacacccagtgtaaggtttgctgcgccttgcttatttctgagtcccagaagctggcacattaccagagcagcagaagcaaagacaagaaccagtgctgccccatctgtaacatgaccttttcctcccctgtcgtggcccagtcgcactacctggggaagacccacgcaaagaacttaaagctgaagcagcagtccactaaggtggaagccttgcaccagaatagagagatgatagacccagacaagttctgcagcctctgccatgcaactttcaacgaccctgtcatggctcaacaacattatgtgggcaagaaacacagaaaacaggagaccaagctcaaactaatggcacgctatgggcggctggcggaccctgctgtcactgactttccagctggaaagggctacccctgcaaaacatgtaagatagtgctgaactccatagaacagtaccaagctcatgtcagcggcttcaaacacaagaaccagtcaccaaaaacagtggcatcatccctgggccagattccaatgcaaaggcaacccattcagaaagactcaaccaccttggaagactagaggtgattctgcccagcatcccatattgggccagccatgagccagcttcccgtgactgctcagcccttggctccctcttgctcgttgttctcaccaggaaagtacacgggcctgaggcaggattgggccacagacagcctctcattggtccgggctaattcactcctgctgctcccctttggcaggggtcctgtaggtcatgacaggggaggcaagggtattgagagactcggggtctcgcggggtggtagtttggagggtggctttccccatttcccaacccctctgggccttaggtgctgaggcccctgccacctgtctttcctctaaaggtcagttttgggccagttcttgcaactaaagagcagagatctctctgggccctagacatttccagcaaaacctggaactttcatgccaaacctggggcagggcaggaaacagaggaaatggctgcaacatgggagcttggagctaatacgacactctgccttcccccagaaggtgcaggctttcctgagtcttagaccagatatggccagttgcgcaggtttctgccaactgtgaagtatcctcctggagcagtgacacaatcttggcggagcattgctacccccgctgccccctccacagttcctgaatggtgctaaggatctgcagcagttggcaacgagctggggctgggggcggcctccatgtccactgagatcataggacactccaatggggatgggacctttcccctcctccatcagaggtgctctgaccctaggttacacgggaaagtgccccacatgcaagtctccctgagggttctgcccctaaaggcagactgcctcatgcccgctagctgtgaggttcattgctaccctcggccctactagccctctcttcccccttgtgcagcggaccacttgcccagtttgctgtggtgctagccttccccatcatccaccgggtgatttctgggtcccagggaaagaaagagagagctgatgcaggtttctacagtgaggaacaggcgtttcccaggccccacacccagatttctctatctttgctgtgttttatggcctgggactgagtccacacggatagatttttccttgtaaccttgagacgagaattccaaggagtgtcaccatcagaggcttctcttcattgtgtcaaagaagcccctagctgctctcgtggcctccttcccccactccctatcccttcacctgtgaaatgcctttgctttgcatattgtgtgtggatgtgtgtgtgtgtgtgtgtgtgtttgtgtgtatgtgtgtgcttctgtgtgtgcctaatgctctgtctcttggtcactgaagcatccaaataaagaatttccctcatgggccagactacaacttaacagacctagggttttgagccatattgccattggatctagtatgtctgtcttgacccctcacccccaccccattcagacctcagtagtccccagtagtcactttaggagttgggacagagtcgagcaccctgtgaaagtctcccttgagttcaggtgccctgaactcagtacagcctcatcttctcatccaccaccttctcctgcttctcctgtcacatagggcctcatgaaggtctttaaagggtttaagctggggatctgctttatgtttgagagaactgttctggctgttatgtaaaggagtgcagggaggggcaggaaaggagacaaggaggccagtatggacactgtgtccagtatggctttccaggctaatcacttagggcagagacccagccttattcatctctacttcctgatgtccatagtggtgtgtcatgaatttttattgaatgaacaaatgaggtgtatgaggagagatggttttctcctgctcagctcttacacagtgataggtttgttccatgggacttatcataggcctggtgattcttgaaagagcatttttcatgactcaaaaatgagctgagaaggagtgttatggccaggtgcggcgtcatgcacctatagtcccagctgctcaggaggctaaggcagaaagaccattcaagcccaggagttccagcctgaagtatgctgtgatcatgcctgtgaataaccactgcactccagccagggcaacataacaagactctatctaa

SEQ ID NO: 1013 - DNA, 5948 bp, Homo sapiens
gttgatgccggcccaggatggatcagacctgtgaactacccagaagaaattgtctgctgcccttttccaatccagtgaatttagatgcccctgaagacaaggacagccctttcggatgatccagattccagtaccagtacattaggaaacatgctagaattacctggaacttcatcatcatctacttcacaggaattgccatttctggaatctcactccgttgcccaggctggaatgcagtggtaagatcttggctcactgcaacctccgcctcccaggttcaagcgattcttctgcctcaacctcccaagtagctgggattacaggcacacaccaccatgctcggctaatctttgtatttttagtagagatggggtttcaccatgtttgccaggctggtcttgaactcctgacctccagtgattctcccaccttggcctcccaaagtgctgggattacaggcatgagccaccgcacccagcctgtgacttaacctttttgagcctcagtttctttatctgcaaaatcgagataatgctgtcttgtaaggttgtgagggtgtcaacctaagaaaaagtctacgccactgaagtatgaagttggagatctcatctgggcaaaattcaagagacgcccatggtggccctgcaggatttgttctgatccgttgattaacacacattcaaaaatgaaagtttccaaccggaggccctatcggcagtactacgtggaggcttttggagatccttctgagagagcctgggtggctggaaaagcaatcgtcatgtttgaaggcagacatcaattcgaagagctacctgtccttaggagaagagggaaacagaaagaaaaaggatataggcataaggttcctcagaaaattttgagtaaatgggaagccagtgttggacttgcagaacagtatgatgttcccaaggggtcaaagaaccgaaaatgtattcctggttcaatcaagttggacagtgaagaagatatgccatttgaagactgcacaaatgatcctgagtcagaacatgacctgttgcttaatggctgtttgaaatcactggcttttgattctgaacattctgcagatgagaaggaaaagccttgcgctaaatctcgagccagaaagagctctgataatccaaaaaggactagtgtgaaaaagggccacatacaatttgaagcacataaagatgaacggaggggaaagattccagagaaccttggcctaaactttatctctggggatatatctgatacgcaggcctctaatgaactttccaggatagcaaatagcctcacagggtccaacactgccccaggaagttttctgttttcttcctgtggaaaaaacactgcaaagaaagaatttgagacttcaaatggtgactctttattgggcttgcctgagggtgctttgatctcaaagtgttctcgagagaagaataaaccccaacgaagcctggtgtgtggttcaaaagtgaagctctgctatattggagcaggtgatgaggaaaagcgaagtgattccattagtatctgtaccacttctgatgatggaagcagtgacctggatcccatagaacacagctcagagtctgataacagtgtccttgaaattccagatgctttcgatagaacagagaacatgttatctatgcagaaaaatgaaaagataaagtattctaggtttgctgccacaaacactagggtaaaagcaaaacagaagcctctcattagtaactcacatacagaccacttaatgggttgtactaagagtgcagagcctggaaccgagacgtctcaggttaatctctctgatctgaaggcatctactcttgttcacaaaccccagtcagattttacaaatgatgctctctctccaaaattcaacctgtcatcaagcatatccagtgagaactcgttaataaagggtggggcagcaaatcaagctctattacattcgaaaagcaaacagcccaagttccgaagtataaagtgcaaacacaaagaaaatccagttatggcagaacccccagttataaatgaggagtgcagtttgaaatgctgctcttctgataccaaaggctctcctttggccagcatttctaaaagtgggaaagtggatggtctaaaactactgaacaatatgcatgagaaaaccagggattcaagtgacatagaaacagcagtggtgaaacatgttttatccgagttgaaggaactctcttacagatccttaggtgaggatgtcagtgactctggaacatcaaagccatcaaaaccattacttttctcttctgcttctagtcagaatcacatacctattgaaccagactacaaattcagtacattgctaatgatgttgaaagatatgcatgatagtaagacgaaggagcagcggttgatgactgctcaaaacctggtctcttaccggagtcctggtcgtggggactgttctactaatagtcctgtaggagtctctaaggttttggtttcaggaggctccacacacaattcagagaaaaagggagatggcactcagaactccgccaatcctagccctagtgggggtgactctgcattatctggcgagttgtctgcttccctacctggcttactgtccgacaagagagacctccctgcttctggtaaaagtcgttcagactgtgttactaggcgcaactgtggacgatcaaagccttcatccaaattgcgagatgctttttcagcccaaatggtaaagaacacagtgaaccgtaaagccttaaagaccgagcgcaaaagaaaactgaatcagcttccaagtgtgactcttgatgctgtactgcagggagaccgagaacgtggaggttcattgagaggtggggcagaagatcctagtaaagaggatccccttcagataatgggccacttaacaagtgaagatggtgaccatttttctgatgtgcatttcgatagcaaggttaagcaatctgatcctggtaaaatttctgaaaaaggactctcttttgaaaacggaaaaggcccagagctggactctgtaatgaacagtgagaatgatgaactcaatggtgtaaatcaagtggtgcctaaaaagcggtggcagcgtttaaaccaaaggcgcactaaacctcgtaagcgcatgaacagatttaaagagaaagaaaactctgagtgtgcctttagggtcttacttcctagtgaccctgtgcaggaggggcgggatgagtttccagagcatagaactccttcagcaagcatacttgaggaaccactgacagagcaaaatcatgctgactgcttagattcagctgggccacggttaaatgtttgtgataaatccagtgccagcattggtgacatggaaaaggagccaggaattcccagtttgacaccacaggctgagctccctgaaccagtggagcacatgatccagaagaaccaatgtctcttcaccaacacccagtgtaaggtttgctgcgccttgcttatttctgagtcccagaagctggcacattaccagagcaaaaaacatgccaacaaagtgaagagatacctagcaatccatggaatggagacattaaagggggaaacgaagaagctagactcagatcagaagagcagcagaagcaaagacaagaaccagtgctgccccatctgtaacatgaccttttcctcccctgtcgtggcccagtcgcactacctggggaagacccacgcaaagaacttaaagctgaagcagcagtccactaaggtggaagccttgcaccagaatagagagatgatagacccagacaagttctgcagcctctgccatgcaactttcaacgaccctgtcatggctcaacaacattatgtgggcaagaaacacagaaaacaggagaccaagctcaaactaatggcacgctatgggcggctggcggaccctgctgtcactgactttccagctggaaagggctacccctgcaaaacatgtaagatagtgctgaactccatagaacagtaccaagctcatgtcagcggcttcaaacacaagaaccagtcaccaaaaacagtggcatcatccctgggccagattccaatgcaaaggcaacccattcagaaagactcaaccaccttggaagactagagctaggggtggccgtgtcacagtctggccaaggaaatgaaattgggagttgctgtgtggaaactcaactctctggaacttcttccttcctcctgcctctgcacaaatgtgacggcagcagctgaagccaacatcttgcgaccatgagagaaaaacctggagaacggacgagtcctcaaccctgacttcagaccaacctacacccacctctggacgtggggctaagtgagagatggatacactgtttcatttaggccctgctcacttaggtttctgttattcacaccccaacgaaaccctccatggtccagggcaccgggcaaagtacagaagggcacgagtttacttcccgcttccctggagaccaccaaccctctcacccttccagcccagcctctgccacttcccagctgtcggtcctcctccaaacagacgtgcatgccaacacccggtgggtgtgaggcttgtaggcccaagtctagagaggctgagtctggcaaagcctgaaagcccctgtcctagcaagccaggccacaggtctagagtatccgagaccagtgaataaggggacggggggtgctactgaggctgtgagaagccccaggaccagcccagggtagttagaactgagtgaggttagccgggactaacctcactcagatccctcctccccagttcccctccatccactttggtttggaagcctccccagagctctcccaggctgtcatcagctctaaactctctgcctccacaaaaatgccctgggcaacctgtaactcacagccctgctgtcttcagagtataaactggagacagatgtacccagaattgaggacgggtgggaaatgaggagaaatgaaggctgaggaggggtcattctcacagtccctccctttcggtcacaggagggtgttgcccatgcttttgggtgggtcccaggcccatagctgcaaatattcatattggctactcttcagtgagcaaggggtatatgccaggcactggcattgtgcttgacatacatcatcatactgagtcctcacggaagatgtattattcccatttcacagaagatgaaactgaggcttgaggttaagtgatttgtccgtgaccacaaagagttttcgggactcaaacccagatctgtcactgggcaaggtggctcacacctataatcccagccctttgggagactgaggccagcagatctcctgtggccaggagttcaagcctggccaacaatggcaaaaccccgtctctaccaaaaatacaaaaattagctgggcgtggtggcacacacccgtaatcccagctactcaggtggctgaggcaggagaatcacttgaacccaggaggtggtggttgcagtgagcctagatcgtgccactgcattccagcctgagcgacagagtaagactctgtctccaaaaaaaacccagatctgtccgactctgacacccaacctttaatcactcactttctgtcaatgtcacctccgttttgaccagccaagctagacctccctggagcctgtggagaagccaaggtagaaaagggttggaaaagaatgataaaataggccaggtgcggtggctcaagcctgtactcccagcacttttggaggccgagacaggcagattgcttgagcccaggagttcaagaccagcctgggcaacataatgagaccctgtttcaacttaaaaaaaagaaatggtaatgaacaattgtcaattctgagcagctgggtatggtatgaccctgtgtactttttctgtattttaaaatgttctcaaaataaaacttgttt

SEQ ID NO: 1014 - DNA, 6263 bp, Homo sapiens
gttgatgccggcccaggatggatcagacctgtgaactacccagaagaaattgtctgctgcccttttccaatccagtgaatttagatgcccctgaagacaaggacagccctttcggtaatggtcaatccaatttttctgagccacttaatgggtgtactatgcagttatcgactgtcagtggaacatcccaaaatgcttatggacaagattctccatcttgttacattccactgcggagactacaggatttggcctccatgatcaatgtagagtatttaaatgggtctgctgatggatcagaatcctttcaagaccctgaaaaaagtgattcaagagctcagacgccaattgtttgcacttccttgagtcctggtggtcctacagcacttgctatgaaacaggaaccctcttgtaataactcccctgaactccaggtaaaagtaacaaagactatcaagaatggctttctgcactttgagaattttacttgtgtggacgatgcagatgtagattctgaaatggacccagaacagccagtcacagaggatgagagtatagaggagatctttgaggaaactcagaccaatgccacctgcaattatgagactaaatcagagaatggtgtaaaagtggccatgggaagtgaacaagacagcacaccagagagtagacacggtgcagtcaaatcgccattcttgccattagctcctcagactgaaacacagaaaaataagcaaagaaatgaagtggacggcagcaatgaaaaagcagcccttctcccagcccccttttcactaggagacacaaacattacaatagaagagcaattaaactcaataaatttatcttttcaggatgatccagattccagtaccagtacattaggaaacatgctagaattacctggaacttcatcatcatctacttcacaggaattgccatttgttcctcagaaaattttgagtaaatgggaagccagtgttggacttgcagaacagtatgatgttcccaaggggtcaaagaaccgaaaatgtattcctggttcaatcaagttggacagtgaagaagatatgccatttgaagactgcacaaatgatcctgagtcagaacatgacctgttgcttaatggctgtttgaaatcactggcttttgattctgaacattctgcagatgagaaggaaaagccttgcgctaaatctcgagccagaaagagctctgataatccaaaaaggactagtgtgaaaaagggccacatacaatttgaagcacataaagatgaacggaggggaaagattccagagaaccttggcctaaactttatctctggggatatatctgatacgcaggcctctaatgaactttccaggatagcaaatagcctcacagggtccaacactgccccaggaagttttctgttttcttcctgtggaaaaaacactgcaaagaaagaatttgagacttcaaatggtgactctttattgggcttgcctgagggtgctttgatctcaaagtgttctcgagagaagaataaaccccaacgaagcctggtgtgtggttcaaaagtgaagctctgctatattggagcaggtgatgaggaaaagcgaagtgattccattagtatctgtaccacttctgatgatggaagcagtgacctggatcccatagaacacagctcagagtctgataacagtgtccttgaaattccagatgctttcgatagaacagagaacatgttatctatgcagaaaaatgaaaagataaagtattctaggtttgctgccacaaacactagggtaaaagcaaaacagaagcctctcattagtaactcacatacagaccacttaatgggttgtactaagagtgcagagcctggaaccgagacgtctcaggttaatctctctgatctgaaggcatctactcttgttcacaaaccccagtcagattttacaaatgatgctctctctccaaaattcaacctgtcatcaagcatatccagtgagaactcgttaataaagggtggggcagcaaatcaagctctattacattcgaaaagcaaacagcccaagttccgaagtataaagtgcaaacacaaagaaaatccagttatggcagaacccccagttataaatgaggagtgcagtttgaaatgctgctcttctgataccaaaggctctcctttggccagcatttctaaaagtgggaaagtggatggtctaaaactactgaacaatatgcatgagaaaaccagggattcaagtgacatagaaacagcagtggtgaaacatgttttatccgagttgaaggaactctcttacagatccttaggtgaggatgtcagtgactctggaacatcaaagccatcaaaaccattacttttctcttctgcttctagtcagaatcacatacctattgaaccagactacaaattcagtacattgctaatgatgttgaaagatatgcatgatagtaagacgaaggagcagcggttgatgactgctcaaaacctggtctcttaccggagtcctggtcgtggggactgttctactaatagtcctgtaggagtctctaaggttttggtttcaggaggctccacacacaattcagagaaaaagggagatggcactcagaactccgccaatcctagccctagtgggggtgactctgcattatctggcgagttgtctgcttccctacctggcttactgtccgacaagagagacctccctgcttctggtaaaagtcgttcagactgtgttactaggcgcaactgtggacgatcaaagccttcatccaaattgcgagatgctttttcagcccaaatggtaaagaacacagtgaaccgtaaagccttaaagaccgagcgcaaaagaaaactgaatcagcttccaagtgtgactcttgatgctgtactgcagggagaccgagaacgtggaggttcattgagaggtggggcagaagatcctagtaaagaggatccccttcagataatgggccacttaacaagtgaagatggtgaccatttttctgatgtgcatttcgatagcaaggttaagcaatctgatcctggtaaaatttctgaaaaaggactctcttttgaaaacggaaaaggcccagagctggactctgtaatgaacagtgagaatgatgaactcaatggtgtaaatcaagtggtgcctaaaaagcggtggcagcgtttaaaccaaaggcgcactaaacctcgtaagcgcatgaacagatttaaagagaaagaaaactctgagtgtgcctttagggtcttacttcctagtgaccctgtgcaggaggggcgggatgagtttccagagcatagaactccttcagcaagcatacttgaggaaccactgacagagcaaaatcatgctgactgcttagattcagctgggccacggttaaatgtttgtgataaatccagtgccagcattggtgacatggaaaaggagccaggaattcccagtttgacaccacaggctgagctccctgaaccagtggagcacatgatccagaagaaccaatgtctcttcaccaacacccagtgtaaggtttgctgcgccttgcttatttctgagtcccagaagctggcacattaccagagcagcagaagcaaagacaagaaccagtgctgccccatctgtaacatgaccttttcctcccctgtcgtggcccagtcgcactacctggggaagacccacgcaaagaacttaaagctgaagcagcagtccactaaggtggaagccttgcaccagaatagagagatgatagacccagacaagttctgcagcctctgccatgcaactttcaacgaccctgtcatggctcaacaacattatgtgggcaagaaacacagaaaacaggagaccaagctcaaactaatggcacgctatgggcggctggcggaccctgctgtcactgactttccagctggaaagggctacccctgcaaaacatgtaagatagtgctgaactccatagaacagtaccaagctcatgtcagcggcttcaaacacaagaaccagtcaccaaaaacagtggcatcatccctgggccagattccaatgcaaaggcaacccattcagaaagactcaaccaccttggaagactagaggtgattctgcccagcatcccatattgggccagccatgagccagcttcccgtgactgctcagcccttggctccctcttgctcgttgttctcaccaggaaagtacacgggcctgaggcaggattgggccacagacagcctctcattggtccgggctaattcactcctgctgctcccctttggcaggggtcctgtaggtcatgacaggggaggcaagggtattgagagactcggggtctcgcggggtggtagtttggagggtggctttccccatttcccaacccctctgggccttaggtgctgaggcccctgccacctgtctttcctctaaaggtcagttttgggccagttcttgcaactaaagagcagagatctctctgggccctagacatttccagcaaaacctggaactttcatgccaaacctggggcagggcaggaaacagaggaaatggctgcaacatgggagcttggagctaatacgacactctgccttcccccagaaggtgcaggctttcctgagtcttagaccagatatggccagttgcgcaggtttctgccaactgtgaagtatcctcctggagcagtgacacaatcttggcggagcattgctacccccgctgccccctccacagttcctgaatggtgctaaggatctgcagcagttggcaacgagctggggctgggggcggcctccatgtccactgagatcataggacactccaatggggatgggacctttcccctcctccatcagaggtgctctgaccctaggttacacgggaaagtgccccacatgcaagtctccctgagggttctgcccctaaaggcagactgcctcatgcccgctagctgtgaggttcattgctaccctcggccctactagccctctcttcccccttgtgcagcggaccacttgcccagtttgctgtggtgctagccttccccatcatccaccgggtgatttctgggtcccagggaaagaaagagagagctgatgcaggtttctacagtgaggaacaggcgtttcccaggccccacacccagatttctctatctttgctgtgttttatggcctgggactgagtccacacggatagatttttccttgtaaccttgagacgagaattccaaggagtgtcaccatcagaggcttctcttcattgtgtcaaagaagcccctagctgctctcgtggcctccttcccccactccctatcccttcacctgtgaaatgcctttgctttgcatattgtgtgtggatgtgtgtgtgtgtgtgtgtgtgtttgtgtgtatgtgtgtgcttctgtgtgtgcctaatgctctgtctcttggtcactgaagcatccaaataaagaatttccctcatgggccagactacaacttaacagacctagggttttgagccatattgccattggatctagtatgtctgtcttgacccctcacccccaccccattcagacctcagtagtccccagtagtcactttaggagttgggacagagtcgagcaccctgtgaaagtctcccttgagttcaggtgccctgaactcagtacagcctcatcttctcatccaccaccttctcctgcttctcctgtcacatagggcctcatgaaggtctttaaagggtttaagctggggatctgctttatgtttgagagaactgttctggctgttatgtaaaggagtgcagggaggggcaggaaaggagacaaggaggccagtatggacactgtgtccagtatggctttccaggctaatcacttagggcagagacccagccttattcatctctacttcctgatgtccatagtggtgtgtcatgaatttttattgaatgaacaaatgaggtgtatgaggagagatggttttctcctgctcagctcttacacagtgataggtttgttccatgggacttatcataggcctggtgattcttgaaagagcatttttcatgactcaaaaatgagctgagaaggagtgttatggccaggtgcggcgtcatgcacctatagtcccagctgctcaggaggctaaggcagaaagaccattcaagcccaggagttccagcctgaagtatgctgtgatcatgcctgtgaataaccactgcactccagccagggcaacataacaagactctatctaa

SEQ ID NO: 1015 - DNA, 6454 bp, Homo sapiens
gacgcggggggaggggggtgcggcgagcggccccgctctctccccaccgctccgctcgcaccccagtgtaatgagggtcaccccctccccccagctggcccgggagggggcgcggggcacggttgatgccggcccaggatggatcagacctgtgaactacccagaagaaattgtctgctgcccttttccaatccagtgaatttagatgcccctgaagacaaggacagccctttcggtaatggtcaatccaatttttctgagccacttaatgggtgtactatgcagttatcgactgtcagtggaacatcccaaaatgcttatggacaagattctccatcttgttacattccactgcggagactacaggatttggcctccatgatcaatgtagagtatttaaatgggtctgctgatggatcagaatcctttcaagaccctgaaaaaagtgattcaagagctcagacgccaattgtttgcacttccttgagtcctggtggtcctacagcacttgctatgaaacaggaaccctcttgtaataactcccctgaactccaggtaaaagtaacaaagactatcaagaatggctttctgcactttgagaattttacttgtgtggacgatgcagatgtagattctgaaatggacccagaacagccagtcacagaggatgagagtatagaggagatctttgaggaaactcagaccaatgccacctgcaattatgagactaaatcagagaatggtgtaaaagtggccatgggaagtgaacaagacagcacaccagagagtagacacggtgcagtcaaatcgccattcttgccattagctcctcagactgaaacacagaaaaataagcaaagaaatgaagtggacggcagcaatgaaaaagcagcccttctcccagcccccttttcactaggagacacaaacattacaatagaagagcaattaaactcaataaatttatcttttcaggatgatccagattccagtaccagtacattaggaaacatgctagaattacctggaacttcatcatcatctacttcacaggaattgccattttgtcaacctaagaaaaagtctacgccactgaagtatgaagttggagatctcatctgggcaaaattcaagagacgcccatggtggccctgcaggatttgttctgatccgttgattaacacacattcaaaaatgaaagtttccaaccggaggccctatcggcagtactacgtggaggcttttggagatccttctgagagagcctgggtggctggaaaagcaatcgtcatgtttgaaggcagacatcaattcgaagagctacctgtccttaggagaagagggaaacagaaagaaaaaggatataggcataaggttcctcagaaaattttgagtaaatgggaagccagtgttggacttgcagaacagtatgatgttcccaaggggtcaaagaaccgaaaatgtattcctggttcaatcaagttggacagtgaagaagatatgccatttgaagactgcacaaatgatcctgagtcagaacatgacctgttgcttaatggctgtttgaaatcactggcttttgattctgaacattctgcagatgagaaggaaaagccttgcgctaaatctcgagccagaaagagctctgataatccaaaaaggactagtgtgaaaaagggccacatacaatttgaagcacataaagatgaacggaggggaaagattccagagaaccttggcctaaactttatctctggggatatatctgatacgcaggcctctaatgaactttccaggatagcaaatagcctcacagggtccaacactgccccaggaagttttctgttttcttcctgtggaaaaaacactgcaaagaaagaatttgagacttcaaatggtgactctttattgggcttgcctgagggtgctttgatctcaaagtgttctcgagagaagaataaaccccaacgaagcctggtgtgtggttcaaaagtgaagctctgctatattggagcaggtgatgaggaaaagcgaagtgattccattagtatctgtaccacttctgatgatggaagcagtgacctggatcccatagaacacagctcagagtctgataacagtgtccttgaaattccagatgctttcgatagaacagagaacatgttatctatgcagaaaaatgaaaagataaagtattctaggtttgctgccacaaacactagggtaaaagcaaaacagaagcctctcattagtaactcacatacagaccacttaatgggttgtactaagagtgcagagcctggaaccgagacgtctcaggttaatctctctgatctgaaggcatctactcttgttcacaaaccccagtcagattttacaaatgatgctctctctccaaaattcaacctgtcatcaagcatatccagtgagaactcgttaataaagggtggggcagcaaatcaagctctattacattcgaaaagcaaacagcccaagttccgaagtataaagtgcaaacacaaagaaaatccagttatggcagaacccccagttataaatgaggagtgcagtttgaaatgctgctcttctgataccaaaggctctcctttggccagcatttctaaaagtgggaaagtggatggtctaaaactactgaacaatatgcatgagaaaaccagggattcaagtgacatagaaacagcagtggtgaaacatgttttatccgagttgaaggaactctcttacagatccttaggtgaggatgtcagtgactctggaacatcaaagccatcaaaaccattacttttctcttctgcttctagtcagaatcacatacctattgaaccagactacaaattcagtacattgctaatgatgttgaaagatatgcatgatagtaagacgaaggagcagcggttgatgactgctcaaaacctggtctcttaccggagtcctggtcgtggggactgttctactaatagtcctgtaggagtctctaaggttttggtttcaggaggctccacacacaattcagagaaaaagggagatggcactcagaactccgccaatcctagccctagtgggggtgactctgcattatctggcgagttgtctgcttccctacctggcttactgtccgacaagagagacctccctgcttctggtaaaagtcgttcagactgtgttactaggcgcaactgtggacgatcaaagccttcatccaaattgcgagatgctttttcagcccaaatggtaaagaacacagtgaaccgtaaagccttaaagaccgagcgcaaaagaaaactgaatcagcttccaagtgtgactcttgatgctgtactgcagggagaccgagaacgtggaggttcattgagaggtggggcagaagatcctagtaaagaggatccccttcagataatgggccacttaacaagtgaagatggtgaccatttttctgatgtgcatttcgatagcaaggttaagcaatctgatcctggtaaaatttctgaaaaaggactctcttttgaaaacggaaaaggcccagagctggactctgtaatgaacagtgagaatgatgaactcaatggtgtaaatcaagtggtgcctaaaaagcggtggcagcgtttaaaccaaaggcgcactaaacctcgtaagcgcatgaacagatttaaagagaaagaaaactctgagtgtgcctttagggtcttacttcctagtgaccctgtgcaggaggggcgggatgagtttccagagcatagaactccttcagcaagcatacttgaggaaccactgacagagcaaaatcatgctgactgcttagattcagctgggccacggttaaatgtttgtgataaatccagtgccagcattggtgacatggaaaaggagccaggaattcccagtttgacaccacaggctgagctccctgaaccagtggagcacatgatccagaagaaccaatgtctcttcaccaacacccagtgtaaggtttgctgcgccttgcttatttctgagtcccagaagctggcacattaccagagcaaaaaacatgccaacaaagtgaagagatacctagcaatccatggaatggagacattaaagggggaaacgaagaagctagactcagatcagaagagcagcagaagcaaagacaagaaccagtgctgccccatctgtaacatgaccttttcctcccctgtcgtggcccagtcgcactacctggggaagacccacgcaaagaacttaaagctgaagcagcagtccactaaggtggaagccttgcaccagaatagagagatgatagacccagacaagttctgcagcctctgccatgcaactttcaacgaccctgtcatggctcaacaacattatgtgggcaagaaacacagaaaacaggagaccaagctcaaactaatggcacgctatgggcggctggcggaccctgctgtcactgactttccagctggaaagggctacccctgcaaaacatgtaagatagtgctgaactccatagaacagtaccaagctcatgtcagcggcttcaaacacaagaaccagtcaccaaaaacagtggcatcatccctgggccagattccaatgcaaaggcaacccattcagaaagactcaaccaccttggaagactagagctaggggtggccgtgtcacagtctggccaaggaaatgaaattgggagttgctgtgtggaaactcaactctctggaacttcttccttcctcctgcctctgcacaaatgtgacggcagcagctgaagccaacatcttgcgaccatgagagaaaaacctggagaacggacgagtcctcaaccctgacttcagaccaacctacacccacctctggacgtggggctaagtgagagatggatacactgtttcatttaggccctgctcacttaggtttctgttattcacaccccaacgaaaccctccatggtccagggcaccgggcaaagtacagaagggcacgagtttacttcccgcttccctggagaccaccaaccctctcacccttccagcccagcctctgccacttcccagctgtcggtcctcctccaaacagacgtgcatgccaacacccggtgggtgtgaggcttgtaggcccaagtctagagaggctgagtctggcaaagcctgaaagcccctgtcctagcaagccaggccacaggtctagagtatccgagaccagtgaataaggggacggggggtgctactgaggctgtgagaagccccaggaccagcccagggtagttagaactgagtgaggttagccgggactaacctcactcagatccctcctccccagttcccctccatccactttggtttggaagcctccccagagctctcccaggctgtcatcagctctaaactctctgcctccacaaaaatgccctgggcaacctgtaactcacagccctgctgtcttcagagtataaactggagacagatgtacccagaattgaggacgggtgggaaatgaggagaaatgaaggctgaggaggggtcattctcacagtccctccctttcggtcacaggagggtgttgcccatgcttttgggtgggtcccaggcccatagctgcaaatattcatattggctactcttcagtgagcaaggggtatatgccaggcactggcattgtgcttgacatacatcatcatactgagtcctcacggaagatgtattattcccatttcacagaagatgaaactgaggcttgaggttaagtgatttgtccgtgaccacaaagagttttcgggactcaaacccagatctgtcactgggcaaggtggctcacacctataatcccagccctttgggagactgaggccagcagatctcctgtggccaggagttcaagcctggccaacaatggcaaaaccccgtctctaccaaaaatacaaaaattagctgggcgtggtggcacacacccgtaatcccagctactcaggtggctgaggcaggagaatcacttgaacccaggaggtggtggttgcagtgagcctagatcgtgccactgcattccagcctgagcgacagagtaagactctgtctccaaaaaaaacccagatctgtccgactctgacacccaacctttaatcactcactttctgtcaatgtcacctccgttttgaccagccaagctagacctccctggagcctgtggagaagccaaggtagaaaagggttggaaaagaatgataaaataggccaggtgcggtggctcaagcctgtactcccagcacttttggaggccgagacaggcagattgcttgagcccaggagttcaagaccagcctgggcaacataatgagaccctgtttcaacttaaaaaaaagaaatggtaatgaacaattgtcaattctgagcagctgggtatggtatgaccctgtgtactttttctgtattttaaaatgttctcaaaataaaacttgttt

SEQ ID NO: 1016 - DNA, 2936 bp, Homo sapiens
ggccgggtagggggttcgcctgcggccgcgtctgctcggggcctgaggcctcgaagaccccagcccaagcccccaggttgatgccggcccaggatggatcagacctgtgaactacccagaagaaattgtctgctgcccttttccaatccagtgaatttagatgcccctgaagacaaggacagccctttcggatgatccagattccagtaccagtacattaggaaacatgctagaattacctggaacttcatcatcatctacttcacaggaattgccattttgtcaacctaagaaaaagtctacgccactgaagtatgaagttggagatctcatctgggcaaaattcaagagacgcccatggtggccctgcaggatttgttctgatccgttgattaacacacattcaaaaatgaaagtggagcacatgatccagaagaaccaatgtctcttcaccaacacccagtgtaaggtttgctgcgccttgcttatttctgagtcccagaagctggcacattaccagagcaaaaaacatgccaacaaagtgaagagatacctagcaatccatggaatggagacattaaagggggaaacgaagaagctagactcagatcagaagagcagcagaagcaaagacaagaaccagtgctgccccatctgtaacatgaccttttcctcccctgtcgtggcccagtcgcactacctggggaagacccacgcaaagaacttaaagctgaagcagcagtccactaaggtggaagccttgcaccagaatagagagatgatagacccagacaagttctgcagcctctgccatgcaactttcaacgaccctgtcatggctcaacaacattatgtgggcaagaaacacagaaaacaggagaccaagctcaaactaatggcacgctatgggcggctggcggaccctgctgtcactgactttccagctggaaagggctacccctgcaaaacatgtaagatagtgctgaactccatagaacagtaccaagctcatgtcagcggcttcaaacacaagaaccagtcaccaaaaacagtggcatcatccctgggccagattccaatgcaaaggcaacccattcagaaagactcaaccaccttggaagactagagctaggggtggccgtgtcacagtctggccaaggaaatgaaattgggagttgctgtgtggaaactcaactctctggaacttcttccttcctcctgcctctgcacaaatgtgacggcagcagctgaagccaacatcttgcgaccatgagagaaaaacctggagaacggacgagtcctcaaccctgacttcagaccaacctacacccacctctggacgtggggctaagtgagagatggatacactgtttcatttaggccctgctcacttaggtttctgttattcacaccccaacgaaaccctccatggtccagggcaccgggcaaagtacagaagggcacgagtttacttcccgcttccctggagaccaccaaccctctcacccttccagcccagcctctgccacttcccagctgtcggtcctcctccaaacagacgtgcatgccaacacccggtgggtgtgaggcttgtaggcccaagtctagagaggctgagtctggcaaagcctgaaagcccctgtcctagcaagccaggccacaggtctagagtatccgagaccagtgaataaggggacggggggtgctactgaggctgtgagaagccccaggaccagcccagggtagttagaactgagtgaggttagccgggactaacctcactcagatccctcctccccagttcccctccatccactttggtttggaagcctccccagagctctcccaggctgtcatcagctctaaactctctgcctccacaaaaatgccctgggcaacctgtaactcacagccctgctgtcttcagagtataaactggagacagatgtacccagaattgaggacgggtgggaaatgaggagaaatgaaggctgaggaggggtcattctcacagtccctccctttcggtcacaggagggtgttgcccatgcttttgggtgggtcccaggcccatagctgcaaatattcatattggctactcttcagtgagcaaggggtatatgccaggcactggcattgtgcttgacatacatcatcatactgagtcctcacggaagatgtattattcccatttcacagaagatgaaactgaggcttgaggttaagtgatttgtccgtgaccacaaagagttttcgggactcaaacccagatctgtcactgggcaaggtggctcacacctataatcccagccctttgggagactgaggccagcagatctcctgtggccaggagttcaagcctggccaacaatggcaaaaccccgtctctaccaaaaatacaaaaattagctgggcgtggtggcacacacccgtaatcccagctactcaggtggctgaggcaggagaatcacttgaacccaggaggtggtggttgcagtgagcctagatcgtgccactgcattccagcctgagcgacagagtaagactctgtctccaaaaaaaacccagatctgtccgactctgacacccaacctttaatcactcactttctgtcaatgtcacctccgttttgaccagccaagctagacctccctggagcctgtggagaagccaaggtagaaaagggttggaaaagaatgataaaataggccaggtgcggtggctcaagcctgtactcccagcacttttggaggccgagacaggcagattgcttgagcccaggagttcaagaccagcctgggcaacataatgagaccctgtttcaacttaaaaaaaagaaatggtaatgaacaattgtcaattctgagcagctgggtatggtatgaccctgtgtactttttctgtattttaaaatgttctcaaaataaaacttgttt

SEQ ID NO: 1017 - DNA, 5908 bp, Homo sapiens
ggccgggtagggggttcgcctgcggccgcgtctgctcggggcctgaggcctcgaagaccccagcccaagcccccaggttgatgccggcccaggatggatcagacctgtgaactacccagaagaaattgtctgctgcccttttccaatccagtgaatttagatgcccctgaagacaaggacagccctttcggatgatccagattccagtaccagtacattaggaaacatgctagaattacctggaacttcatcatcatctacttcacaggaattgccattttgtcaacctaagaaaaagtctacgccactgaagtatgaagttggagatctcatctgggcaaaattcaagagacgcccatggtggccctgcaggatttgttctgatccgttgattaacacacattcaaaaatgaaagtttccaaccggaggccctatcggcagtactacgtggaggcttttggagatccttctgagagagcctgggtggctggaaaagcaatcgtcatgtttgaaggcagacatcaattcgaagagctacctgtccttaggagaagagggaaacagaaagaaaaaggatataggcataaggttcctcagaaaattttgagtaaatgggaagccagtgttggacttgcagaacagtatgatgttcccaaggggtcaaagaaccgaaaatgtattcctggttcaatcaagttggacagtgaagaagatatgccatttgaagactgcacaaatgatcctgagtcagaacatgacctgttgcttaatggctgtttgaaatcactggcttttgattctgaacattctgcagatgagaaggaaaagccttgcgctaaatctcgagccagaaagagctctgataatccaaaaaggactagtgtgaaaaagggccacatacaatttgaagcacataaagatgaacggaggggaaagattccagagaaccttggcctaaactttatctctggggatatatctgatacgcaggcctctaatgaactttccaggatagcaaatagcctcacagggtccaacactgccccaggaagttttctgttttcttcctgtggaaaaaacactgcaaagaaagaatttgagacttcaaatggtgactctttattgggcttgcctgagggtgctttgatctcaaagtgttctcgagagaagaataaaccccaacgaagcctggtgtgtggttcaaaagtgaagctctgctatattggagcaggtgatgaggaaaagcgaagtgattccattagtatctgtaccacttctgatgatggaagcagtgacctggatcccatagaacacagctcagagtctgataacagtgtccttgaaattccagatgctttcgatagaacagagaacatgttatctatgcagaaaaatgaaaagataaagtattctaggtttgctgccacaaacactagggtaaaagcaaaacagaagcctctcattagtaactcacatacagaccacttaatgggttgtactaagagtgcagagcctggaaccgagacgtctcaggttaatctctctgatctgaaggcatctactcttgttcacaaaccccagtcagattttacaaatgatgctctctctccaaaattcaacctgtcatcaagcatatccagtgagaactcgttaataaagggtggggcagcaaatcaagctctattacattcgaaaagcaaacagcccaagttccgaagtataaagtgcaaacacaaagaaaatccagttatggcagaacccccagttataaatgaggagtgcagtttgaaatgctgctcttctgataccaaaggctctcctttggccagcatttctaaaagtgggaaagtggatggtctaaaactactgaacaatatgcatgagaaaaccagggattcaagtgacatagaaacagcagtggtgaaacatgttttatccgagttgaaggaactctcttacagatccttaggtgaggatgtcagtgactctggaacatcaaagccatcaaaaccattacttttctcttctgcttctagtcagaatcacatacctattgaaccagactacaaattcagtacattgctaatgatgttgaaagatatgcatgatagtaagacgaaggagcagcggttgatgactgctcaaaacctggtctcttaccggagtcctggtcgtggggactgttctactaatagtcctgtaggagtctctaaggttttggtttcaggaggctccacacacaattcagagaaaaagggagatggcactcagaactccgccaatcctagccctagtgggggtgactctgcattatctggcgagttgtctgcttccctacctggcttactgtccgacaagagagacctccctgcttctggtaaaagtcgttcagactgtgttactaggcgcaactgtggacgatcaaagccttcatccaaattgcgagatgctttttcagcccaaatggtaaagaacacagtgaaccgtaaagccttaaagaccgagcgcaaaagaaaactgaatcagcttccaagtgtgactcttgatgctgtactgcagggagaccgagaacgtggaggttcattgagaggtggggcagaagatcctagtaaagaggatccccttcagataatgggccacttaacaagtgaagatggtgaccatttttctgatgtgcatttcgatagcaaggttaagcaatctgatcctggtaaaatttctgaaaaaggactctcttttgaaaacggaaaaggcccagagctggactctgtaatgaacagtgagaatgatgaactcaatggtgtaaatcaagtggtgcctaaaaagcggtggcagcgtttaaaccaaaggcgcactaaacctcgtaagcgcatgaacagatttaaagagaaagaaaactctgagtgtgcctttagggtcttacttcctagtgaccctgtgcaggaggggcgggatgagtttccagagcatagaactccttcagcaagcatacttgaggaaccactgacagagcaaaatcatgctgactgcttagattcagctgggccacggttaaatgtttgtgataaatccagtgccagcattggtgacatggaaaaggagccaggaattcccagtttgacaccacaggctgagctccctgaaccagtggagcacatgatccagaagaaccaatgtctcttcaccaacacccagtgtaaggtttgctgcgccttgcttatttctgagtcccagaagctggcacattaccagagcagcagaagcaaagacaagaaccagtgctgccccatctgtaacatgaccttttcctcccctgtcgtggcccagtcgcactacctggggaagacccacgcaaagaacttaaagctgaagcagcagtccactaaggtggaagccttgcaccagaatagagagatgatagacccagacaagttctgcagcctctgccatgcaactttcaacgaccctgtcatggctcaacaacattatgtgggcaagaaacacagaaaacaggagaccaagctcaaactaatggcacgctatgggcggctggcggaccctgctgtcactgactttccagctggaaagggctacccctgcaaaacatgtaagatagtgctgaactccatagaacagtaccaagctcatgtcagcggcttcaaacacaagaaccagtcaccaaaaacagtggcatcatccctgggccagattccaatgcaaaggcaacccattcagaaagactcaaccaccttggaagactagaggtgattctgcccagcatcccatattgggccagccatgagccagcttcccgtgactgctcagcccttggctccctcttgctcgttgttctcaccaggaaagtacacgggcctgaggcaggattgggccacagacagcctctcattggtccgggctaattcactcctgctgctcccctttggcaggggtcctgtaggtcatgacaggggaggcaagggtattgagagactcggggtctcgcggggtggtagtttggagggtggctttccccatttcccaacccctctgggccttaggtgctgaggcccctgccacctgtctttcctctaaaggtcagttttgggccagttcttgcaactaaagagcagagatctctctgggccctagacatttccagcaaaacctggaactttcatgccaaacctggggcagggcaggaaacagaggaaatggctgcaacatgggagcttggagctaatacgacactctgccttcccccagaaggtgcaggctttcctgagtcttagaccagatatggccagttgcgcaggtttctgccaactgtgaagtatcctcctggagcagtgacacaatcttggcggagcattgctacccccgctgccccctccacagttcctgaatggtgctaaggatctgcagcagttggcaacgagctggggctgggggcggcctccatgtccactgagatcataggacactccaatggggatgggacctttcccctcctccatcagaggtgctctgaccctaggttacacgggaaagtgccccacatgcaagtctccctgagggttctgcccctaaaggcagactgcctcatgcccgctagctgtgaggttcattgctaccctcggccctactagccctctcttcccccttgtgcagcggaccacttgcccagtttgctgtggtgctagccttccccatcatccaccgggtgatttctgggtcccagggaaagaaagagagagctgatgcaggtttctacagtgaggaacaggcgtttcccaggccccacacccagatttctctatctttgctgtgttttatggcctgggactgagtccacacggatagatttttccttgtaaccttgagacgagaattccaaggagtgtcaccatcagaggcttctcttcattgtgtcaaagaagcccctagctgctctcgtggcctccttcccccactccctatcccttcacctgtgaaatgcctttgctttgcatattgtgtgtggatgtgtgtgtgtgtgtgtgtgtgtttgtgtgtatgtgtgtgcttctgtgtgtgcctaatgctctgtctcttggtcactgaagcatccaaataaagaatttccctcatgggccagactacaacttaacagacctagggttttgagccatattgccattggatctagtatgtctgtcttgacccctcacccccaccccattcagacctcagtagtccccagtagtcactttaggagttgggacagagtcgagcaccctgtgaaagtctcccttgagttcaggtgccctgaactcagtacagcctcatcttctcatccaccaccttctcctgcttctcctgtcacatagggcctcatgaaggtctttaaagggtttaagctggggatctgctttatgtttgagagaactgttctggctgttatgtaaaggagtgcagggaggggcaggaaaggagacaaggaggccagtatggacactgtgtccagtatggctttccaggctaatcacttagggcagagacccagccttattcatctctacttcctgatgtccatagtggtgtgtcatgaatttttattgaatgaacaaatgaggtgtatgaggagagatggttttctcctgctcagctcttacacagtgataggtttgttccatgggacttatcataggcctggtgattcttgaaagagcatttttcatgactcaaaaatgagctgagaaggagtgttatggccaggtgcggcgtcatgcacctatagtcccagctgctcaggaggctaaggcagaaagaccattcaagcccaggagttccagcctgaagtatgctgtgatcatgcctgtgaataaccactgcactccagccagggcaacataacaagactctatctaa

SEQ ID NO: 1018 - DNA, 6917 bp, Homo sapiens
gttgatgccggcccaggatggatcagacctgtgaactacccagaagaaattgtctgctgcccttttccaatccagtgaatttagatgcccctgaagacaaggacagccctttcggatgatccagattccagtaccagtacattaggaaacatgctagaattacctggaacttcatcatcatctacttcacaggaattgccatttctggaatctcactccgttgcccaggctggaatgcagtggtaagatcttggctcactgcaacctccgcctcccaggttcaagcgattcttctgcctcaacctcccaagtagctgggattacaggcacacaccaccatgctcggctaatctttgtatttttagtagagatggggtttcaccatgtttgccaggctggtcttgaactcctgacctccagtgattctcccaccttggcctcccaaagtgctgggattacaggcatgagccaccgcacccagcctgtgacttaacctttttgagcctcagtttctttatctgcaaaatcgagataatgctgtcttgtaaggttgtgagggtgtcaacctaagaaaaagtctacgccactgaagtatgaagttggagatctcatctgggcaaaattcaagagacgcccatggtggccctgcaggatttgttctgatccgttgattaacacacattcaaaaatgaaagtttccaaccggaggccctatcggcagtactacgtggaggcttttggagatccttctgagagagcctgggtggctggaaaagcaatcgtcatgtttgaaggcagacatcaattcgaagagctacctgtccttaggagaagagggaaacagaaagaaaaaggatataggcataaggttcctcagaaaattttgagtaaatgggaagccagtgttggacttgcagaacagtatgatgttcccaaggggtcaaagaaccgaaaatgtattcctggttcaatcaagttggacagtgaagaagatatgccatttgaagactgcacaaatgatcctgagtcagaacatgacctgttgcttaatggctgtttgaaatcactggcttttgattctgaacattctgcagatgagaaggaaaagccttgcgctaaatctcgagccagaaagagctctgataatccaaaaaggactagtgtgaaaaagggccacatacaatttgaagcacataaagatgaacggaggggaaagattccagagaaccttggcctaaactttatctctggggatatatctgatacgcaggcctctaatgaactttccaggatagcaaatagcctcacagggtccaacactgccccaggaagttttctgttttcttcctgtggaaaaaacactgcaaagaaagaatttgagacttcaaatggtgactctttattgggcttgcctgagggtgctttgatctcaaagtgttctcgagagaagaataaaccccaacgaagcctggtgtgtggttcaaaagtgaagctctgctatattggagcaggtgatgaggaaaagcgaagtgattccattagtatctgtaccacttctgatgatggaagcagtgacctggatcccatagaacacagctcagagtctgataacagtgtccttgaaattccagatgctttcgatagaacagagaacatgttatctatgcagaaaaatgaaaagataaagtattctaggtttgctgccacaaacactagggtaaaagcaaaacagaagcctctcattagtaactcacatacagaccacttaatgggttgtactaagagtgcagagcctggaaccgagacgtctcaggttaatctctctgatctgaaggcatctactcttgttcacaaaccccagtcagattttacaaatgatgctctctctccaaaattcaacctgtcatcaagcatatccagtgagaactcgttaataaagggtggggcagcaaatcaagctctattacattcgaaaagcaaacagcccaagttccgaagtataaagtgcaaacacaaagaaaatccagttatggcagaacccccagttataaatgaggagtgcagtttgaaatgctgctcttctgataccaaaggctctcctttggccagcatttctaaaagtgggaaagtggatggtctaaaactactgaacaatatgcatgagaaaaccagggattcaagtgacatagaaacagcagtggtgaaacatgttttatccgagttgaaggaactctcttacagatccttaggtgaggatgtcagtgactctggaacatcaaagccatcaaaaccattacttttctcttctgcttctagtcagaatcacatacctattgaaccagactacaaattcagtacattgctaatgatgttgaaagatatgcatgatagtaagacgaaggagcagcggttgatgactgctcaaaacctggtctcttaccggagtcctggtcgtggggactgttctactaatagtcctgtaggagtctctaaggttttggtttcaggaggctccacacacaattcagagaaaaagggagatggcactcagaactccgccaatcctagccctagtgggggtgactctgcattatctggcgagttgtctgcttccctacctggcttactgtccgacaagagagacctccctgcttctggtaaaagtcgttcagactgtgttactaggcgcaactgtggacgatcaaagccttcatccaaattgcgagatgctttttcagcccaaatggtaaagaacacagtgaaccgtaaagccttaaagaccgagcgcaaaagaaaactgaatcagcttccaagtgtgactcttgatgctgtactgcagggagaccgagaacgtggaggttcattgagaggtggggcagaagatcctagtaaagaggatccccttcagataatgggccacttaacaagtgaagatggtgaccatttttctgatgtgcatttcgatagcaaggttaagcaatctgatcctggtaaaatttctgaaaaaggactctcttttgaaaacggaaaaggcccagagctggactctgtaatgaacagtgagaatgatgaactcaatggtgtaaatcaagtggtgcctaaaaagcggtggcagcgtttaaaccaaaggcgcactaaacctcgtaagcgcatgaacagatttaaagagaaagaaaactctgagtgtgcctttagggtcttacttcctagtgaccctgtgcaggaggggcgggatgagtttccagagcatagaactccttcagcaagcatacttgaggaaccactgacagagcaaaatcatgctgactgcttagattcagctgggccacggttaaatgtttgtgataaatccagtgccagcattggtgacatggaaaaggagccaggaattcccagtttgacaccacaggctgagctccctgaaccagctgtgcggtcagagaagaaacgccttaggaagccaagcaagtggcttttggaatatacagaagaatatgatcagatatttgctcctaagaaaaaacaaaagaaggtacaggagcaggtgcacaaggtaagttcccgctgtgaagaggaaagccttctagcccgaggtcgatctagtgctcagaacaagcaggtggacgagaattctttgatttcaaccaaagaagagcctccagttcttgaaagggaggctccgtttttggagggccccttggctcagtcagaacttggaggtggacatgctgagttgccgcagctgaccttgtctgtgcctgtggctccggaagtctctccacggcctgcccttgagtctgaggaattgctagttaaaacgccaggaaattatgaaagtaaacgtcaaagaaaaccaactaagaaacttcttgaatccaatgatttagaccctggatttatgcccaagaagggggaccttggcctttctaaaaagtgctatgaagctggtcacctggagaatggcataactgaatcttgtgccacatcttattcaaaagattttggtggaggcactaccaagatatttgacaagccaaggaagcgaaaacgacagaggcatgctgcagccaagatgcagtgtaaaaaagtgaaaaatgatgactcgtcaaaagagattccaggctcagagggagaactaatgcctcacaggacggccacaagccccaaggagactgttgaggaaggtgtagaacacgatcccgggatgcctgcctctaaaaaaatgcagggtgaacgcggtggaggagctgcactcaaggagaatgtctgtcagaattgtgaaaaattgggtgagctgctgttatgtgaggctcagtgctgtggggctttccacctggagtgccttggattgactgagatgccaagaggaaaatttatctgcaatgaatgtcgcacagtggagcacatgatccagaagaaccaatgtctcttcaccaacacccagtgtaaggtttgctgcgccttgcttatttctgagtcccagaagctggcacattaccagagcaaaaaacatgccaacaaagtgaagagatacctagcaatccatggaatggagacattaaagggggaaacgaagaagctagactcagatcagaagagcagcagaagcaaagacaagaaccagtgctgccccatctgtaacatgaccttttcctcccctgtcgtggcccagtcgcactacctggggaagacccacgcaaagaacttaaagctgaagcagcagtccactaaggtggaagccttgcaccagaatagagagatgatagacccagacaagttctgcagcctctgccatgcaactttcaacgaccctgtcatggctcaacaacattatgtgggcaagaaacacagaaaacaggagaccaagctcaaactaatggcacgctatgggcggctggcggaccctgctgtcactgactttccagctggaaagggctacccctgcaaaacatgtaagatagtgctgaactccatagaacagtaccaagctcatgtcagcggcttcaaacacaagaaccagtcaccaaaaacagtggcatcatccctgggccagattccaatgcaaaggcaacccattcagaaagactcaaccaccttggaagactagagctaggggtggccgtgtcacagtctggccaaggaaatgaaattgggagttgctgtgtggaaactcaactctctggaacttcttccttcctcctgcctctgcacaaatgtgacggcagcagctgaagccaacatcttgcgaccatgagagaaaaacctggagaacggacgagtcctcaaccctgacttcagaccaacctacacccacctctggacgtggggctaagtgagagatggatacactgtttcatttaggccctgctcacttaggtttctgttattcacaccccaacgaaaccctccatggtccagggcaccgggcaaagtacagaagggcacgagtttacttcccgcttccctggagaccaccaaccctctcacccttccagcccagcctctgccacttcccagctgtcggtcctcctccaaacagacgtgcatgccaacacccggtgggtgtgaggcttgtaggcccaagtctagagaggctgagtctggcaaagcctgaaagcccctgtcctagcaagccaggccacaggtctagagtatccgagaccagtgaataaggggacggggggtgctactgaggctgtgagaagccccaggaccagcccagggtagttagaactgagtgaggttagccgggactaacctcactcagatccctcctccccagttcccctccatccactttggtttggaagcctccccagagctctcccaggctgtcatcagctctaaactctctgcctccacaaaaatgccctgggcaacctgtaactcacagccctgctgtcttcagagtataaactggagacagatgtacccagaattgaggacgggtgggaaatgaggagaaatgaaggctgaggaggggtcattctcacagtccctccctttcggtcacaggagggtgttgcccatgcttttgggtgggtcccaggcccatagctgcaaatattcatattggctactcttcagtgagcaaggggtatatgccaggcactggcattgtgcttgacatacatcatcatactgagtcctcacggaagatgtattattcccatttcacagaagatgaaactgaggcttgaggttaagtgatttgtccgtgaccacaaagagttttcgggactcaaacccagatctgtcactgggcaaggtggctcacacctataatcccagccctttgggagactgaggccagcagatctcctgtggccaggagttcaagcctggccaacaatggcaaaaccccgtctctaccaaaaatacaaaaattagctgggcgtggtggcacacacccgtaatcccagctactcaggtggctgaggcaggagaatcacttgaacccaggaggtggtggttgcagtgagcctagatcgtgccactgcattccagcctgagcgacagagtaagactctgtctccaaaaaaaacccagatctgtccgactctgacacccaacctttaatcactcactttctgtcaatgtcacctccgttttgaccagccaagctagacctccctggagcctgtggagaagccaaggtagaaaagggttggaaaagaatgataaaataggccaggtgcggtggctcaagcctgtactcccagcacttttggaggccgagacaggcagattgcttgagcccaggagttcaagaccagcctgggcaacataatgagaccctgtttcaacttaaaaaaaagaaatggtaatgaacaattgtcaattctgagcagctgggtatggtatgaccctgtgtactttttctgtattttaaaatgttctcaaaataaaacttgttt

SEQ ID NO: 1019 - DNA, 5669 bp, Homo sapiens
ggccgggtagggggttcgcctgcggccgcgtctgctcggggcctgaggcctcgaagaccccagcccaagcccccaggttgatgccggcccaggatggatcagacctgtgaactacccagaagaaattgtctgctgcccttttccaatccagtgaatttagatgcccctgaagacaaggacagccctttcggatgatccagattccagtaccagtacattaggaaacatgctagaattacctggaacttcatcatcatctacttcacaggaattgccattttgtcaacctaagaaaaagtctacgccactgaagtatgaagttggagatctcatctgggcaaaattcaagagacgcccatggtggccctgcaggatttgttctgatccgttgattaacacacattcaaaaatgaaagtttccaaccggaggccctatcggcagtactacgtggaggcttttggagatccttctgagagagcctgggtggctggaaaagcaatcgtcatgtttgaaggcagacatcaattcgaagagctacctgtccttaggagaagagggaaacagaaagaaaaaggatataggcataaggttcctcagaaaattttgagtaaatgggaagccagtgttggacttgcagaacagtatgatgttcccaaggggtcaaagaaccgaaaatgtattcctggttcaatcaagttggacagtgaagaagatatgccatttgaagactgcacaaatgatcctgagtcagaacatgacctgttgcttaatggctgtttgaaatcactggcttttgattctgaacattctgcagatgagaaggaaaagccttgcgctaaatctcgagccagaaagagctctgataatccaaaaaggactagtgtgaaaaagggccacatacaatttgaagcacataaagatgaacggaggggaaagattccagagaaccttggcctaaactttatctctggggatatatctgatacgcaggcctctaatgaactttccaggatagcaaatagcctcacagggtccaacactgccccaggaagttttctgttttcttcctgtggaaaaaacactgcaaagaaagaatttgagacttcaaatggtgactctttattgggcttgcctgagggtgctttgatctcaaagtgttctcgagagaagaataaaccccaacgaagcctggtgtgtggttcaaaagtgaagctctgctatattggagcaggtgatgaggaaaagcgaagtgattccattagtatctgtaccacttctgatgatggaagcagtgacctggatcccatagaacacagctcagagtctgataacagtgtccttgaaattccagatgctttcgatagaacagagaacatgttatctatgcagaaaaatgaaaagataaagtattctaggtttgctgccacaaacactagggtaaaagcaaaacagaagcctctcattagtaactcacatacagaccacttaatgggttgtactaagagtgcagagcctggaaccgagacgtctcaggttaatctctctgatctgaaggcatctactcttgttcacaaaccccagtcagattttacaaatgatgctctctctccaaaattcaacctgtcatcaagcatatccagtgagaactcgttaataaagggtggggcagcaaatcaagctctattacattcgaaaagcaaacagcccaagttccgaagtataaagtgcaaacacaaagaaaatccagttatggcagaacccccagttataaatgaggagtgcagtttgaaatgctgctcttctgataccaaaggctctcctttggccagcatttctaaaagtgggaaagtggatggtctaaaactactgaacaatatgcatgagaaaaccagggattcaagtgacatagaaacagcagtggtgaaacatgttttatccgagttgaaggaactctcttacagatccttaggtgaggatgtcagtgactctggaacatcaaagccatcaaaaccattacttttctcttctgcttctagtcagaatcacatacctattgaaccagactacaaattcagtacattgctaatgatgttgaaagatatgcatgatagtaagacgaaggagcagcggttgatgactgctcaaaacctggtctcttaccggagtcctggtcgtggggactgttctactaatagtcctgtaggagtctctaaggttttggtttcaggaggctccacacacaattcagagaaaaagggagatggcactcagaactccgccaatcctagccctagtgggggtgactctgcattatctggcgagttgtctgcttccctacctggcttactgtccgacaagagagacctccctgcttctggtaaaagtcgttcagactgtgttactaggcgcaactgtggacgatcaaagccttcatccaaattgcgagatgctttttcagcccaaatggtaaagaacacagtgaaccgtaaagccttaaagaccgagcgcaaaagaaaactgaatcagcttccaagtgtgactcttgatgctgtactgcagggagaccgagaacgtggaggttcattgagaggtggggcagaagatcctagtaaagaggatccccttcagataatgggccacttaacaagtgaagatggtgaccatttttctgatgtgcatttcgatagcaaggttaagcaatctgatcctggtaaaatttctgaaaaaggactctcttttgaaaacggaaaaggcccagagctggactctgtaatgaacagtgagaatgatgaactcaatggtgtaaatcaagtggtgcctaaaaagcggtggcagcgtttaaaccaaaggcgcactaaacctcgtaagcgcatgaacagatttaaagagaaagaaaactctgagtgtgcctttagggtcttacttcctagtgaccctgtgcaggaggggcgggatgagtttccagagcatagaactccttcagcaagcatacttgaggaaccactgacagagcaaaatcatgctgactgcttagattcagctgggccacggttaaatgtttgtgataaatccagtgccagcattggtgacatggaaaaggagccaggaattcccagtttgacaccacaggctgagctccctgaaccagtggagcacatgatccagaagaaccaatgtctcttcaccaacacccagtgtaaggtttgctgcgccttgcttatttctgagtcccagaagctggcacattaccagagcaaaaaacatgccaacaaagtgaagagatacctagcaatccatggaatggagacattaaagggggaaacgaagaagctagactcagatcagaagagcagcagaagcaaagacaagaaccagtgctgccccatctgtaacatgaccttttcctcccctgtcgtggcccagtcgcactacctggggaagacccacgcaaagaacttaaagctgaagcagcagtccactaaggtggaagccttgcaccagaatagagagatgatagacccagacaagttctgcagcctctgccatgcaactttcaacgaccctgtcatggctcaacaacattatgtgggcaagaaacacagaaaacaggagaccaagctcaaactaatggcacgctatgggcggctggcggaccctgctgtcactgactttccagctggaaagggctacccctgcaaaacatgtaagatagtgctgaactccatagaacagtaccaagctcatgtcagcggcttcaaacacaagaaccagtcaccaaaaacagtggcatcatccctgggccagattccaatgcaaaggcaacccattcagaaagactcaaccaccttggaagactagagctaggggtggccgtgtcacagtctggccaaggaaatgaaattgggagttgctgtgtggaaactcaactctctggaacttcttccttcctcctgcctctgcacaaatgtgacggcagcagctgaagccaacatcttgcgaccatgagagaaaaacctggagaacggacgagtcctcaaccctgacttcagaccaacctacacccacctctggacgtggggctaagtgagagatggatacactgtttcatttaggccctgctcacttaggtttctgttattcacaccccaacgaaaccctccatggtccagggcaccgggcaaagtacagaagggcacgagtttacttcccgcttccctggagaccaccaaccctctcacccttccagcccagcctctgccacttcccagctgtcggtcctcctccaaacagacgtgcatgccaacacccggtgggtgtgaggcttgtaggcccaagtctagagaggctgagtctggcaaagcctgaaagcccctgtcctagcaagccaggccacaggtctagagtatccgagaccagtgaataaggggacggggggtgctactgaggctgtgagaagccccaggaccagcccagggtagttagaactgagtgaggttagccgggactaacctcactcagatccctcctccccagttcccctccatccactttggtttggaagcctccccagagctctcccaggctgtcatcagctctaaactctctgcctccacaaaaatgccctgggcaacctgtaactcacagccctgctgtcttcagagtataaactggagacagatgtacccagaattgaggacgggtgggaaatgaggagaaatgaaggctgaggaggggtcattctcacagtccctccctttcggtcacaggagggtgttgcccatgcttttgggtgggtcccaggcccatagctgcaaatattcatattggctactcttcagtgagcaaggggtatatgccaggcactggcattgtgcttgacatacatcatcatactgagtcctcacggaagatgtattattcccatttcacagaagatgaaactgaggcttgaggttaagtgatttgtccgtgaccacaaagagttttcgggactcaaacccagatctgtcactgggcaaggtggctcacacctataatcccagccctttgggagactgaggccagcagatctcctgtggccaggagttcaagcctggccaacaatggcaaaaccccgtctctaccaaaaatacaaaaattagctgggcgtggtggcacacacccgtaatcccagctactcaggtggctgaggcaggagaatcacttgaacccaggaggtggtggttgcagtgagcctagatcgtgccactgcattccagcctgagcgacagagtaagactctgtctccaaaaaaaacccagatctgtccgactctgacacccaacctttaatcactcactttctgtcaatgtcacctccgttttgaccagccaagctagacctccctggagcctgtggagaagccaaggtagaaaagggttggaaaagaatgataaaataggccaggtgcggtggctcaagcctgtactcccagcacttttggaggccgagacaggcagattgcttgagcccaggagttcaagaccagcctgggcaacataatgagaccctgtttcaacttaaaaaaaagaaatggtaatgaacaattgtcaattctgagcagctgggtatggtatgaccctgtgtactttttctgtattttaaaatgttctcaaaataaaacttgttt

SEQ ID NO: 1020 - DNA, 3175 bp, Homo sapiens
ggccgggtagggggttcgcctgcggccgcgtctgctcggggcctgaggcctcgaagaccccagcccaagcccccaggttgatgccggcccaggatggatcagacctgtgaactacccagaagaaattgtctgctgcccttttccaatccagtgaatttagatgcccctgaagacaaggacagccctttcggatgatccagattccagtaccagtacattaggaaacatgctagaattacctggaacttcatcatcatctacttcacaggaattgccattttgtcaacctaagaaaaagtctacgccactgaagtatgaagttggagatctcatctgggcaaaattcaagagacgcccatggtggccctgcaggatttgttctgatccgttgattaacacacattcaaaaatgaaagtggagcacatgatccagaagaaccaatgtctcttcaccaacacccagtgtaaggtttgctgcgccttgcttatttctgagtcccagaagctggcacattaccagagcagcagaagcaaagacaagaaccagtgctgccccatctgtaacatgaccttttcctcccctgtcgtggcccagtcgcactacctggggaagacccacgcaaagaacttaaagctgaagcagcagtccactaaggtggaagccttgcaccagaatagagagatgatagacccagacaagttctgcagcctctgccatgcaactttcaacgaccctgtcatggctcaacaacattatgtgggcaagaaacacagaaaacaggagaccaagctcaaactaatggcacgctatgggcggctggcggaccctgctgtcactgactttccagctggaaagggctacccctgcaaaacatgtaagatagtgctgaactccatagaacagtaccaagctcatgtcagcggcttcaaacacaagaaccagtcaccaaaaacagtggcatcatccctgggccagattccaatgcaaaggcaacccattcagaaagactcaaccaccttggaagactagaggtgattctgcccagcatcccatattgggccagccatgagccagcttcccgtgactgctcagcccttggctccctcttgctcgttgttctcaccaggaaagtacacgggcctgaggcaggattgggccacagacagcctctcattggtccgggctaattcactcctgctgctcccctttggcaggggtcctgtaggtcatgacaggggaggcaagggtattgagagactcggggtctcgcggggtggtagtttggagggtggctttccccatttcccaacccctctgggccttaggtgctgaggcccctgccacctgtctttcctctaaaggtcagttttgggccagttcttgcaactaaagagcagagatctctctgggccctagacatttccagcaaaacctggaactttcatgccaaacctggggcagggcaggaaacagaggaaatggctgcaacatgggagcttggagctaatacgacactctgccttcccccagaaggtgcaggctttcctgagtcttagaccagatatggccagttgcgcaggtttctgccaactgtgaagtatcctcctggagcagtgacacaatcttggcggagcattgctacccccgctgccccctccacagttcctgaatggtgctaaggatctgcagcagttggcaacgagctggggctgggggcggcctccatgtccactgagatcataggacactccaatggggatgggacctttcccctcctccatcagaggtgctctgaccctaggttacacgggaaagtgccccacatgcaagtctccctgagggttctgcccctaaaggcagactgcctcatgcccgctagctgtgaggttcattgctaccctcggccctactagccctctcttcccccttgtgcagcggaccacttgcccagtttgctgtggtgctagccttccccatcatccaccgggtgatttctgggtcccagggaaagaaagagagagctgatgcaggtttctacagtgaggaacaggcgtttcccaggccccacacccagatttctctatctttgctgtgttttatggcctgggactgagtccacacggatagatttttccttgtaaccttgagacgagaattccaaggagtgtcaccatcagaggcttctcttcattgtgtcaaagaagcccctagctgctctcgtggcctccttcccccactccctatcccttcacctgtgaaatgcctttgctttgcatattgtgtgtggatgtgtgtgtgtgtgtgtgtgtgtttgtgtgtatgtgtgtgcttctgtgtgtgcctaatgctctgtctcttggtcactgaagcatccaaataaagaatttccctcatgggccagactacaacttaacagacctagggttttgagccatattgccattggatctagtatgtctgtcttgacccctcacccccaccccattcagacctcagtagtccccagtagtcactttaggagttgggacagagtcgagcaccctgtgaaagtctcccttgagttcaggtgccctgaactcagtacagcctcatcttctcatccaccaccttctcctgcttctcctgtcacatagggcctcatgaaggtctttaaagggtttaagctggggatctgctttatgtttgagagaactgttctggctgttatgtaaaggagtgcagggaggggcaggaaaggagacaaggaggccagtatggacactgtgtccagtatggctttccaggctaatcacttagggcagagacccagccttattcatctctacttcctgatgtccatagtggtgtgtcatgaatttttattgaatgaacaaatgaggtgtatgaggagagatggttttctcctgctcagctcttacacagtgataggtttgttccatgggacttatcataggcctggtgattcttgaaagagcatttttcatgactcaaaaatgagctgagaaggagtgttatggccaggtgcggcgtcatgcacctatagtcccagctgctcaggaggctaaggcagaaagaccattcaagcccaggagttccagcctgaagtatgctgtgatcatgcctgtgaataaccactgcactccagccagggcaacataacaagactctatctaa

SEQ ID NO: 1021 - DNA, 7156 bp, Homo sapiens
gttgatgccggcccaggatggatcagacctgtgaactacccagaagaaattgtctgctgcccttttccaatccagtgaatttagatgcccctgaagacaaggacagccctttcggatgatccagattccagtaccagtacattaggaaacatgctagaattacctggaacttcatcatcatctacttcacaggaattgccatttctggaatctcactccgttgcccaggctggaatgcagtggtaagatcttggctcactgcaacctccgcctcccaggttcaagcgattcttctgcctcaacctcccaagtagctgggattacaggcacacaccaccatgctcggctaatctttgtatttttagtagagatggggtttcaccatgtttgccaggctggtcttgaactcctgacctccagtgattctcccaccttggcctcccaaagtgctgggattacaggcatgagccaccgcacccagcctgtgacttaacctttttgagcctcagtttctttatctgcaaaatcgagataatgctgtcttgtaaggttgtgagggtgtcaacctaagaaaaagtctacgccactgaagtatgaagttggagatctcatctgggcaaaattcaagagacgcccatggtggccctgcaggatttgttctgatccgttgattaacacacattcaaaaatgaaagtttccaaccggaggccctatcggcagtactacgtggaggcttttggagatccttctgagagagcctgggtggctggaaaagcaatcgtcatgtttgaaggcagacatcaattcgaagagctacctgtccttaggagaagagggaaacagaaagaaaaaggatataggcataaggttcctcagaaaattttgagtaaatgggaagccagtgttggacttgcagaacagtatgatgttcccaaggggtcaaagaaccgaaaatgtattcctggttcaatcaagttggacagtgaagaagatatgccatttgaagactgcacaaatgatcctgagtcagaacatgacctgttgcttaatggctgtttgaaatcactggcttttgattctgaacattctgcagatgagaaggaaaagccttgcgctaaatctcgagccagaaagagctctgataatccaaaaaggactagtgtgaaaaagggccacatacaatttgaagcacataaagatgaacggaggggaaagattccagagaaccttggcctaaactttatctctggggatatatctgatacgcaggcctctaatgaactttccaggatagcaaatagcctcacagggtccaacactgccccaggaagttttctgttttcttcctgtggaaaaaacactgcaaagaaagaatttgagacttcaaatggtgactctttattgggcttgcctgagggtgctttgatctcaaagtgttctcgagagaagaataaaccccaacgaagcctggtgtgtggttcaaaagtgaagctctgctatattggagcaggtgatgaggaaaagcgaagtgattccattagtatctgtaccacttctgatgatggaagcagtgacctggatcccatagaacacagctcagagtctgataacagtgtccttgaaattccagatgctttcgatagaacagagaacatgttatctatgcagaaaaatgaaaagataaagtattctaggtttgctgccacaaacactagggtaaaagcaaaacagaagcctctcattagtaactcacatacagaccacttaatgggttgtactaagagtgcagagcctggaaccgagacgtctcaggttaatctctctgatctgaaggcatctactcttgttcacaaaccccagtcagattttacaaatgatgctctctctccaaaattcaacctgtcatcaagcatatccagtgagaactcgttaataaagggtggggcagcaaatcaagctctattacattcgaaaagcaaacagcccaagttccgaagtataaagtgcaaacacaaagaaaatccagttatggcagaacccccagttataaatgaggagtgcagtttgaaatgctgctcttctgataccaaaggctctcctttggccagcatttctaaaagtgggaaagtggatggtctaaaactactgaacaatatgcatgagaaaaccagggattcaagtgacatagaaacagcagtggtgaaacatgttttatccgagttgaaggaactctcttacagatccttaggtgaggatgtcagtgactctggaacatcaaagccatcaaaaccattacttttctcttctgcttctagtcagaatcacatacctattgaaccagactacaaattcagtacattgctaatgatgttgaaagatatgcatgatagtaagacgaaggagcagcggttgatgactgctcaaaacctggtctcttaccggagtcctggtcgtggggactgttctactaatagtcctgtaggagtctctaaggttttggtttcaggaggctccacacacaattcagagaaaaagggagatggcactcagaactccgccaatcctagccctagtgggggtgactctgcattatctggcgagttgtctgcttccctacctggcttactgtccgacaagagagacctccctgcttctggtaaaagtcgttcagactgtgttactaggcgcaactgtggacgatcaaagccttcatccaaattgcgagatgctttttcagcccaaatggtaaagaacacagtgaaccgtaaagccttaaagaccgagcgcaaaagaaaactgaatcagcttccaagtgtgactcttgatgctgtactgcagggagaccgagaacgtggaggttcattgagaggtggggcagaagatcctagtaaagaggatccccttcagataatgggccacttaacaagtgaagatggtgaccatttttctgatgtgcatttcgatagcaaggttaagcaatctgatcctggtaaaatttctgaaaaaggactctcttttgaaaacggaaaaggcccagagctggactctgtaatgaacagtgagaatgatgaactcaatggtgtaaatcaagtggtgcctaaaaagcggtggcagcgtttaaaccaaaggcgcactaaacctcgtaagcgcatgaacagatttaaagagaaagaaaactctgagtgtgcctttagggtcttacttcctagtgaccctgtgcaggaggggcgggatgagtttccagagcatagaactccttcagcaagcatacttgaggaaccactgacagagcaaaatcatgctgactgcttagattcagctgggccacggttaaatgtttgtgataaatccagtgccagcattggtgacatggaaaaggagccaggaattcccagtttgacaccacaggctgagctccctgaaccagctgtgcggtcagagaagaaacgccttaggaagccaagcaagtggcttttggaatatacagaagaatatgatcagatatttgctcctaagaaaaaacaaaagaaggtacaggagcaggtgcacaaggtaagttcccgctgtgaagaggaaagccttctagcccgaggtcgatctagtgctcagaacaagcaggtggacgagaattctttgatttcaaccaaagaagagcctccagttcttgaaagggaggctccgtttttggagggccccttggctcagtcagaacttggaggtggacatgctgagttgccgcagctgaccttgtctgtgcctgtggctccggaagtctctccacggcctgcccttgagtctgaggaattgctagttaaaacgccaggaaattatgaaagtaaacgtcaaagaaaaccaactaagaaacttcttgaatccaatgatttagaccctggatttatgcccaagaagggggaccttggcctttctaaaaagtgctatgaagctggtcacctggagaatggcataactgaatcttgtgccacatcttattcaaaagattttggtggaggcactaccaagatatttgacaagccaaggaagcgaaaacgacagaggcatgctgcagccaagatgcagtgtaaaaaagtgaaaaatgatgactcgtcaaaagagattccaggctcagagggagaactaatgcctcacaggacggccacaagccccaaggagactgttgaggaaggtgtagaacacgatcccgggatgcctgcctctaaaaaaatgcagggtgaacgcggtggaggagctgcactcaaggagaatgtctgtcagaattgtgaaaaattgggtgagctgctgttatgtgaggctcagtgctgtggggctttccacctggagtgccttggattgactgagatgccaagaggaaaatttatctgcaatgaatgtcgcacagtggagcacatgatccagaagaaccaatgtctcttcaccaacacccagtgtaaggtttgctgcgccttgcttatttctgagtcccagaagctggcacattaccagagcagcagaagcaaagacaagaaccagtgctgccccatctgtaacatgaccttttcctcccctgtcgtggcccagtcgcactacctggggaagacccacgcaaagaacttaaagctgaagcagcagtccactaaggtggaagccttgcaccagaatagagagatgatagacccagacaagttctgcagcctctgccatgcaactttcaacgaccctgtcatggctcaacaacattatgtgggcaagaaacacagaaaacaggagaccaagctcaaactaatggcacgctatgggcggctggcggaccctgctgtcactgactttccagctggaaagggctacccctgcaaaacatgtaagatagtgctgaactccatagaacagtaccaagctcatgtcagcggcttcaaacacaagaaccagtcaccaaaaacagtggcatcatccctgggccagattccaatgcaaaggcaacccattcagaaagactcaaccaccttggaagactagaggtgattctgcccagcatcccatattgggccagccatgagccagcttcccgtgactgctcagcccttggctccctcttgctcgttgttctcaccaggaaagtacacgggcctgaggcaggattgggccacagacagcctctcattggtccgggctaattcactcctgctgctcccctttggcaggggtcctgtaggtcatgacaggggaggcaagggtattgagagactcggggtctcgcggggtggtagtttggagggtggctttccccatttcccaacccctctgggccttaggtgctgaggcccctgccacctgtctttcctctaaaggtcagttttgggccagttcttgcaactaaagagcagagatctctctgggccctagacatttccagcaaaacctggaactttcatgccaaacctggggcagggcaggaaacagaggaaatggctgcaacatgggagcttggagctaatacgacactctgccttcccccagaaggtgcaggctttcctgagtcttagaccagatatggccagttgcgcaggtttctgccaactgtgaagtatcctcctggagcagtgacacaatcttggcggagcattgctacccccgctgccccctccacagttcctgaatggtgctaaggatctgcagcagttggcaacgagctggggctgggggcggcctccatgtccactgagatcataggacactccaatggggatgggacctttcccctcctccatcagaggtgctctgaccctaggttacacgggaaagtgccccacatgcaagtctccctgagggttctgcccctaaaggcagactgcctcatgcccgctagctgtgaggttcattgctaccctcggccctactagccctctcttcccccttgtgcagcggaccacttgcccagtttgctgtggtgctagccttccccatcatccaccgggtgatttctgggtcccagggaaagaaagagagagctgatgcaggtttctacagtgaggaacaggcgtttcccaggccccacacccagatttctctatctttgctgtgttttatggcctgggactgagtccacacggatagatttttccttgtaaccttgagacgagaattccaaggagtgtcaccatcagaggcttctcttcattgtgtcaaagaagcccctagctgctctcgtggcctccttcccccactccctatcccttcacctgtgaaatgcctttgctttgcatattgtgtgtggatgtgtgtgtgtgtgtgtgtgtgtttgtgtgtatgtgtgtgcttctgtgtgtgcctaatgctctgtctcttggtcactgaagcatccaaataaagaatttccctcatgggccagactacaacttaacagacctagggttttgagccatattgccattggatctagtatgtctgtcttgacccctcacccccaccccattcagacctcagtagtccccagtagtcactttaggagttgggacagagtcgagcaccctgtgaaagtctcccttgagttcaggtgccctgaactcagtacagcctcatcttctcatccaccaccttctcctgcttctcctgtcacatagggcctcatgaaggtctttaaagggtttaagctggggatctgctttatgtttgagagaactgttctggctgttatgtaaaggagtgcagggaggggcaggaaaggagacaaggaggccagtatggacactgtgtccagtatggctttccaggctaatcacttagggcagagacccagccttattcatctctacttcctgatgtccatagtggtgtgtcatgaatttttattgaatgaacaaatgaggtgtatgaggagagatggttttctcctgctcagctcttacacagtgataggtttgttccatgggacttatcataggcctggtgattcttgaaagagcatttttcatgactcaaaaatgagctgagaaggagtgttatggccaggtgcggcgtcatgcacctatagtcccagctgctcaggaggctaaggcagaaagaccattcaagcccaggagttccagcctgaagtatgctgtgatcatgcctgtgaataaccactgcactccagccagggcaacataacaagactctatctaa

SEQ ID NO: 1022 - DNA, 6877 bp, Homo sapiens
ggccgggtagggggttcgcctgcggccgcgtctgctcggggcctgaggcctcgaagaccccagcccaagcccccaggttgatgccggcccaggatggatcagacctgtgaactacccagaagaaattgtctgctgcccttttccaatccagtgaatttagatgcccctgaagacaaggacagccctttcggatgatccagattccagtaccagtacattaggaaacatgctagaattacctggaacttcatcatcatctacttcacaggaattgccattttgtcaacctaagaaaaagtctacgccactgaagtatgaagttggagatctcatctgggcaaaattcaagagacgcccatggtggccctgcaggatttgttctgatccgttgattaacacacattcaaaaatgaaagtttccaaccggaggccctatcggcagtactacgtggaggcttttggagatccttctgagagagcctgggtggctggaaaagcaatcgtcatgtttgaaggcagacatcaattcgaagagctacctgtccttaggagaagagggaaacagaaagaaaaaggatataggcataaggttcctcagaaaattttgagtaaatgggaagccagtgttggacttgcagaacagtatgatgttcccaaggggtcaaagaaccgaaaatgtattcctggttcaatcaagttggacagtgaagaagatatgccatttgaagactgcacaaatgatcctgagtcagaacatgacctgttgcttaatggctgtttgaaatcactggcttttgattctgaacattctgcagatgagaaggaaaagccttgcgctaaatctcgagccagaaagagctctgataatccaaaaaggactagtgtgaaaaagggccacatacaatttgaagcacataaagatgaacggaggggaaagattccagagaaccttggcctaaactttatctctggggatatatctgatacgcaggcctctaatgaactttccaggatagcaaatagcctcacagggtccaacactgccccaggaagttttctgttttcttcctgtggaaaaaacactgcaaagaaagaatttgagacttcaaatggtgactctttattgggcttgcctgagggtgctttgatctcaaagtgttctcgagagaagaataaaccccaacgaagcctggtgtgtggttcaaaagtgaagctctgctatattggagcaggtgatgaggaaaagcgaagtgattccattagtatctgtaccacttctgatgatggaagcagtgacctggatcccatagaacacagctcagagtctgataacagtgtccttgaaattccagatgctttcgatagaacagagaacatgttatctatgcagaaaaatgaaaagataaagtattctaggtttgctgccacaaacactagggtaaaagcaaaacagaagcctctcattagtaactcacatacagaccacttaatgggttgtactaagagtgcagagcctggaaccgagacgtctcaggttaatctctctgatctgaaggcatctactcttgttcacaaaccccagtcagattttacaaatgatgctctctctccaaaattcaacctgtcatcaagcatatccagtgagaactcgttaataaagggtggggcagcaaatcaagctctattacattcgaaaagcaaacagcccaagttccgaagtataaagtgcaaacacaaagaaaatccagttatggcagaacccccagttataaatgaggagtgcagtttgaaatgctgctcttctgataccaaaggctctcctttggccagcatttctaaaagtgggaaagtggatggtctaaaactactgaacaatatgcatgagaaaaccagggattcaagtgacatagaaacagcagtggtgaaacatgttttatccgagttgaaggaactctcttacagatccttaggtgaggatgtcagtgactctggaacatcaaagccatcaaaaccattacttttctcttctgcttctagtcagaatcacatacctattgaaccagactacaaattcagtacattgctaatgatgttgaaagatatgcatgatagtaagacgaaggagcagcggttgatgactgctcaaaacctggtctcttaccggagtcctggtcgtggggactgttctactaatagtcctgtaggagtctctaaggttttggtttcaggaggctccacacacaattcagagaaaaagggagatggcactcagaactccgccaatcctagccctagtgggggtgactctgcattatctggcgagttgtctgcttccctacctggcttactgtccgacaagagagacctccctgcttctggtaaaagtcgttcagactgtgttactaggcgcaactgtggacgatcaaagccttcatccaaattgcgagatgctttttcagcccaaatggtaaagaacacagtgaaccgtaaagccttaaagaccgagcgcaaaagaaaactgaatcagcttccaagtgtgactcttgatgctgtactgcagggagaccgagaacgtggaggttcattgagaggtggggcagaagatcctagtaaagaggatccccttcagataatgggccacttaacaagtgaagatggtgaccatttttctgatgtgcatttcgatagcaaggttaagcaatctgatcctggtaaaatttctgaaaaaggactctcttttgaaaacggaaaaggcccagagctggactctgtaatgaacagtgagaatgatgaactcaatggtgtaaatcaagtggtgcctaaaaagcggtggcagcgtttaaaccaaaggcgcactaaacctcgtaagcgcatgaacagatttaaagagaaagaaaactctgagtgtgcctttagggtcttacttcctagtgaccctgtgcaggaggggcgggatgagtttccagagcatagaactccttcagcaagcatacttgaggaaccactgacagagcaaaatcatgctgactgcttagattcagctgggccacggttaaatgtttgtgataaatccagtgccagcattggtgacatggaaaaggagccaggaattcccagtttgacaccacaggctgagctccctgaaccagctgtgcggtcagagaagaaacgccttaggaagccaagcaagtggcttttggaatatacagaagaatatgatcagatatttgctcctaagaaaaaacaaaagaaggtacaggagcaggtgcacaaggtaagttcccgctgtgaagaggaaagccttctagcccgaggtcgatctagtgctcagaacaagcaggtggacgagaattctttgatttcaaccaaagaagagcctccagttcttgaaagggaggctccgtttttggagggccccttggctcagtcagaacttggaggtggacatgctgagttgccgcagctgaccttgtctgtgcctgtggctccggaagtctctccacggcctgcccttgagtctgaggaattgctagttaaaacgccaggaaattatgaaagtaaacgtcaaagaaaaccaactaagaaacttcttgaatccaatgatttagaccctggatttatgcccaagaagggggaccttggcctttctaaaaagtgctatgaagctggtcacctggagaatggcataactgaatcttgtgccacatcttattcaaaagattttggtggaggcactaccaagatatttgacaagccaaggaagcgaaaacgacagaggcatgctgcagccaagatgcagtgtaaaaaagtgaaaaatgatgactcgtcaaaagagattccaggctcagagggagaactaatgcctcacaggacggccacaagccccaaggagactgttgaggaaggtgtagaacacgatcccgggatgcctgcctctaaaaaaatgcagggtgaacgcggtggaggagctgcactcaaggagaatgtctgtcagaattgtgaaaaattgggtgagctgctgttatgtgaggctcagtgctgtggggctttccacctggagtgccttggattgactgagatgccaagaggaaaatttatctgcaatgaatgtcgcacagtggagcacatgatccagaagaaccaatgtctcttcaccaacacccagtgtaaggtttgctgcgccttgcttatttctgagtcccagaagctggcacattaccagagcagcagaagcaaagacaagaaccagtgctgccccatctgtaacatgaccttttcctcccctgtcgtggcccagtcgcactacctggggaagacccacgcaaagaacttaaagctgaagcagcagtccactaaggtggaagccttgcaccagaatagagagatgatagacccagacaagttctgcagcctctgccatgcaactttcaacgaccctgtcatggctcaacaacattatgtgggcaagaaacacagaaaacaggagaccaagctcaaactaatggcacgctatgggcggctggcggaccctgctgtcactgactttccagctggaaagggctacccctgcaaaacatgtaagatagtgctgaactccatagaacagtaccaagctcatgtcagcggcttcaaacacaagaaccagtcaccaaaaacagtggcatcatccctgggccagattccaatgcaaaggcaacccattcagaaagactcaaccaccttggaagactagaggtgattctgcccagcatcccatattgggccagccatgagccagcttcccgtgactgctcagcccttggctccctcttgctcgttgttctcaccaggaaagtacacgggcctgaggcaggattgggccacagacagcctctcattggtccgggctaattcactcctgctgctcccctttggcaggggtcctgtaggtcatgacaggggaggcaagggtattgagagactcggggtctcgcggggtggtagtttggagggtggctttccccatttcccaacccctctgggccttaggtgctgaggcccctgccacctgtctttcctctaaaggtcagttttgggccagttcttgcaactaaagagcagagatctctctgggccctagacatttccagcaaaacctggaactttcatgccaaacctggggcagggcaggaaacagaggaaatggctgcaacatgggagcttggagctaatacgacactctgccttcccccagaaggtgcaggctttcctgagtcttagaccagatatggccagttgcgcaggtttctgccaactgtgaagtatcctcctggagcagtgacacaatcttggcggagcattgctacccccgctgccccctccacagttcctgaatggtgctaaggatctgcagcagttggcaacgagctggggctgggggcggcctccatgtccactgagatcataggacactccaatggggatgggacctttcccctcctccatcagaggtgctctgaccctaggttacacgggaaagtgccccacatgcaagtctccctgagggttctgcccctaaaggcagactgcctcatgcccgctagctgtgaggttcattgctaccctcggccctactagccctctcttcccccttgtgcagcggaccacttgcccagtttgctgtggtgctagccttccccatcatccaccgggtgatttctgggtcccagggaaagaaagagagagctgatgcaggtttctacagtgaggaacaggcgtttcccaggccccacacccagatttctctatctttgctgtgttttatggcctgggactgagtccacacggatagatttttccttgtaaccttgagacgagaattccaaggagtgtcaccatcagaggcttctcttcattgtgtcaaagaagcccctagctgctctcgtggcctccttcccccactccctatcccttcacctgtgaaatgcctttgctttgcatattgtgtgtggatgtgtgtgtgtgtgtgtgtgtgtttgtgtgtatgtgtgtgcttctgtgtgtgcctaatgctctgtctcttggtcactgaagcatccaaataaagaatttccctcatgggccagactacaacttaacagacctagggttttgagccatattgccattggatctagtatgtctgtcttgacccctcacccccaccccattcagacctcagtagtccccagtagtcactttaggagttgggacagagtcgagcaccctgtgaaagtctcccttgagttcaggtgccctgaactcagtacagcctcatcttctcatccaccaccttctcctgcttctcctgtcacatagggcctcatgaaggtctttaaagggtttaagctggggatctgctttatgtttgagagaactgttctggctgttatgtaaaggagtgcagggaggggcaggaaaggagacaaggaggccagtatggacactgtgtccagtatggctttccaggctaatcacttagggcagagacccagccttattcatctctacttcctgatgtccatagtggtgtgtcatgaatttttattgaatgaacaaatgaggtgtatgaggagagatggttttctcctgctcagctcttacacagtgataggtttgttccatgggacttatcataggcctggtgattcttgaaagagcatttttcatgactcaaaaatgagctgagaaggagtgttatggccaggtgcggcgtcatgcacctatagtcccagctgctcaggaggctaaggcagaaagaccattcaagcccaggagttccagcctgaagtatgctgtgatcatgcctgtgaataaccactgcactccagccagggcaacataacaagactctatctaa

SEQ ID NO: 1023 - DNA, 6693 bp, Homo sapiens
gacgcggggggaggggggtgcggcgagcggccccgctctctccccaccgctccgctcgcaccccagtgtaatgagggtcaccccctccccccagctggcccgggagggggcgcggggcacggttgatgccggcccaggatggatcagacctgtgaactacccagaagaaattgtctgctgcccttttccaatccagtgaatttagatgcccctgaagacaaggacagccctttcggtaatggtcaatccaatttttctgagccacttaatgggtgtactatgcagttatcgactgtcagtggaacatcccaaaatgcttatggacaagattctccatcttgttacattccactgcggagactacaggatttggcctccatgatcaatgtagagtatttaaatgggtctgctgatggatcagaatcctttcaagaccctgaaaaaagtgattcaagagctcagacgccaattgtttgcacttccttgagtcctggtggtcctacagcacttgctatgaaacaggaaccctcttgtaataactcccctgaactccaggtaaaagtaacaaagactatcaagaatggctttctgcactttgagaattttacttgtgtggacgatgcagatgtagattctgaaatggacccagaacagccagtcacagaggatgagagtatagaggagatctttgaggaaactcagaccaatgccacctgcaattatgagactaaatcagagaatggtgtaaaagtggccatgggaagtgaacaagacagcacaccagagagtagacacggtgcagtcaaatcgccattcttgccattagctcctcagactgaaacacagaaaaataagcaaagaaatgaagtggacggcagcaatgaaaaagcagcccttctcccagcccccttttcactaggagacacaaacattacaatagaagagcaattaaactcaataaatttatcttttcaggatgatccagattccagtaccagtacattaggaaacatgctagaattacctggaacttcatcatcatctacttcacaggaattgccattttgtcaacctaagaaaaagtctacgccactgaagtatgaagttggagatctcatctgggcaaaattcaagagacgcccatggtggccctgcaggatttgttctgatccgttgattaacacacattcaaaaatgaaagtttccaaccggaggccctatcggcagtactacgtggaggcttttggagatccttctgagagagcctgggtggctggaaaagcaatcgtcatgtttgaaggcagacatcaattcgaagagctacctgtccttaggagaagagggaaacagaaagaaaaaggatataggcataaggttcctcagaaaattttgagtaaatgggaagccagtgttggacttgcagaacagtatgatgttcccaaggggtcaaagaaccgaaaatgtattcctggttcaatcaagttggacagtgaagaagatatgccatttgaagactgcacaaatgatcctgagtcagaacatgacctgttgcttaatggctgtttgaaatcactggcttttgattctgaacattctgcagatgagaaggaaaagccttgcgctaaatctcgagccagaaagagctctgataatccaaaaaggactagtgtgaaaaagggccacatacaatttgaagcacataaagatgaacggaggggaaagattccagagaaccttggcctaaactttatctctggggatatatctgatacgcaggcctctaatgaactttccaggatagcaaatagcctcacagggtccaacactgccccaggaagttttctgttttcttcctgtggaaaaaacactgcaaagaaagaatttgagacttcaaatggtgactctttattgggcttgcctgagggtgctttgatctcaaagtgttctcgagagaagaataaaccccaacgaagcctggtgtgtggttcaaaagtgaagctctgctatattggagcaggtgatgaggaaaagcgaagtgattccattagtatctgtaccacttctgatgatggaagcagtgacctggatcccatagaacacagctcagagtctgataacagtgtccttgaaattccagatgctttcgatagaacagagaacatgttatctatgcagaaaaatgaaaagataaagtattctaggtttgctgccacaaacactagggtaaaagcaaaacagaagcctctcattagtaactcacatacagaccacttaatgggttgtactaagagtgcagagcctggaaccgagacgtctcaggttaatctctctgatctgaaggcatctactcttgttcacaaaccccagtcagattttacaaatgatgctctctctccaaaattcaacctgtcatcaagcatatccagtgagaactcgttaataaagggtggggcagcaaatcaagctctattacattcgaaaagcaaacagcccaagttccgaagtataaagtgcaaacacaaagaaaatccagttatggcagaacccccagttataaatgaggagtgcagtttgaaatgctgctcttctgataccaaaggctctcctttggccagcatttctaaaagtgggaaagtggatggtctaaaactactgaacaatatgcatgagaaaaccagggattcaagtgacatagaaacagcagtggtgaaacatgttttatccgagttgaaggaactctcttacagatccttaggtgaggatgtcagtgactctggaacatcaaagccatcaaaaccattacttttctcttctgcttctagtcagaatcacatacctattgaaccagactacaaattcagtacattgctaatgatgttgaaagatatgcatgatagtaagacgaaggagcagcggttgatgactgctcaaaacctggtctcttaccggagtcctggtcgtggggactgttctactaatagtcctgtaggagtctctaaggttttggtttcaggaggctccacacacaattcagagaaaaagggagatggcactcagaactccgccaatcctagccctagtgggggtgactctgcattatctggcgagttgtctgcttccctacctggcttactgtccgacaagagagacctccctgcttctggtaaaagtcgttcagactgtgttactaggcgcaactgtggacgatcaaagccttcatccaaattgcgagatgctttttcagcccaaatggtaaagaacacagtgaaccgtaaagccttaaagaccgagcgcaaaagaaaactgaatcagcttccaagtgtgactcttgatgctgtactgcagggagaccgagaacgtggaggttcattgagaggtggggcagaagatcctagtaaagaggatccccttcagataatgggccacttaacaagtgaagatggtgaccatttttctgatgtgcatttcgatagcaaggttaagcaatctgatcctggtaaaatttctgaaaaaggactctcttttgaaaacggaaaaggcccagagctggactctgtaatgaacagtgagaatgatgaactcaatggtgtaaatcaagtggtgcctaaaaagcggtggcagcgtttaaaccaaaggcgcactaaacctcgtaagcgcatgaacagatttaaagagaaagaaaactctgagtgtgcctttagggtcttacttcctagtgaccctgtgcaggaggggcgggatgagtttccagagcatagaactccttcagcaagcatacttgaggaaccactgacagagcaaaatcatgctgactgcttagattcagctgggccacggttaaatgtttgtgataaatccagtgccagcattggtgacatggaaaaggagccaggaattcccagtttgacaccacaggctgagctccctgaaccagtggagcacatgatccagaagaaccaatgtctcttcaccaacacccagtgtaaggtttgctgcgccttgcttatttctgagtcccagaagctggcacattaccagagcagcagaagcaaagacaagaaccagtgctgccccatctgtaacatgaccttttcctcccctgtcgtggcccagtcgcactacctggggaagacccacgcaaagaacttaaagctgaagcagcagtccactaaggtggaagccttgcaccagaatagagagatgatagacccagacaagttctgcagcctctgccatgcaactttcaacgaccctgtcatggctcaacaacattatgtgggcaagaaacacagaaaacaggagaccaagctcaaactaatggcacgctatgggcggctggcggaccctgctgtcactgactttccagctggaaagggctacccctgcaaaacatgtaagatagtgctgaactccatagaacagtaccaagctcatgtcagcggcttcaaacacaagaaccagtcaccaaaaacagtggcatcatccctgggccagattccaatgcaaaggcaacccattcagaaagactcaaccaccttggaagactagaggtgattctgcccagcatcccatattgggccagccatgagccagcttcccgtgactgctcagcccttggctccctcttgctcgttgttctcaccaggaaagtacacgggcctgaggcaggattgggccacagacagcctctcattggtccgggctaattcactcctgctgctcccctttggcaggggtcctgtaggtcatgacaggggaggcaagggtattgagagactcggggtctcgcggggtggtagtttggagggtggctttccccatttcccaacccctctgggccttaggtgctgaggcccctgccacctgtctttcctctaaaggtcagttttgggccagttcttgcaactaaagagcagagatctctctgggccctagacatttccagcaaaacctggaactttcatgccaaacctggggcagggcaggaaacagaggaaatggctgcaacatgggagcttggagctaatacgacactctgccttcccccagaaggtgcaggctttcctgagtcttagaccagatatggccagttgcgcaggtttctgccaactgtgaagtatcctcctggagcagtgacacaatcttggcggagcattgctacccccgctgccccctccacagttcctgaatggtgctaaggatctgcagcagttggcaacgagctggggctgggggcggcctccatgtccactgagatcataggacactccaatggggatgggacctttcccctcctccatcagaggtgctctgaccctaggttacacgggaaagtgccccacatgcaagtctccctgagggttctgcccctaaaggcagactgcctcatgcccgctagctgtgaggttcattgctaccctcggccctactagccctctcttcccccttgtgcagcggaccacttgcccagtttgctgtggtgctagccttccccatcatccaccgggtgatttctgggtcccagggaaagaaagagagagctgatgcaggtttctacagtgaggaacaggcgtttcccaggccccacacccagatttctctatctttgctgtgttttatggcctgggactgagtccacacggatagatttttccttgtaaccttgagacgagaattccaaggagtgtcaccatcagaggcttctcttcattgtgtcaaagaagcccctagctgctctcgtggcctccttcccccactccctatcccttcacctgtgaaatgcctttgctttgcatattgtgtgtggatgtgtgtgtgtgtgtgtgtgtgtttgtgtgtatgtgtgtgcttctgtgtgtgcctaatgctctgtctcttggtcactgaagcatccaaataaagaatttccctcatgggccagactacaacttaacagacctagggttttgagccatattgccattggatctagtatgtctgtcttgacccctcacccccaccccattcagacctcagtagtccccagtagtcactttaggagttgggacagagtcgagcaccctgtgaaagtctcccttgagttcaggtgccctgaactcagtacagcctcatcttctcatccaccaccttctcctgcttctcctgtcacatagggcctcatgaaggtctttaaagggtttaagctggggatctgctttatgtttgagagaactgttctggctgttatgtaaaggagtgcagggaggggcaggaaaggagacaaggaggccagtatggacactgtgtccagtatggctttccaggctaatcacttagggcagagacccagccttattcatctctacttcctgatgtccatagtggtgtgtcatgaatttttattgaatgaacaaatgaggtgtatgaggagagatggttttctcctgctcagctcttacacagtgataggtttgttccatgggacttatcataggcctggtgattcttgaaagagcatttttcatgactcaaaaatgagctgagaaggagtgttatggccaggtgcggcgtcatgcacctatagtcccagctgctcaggaggctaaggcagaaagaccattcaagcccaggagttccagcctgaagtatgctgtgatcatgcctgtgaataaccactgcactccagccagggcaacataacaagactctatctaa

SEQ ID NO: 1024 - DNA, 7900 bp, Homo sapiens
gttgatgccggcccaggatggatcagacctgtgaactacccagaagaaattgtctgctgcccttttccaatccagtgaatttagatgcccctgaagacaaggacagccctttcggatgatccagattccagtaccagtacattaggaaacatgctagaattacctggaacttcatcatcatctacttcacaggaattgccatttctggaatctcactccgttgcccaggctggaatgcagtggtaagatcttggctcactgcaacctccgcctcccaggttcaagcgattcttctgcctcaacctcccaagtagctgggattacaggcacacaccaccatgctcggctaatctttgtatttttagtagagatggggtttcaccatgtttgccaggctggtcttgaactcctgacctccagtgattctcccaccttggcctcccaaagtgctgggattacaggcatgagccaccgcacccagcctgtgacttaacctttttgagcctcagtttctttatctgcaaaatcgagataatgctgtcttgtaaggttgtgagggtgtcaacctaagaaaaagtctacgccactgaagtatgaagttggagatctcatctgggcaaaattcaagagacgcccatggtggccctgcaggatttgttctgatccgttgattaacacacattcaaaaatgaaagtttccaaccggaggccctatcggcagtactacgtggaggcttttggagatccttctgagagagcctgggtggctggaaaagcaatcgtcatgtttgaaggcagacatcaattcgaagagctacctgtccttaggagaagagggaaacagaaagaaaaaggatataggcataaggttcctcagaaaattttgagtaaatgggaagccagtgttggacttgcagaacagtatgatgttcccaaggggtcaaagaaccgaaaatgtattcctggttcaatcaagttggacagtgaagaagatatgccatttgaagactgcacaaatgatcctgagtcagaacatgacctgttgcttaatggctgtttgaaatcactggcttttgattctgaacattctgcagatgagaaggaaaagccttgcgctaaatctcgagccagaaagagctctgataatccaaaaaggactagtgtgaaaaagggccacatacaatttgaagcacataaagatgaacggaggggaaagattccagagaaccttggcctaaactttatctctggggatatatctgatacgcaggcctctaatgaactttccaggatagcaaatagcctcacagggtccaacactgccccaggaagttttctgttttcttcctgtggaaaaaacactgcaaagaaagaatttgagacttcaaatggtgactctttattgggcttgcctgagggtgctttgatctcaaagtgttctcgagagaagaataaaccccaacgaagcctggtgtgtggttcaaaagtgaagctctgctatattggagcaggtgatgaggaaaagcgaagtgattccattagtatctgtaccacttctgatgatggaagcagtgacctggatcccatagaacacagctcagagtctgataacagtgtccttgaaattccagatgctttcgatagaacagagaacatgttatctatgcagaaaaatgaaaagataaagtattctaggtttgctgccacaaacactagggtaaaagcaaaacagaagcctctcattagtaactcacatacagaccacttaatgggttgtactaagagtgcagagcctggaaccgagacgtctcaggttaatctctctgatctgaaggcatctactcttgttcacaaaccccagtcagattttacaaatgatgctctctctccaaaattcaacctgtcatcaagcatatccagtgagaactcgttaataaagggtggggcagcaaatcaagctctattacattcgaaaagcaaacagcccaagttccgaagtataaagtgcaaacacaaagaaaatccagttatggcagaacccccagttataaatgaggagtgcagtttgaaatgctgctcttctgataccaaaggctctcctttggccagcatttctaaaagtgggaaagtggatggtctaaaactactgaacaatatgcatgagaaaaccagggattcaagtgacatagaaacagcagtggtgaaacatgttttatccgagttgaaggaactctcttacagatccttaggtgaggatgtcagtgactctggaacatcaaagccatcaaaaccattacttttctcttctgcttctagtcagaatcacatacctattgaaccagactacaaattcagtacattgctaatgatgttgaaagatatgcatgatagtaagacgaaggagcagcggttgatgactgctcaaaacctggtctcttaccggagtcctggtcgtggggactgttctactaatagtcctgtaggagtctctaaggttttggtttcaggaggctccacacacaattcagagaaaaagggagatggcactcagaactccgccaatcctagccctagtgggggtgactctgcattatctggcgagttgtctgcttccctacctggcttactgtccgacaagagagacctccctgcttctggtaaaagtcgttcagactgtgttactaggcgcaactgtggacgatcaaagccttcatccaaattgcgagatgctttttcagcccaaatggtaaagaacacagtgaaccgtaaagccttaaagaccgagcgcaaaagaaaactgaatcagcttccaagtgtgactcttgatgctgtactgcagggagaccgagaacgtggaggttcattgagaggtggggcagaagatcctagtaaagaggatccccttcagataatgggccacttaacaagtgaagatggtgaccatttttctgatgtgcatttcgatagcaaggttaagcaatctgatcctggtaaaatttctgaaaaaggactctcttttgaaaacggaaaaggcccagagctggactctgtaatgaacagtgagaatgatgaactcaatggtgtaaatcaagtggtgcctaaaaagcggtggcagcgtttaaaccaaaggcgcactaaacctcgtaagcgcatgaacagatttaaagagaaagaaaactctgagtgtgcctttagggtcttacttcctagtgaccctgtgcaggaggggcgggatgagtttccagagcatagaactccttcagcaagcatacttgaggaaccactgacagagcaaaatcatgctgactgcttagattcagctgggccacggttaaatgtttgtgataaatccagtgccagcattggtgacatggaaaaggagccaggaattcccagtttgacaccacaggctgagctccctgaaccagctgtgcggtcagagaagaaacgccttaggaagccaagcaagtggcttttggaatatacagaagaatatgatcagatatttgctcctaagaaaaaacaaaagaaggtacaggagcaggtgcacaaggtaagttcccgctgtgaagaggaaagccttctagcccgaggtcgatctagtgctcagaacaagcaggtggacgagaattctttgatttcaaccaaagaagagcctccagttcttgaaagggaggctccgtttttggagggccccttggctcagtcagaacttggaggtggacatgctgagttgccgcagctgaccttgtctgtgcctgtggctccggaagtctctccacggcctgcccttgagtctgaggaattgctagttaaaacgccaggaaattatgaaagtaaacgtcaaagaaaaccaactaagaaacttcttgaatccaatgatttagaccctggatttatgcccaagaagggggaccttggcctttctaaaaagtgctatgaagctggtcacctggagaatggcataactgaatcttgtgccacatcttattcaaaagattttggtggaggcactaccaagatatttgacaagccaaggaagcgaaaacgacagaggcatgctgcagccaagatgcagtgtaaaaaagtgaaaaatgatgactcgtcaaaagagattccaggctcagagggagaactaatgcctcacaggacggccacaagccccaaggagactgttgaggaaggtgtagaacacgatcccgggatgcctgcctctaaaaaaatgcagggtgaacgcggtggaggagctgcactcaaggagaatgtctgtcagaattgtgaaaaattgggtgagctgctgttatgtgaggctcagtgctgtggggctttccacctggagtgccttggattgactgagatgccaagaggaaaatttatctgcaatgaatgtcgcacaggaatccatacctgttttgtatgtaagcagagtggggaagatgttaaaaggtgccttctacccttgtgtggaaagttttaccatgaagagtgtgtccagaagtacccacccactgttatgcagaacaagggcttccggtgctccctccacatctgtataacctgtcatgctgctaatccagccaatgtttctgcatctaaaggtcggttgatgcgctgtgtccgctgtcctgtggcataccacgccaatgacttttgcctggctgctgggtcaaagatccttgcatctaatagtatcatctgccctaatcactttacccctaggcggggctgccgaaatcatgagcatgttaatgttagctggtgctttgtgtgctcagaaggaggcagccttctgtgctgtgattcttgccctgctgcttttcatcgtgaatgcctgaacattgatatccctgaaggaaactggtattgcaatgactgtaaagcaggcaaaaagccacactacagggagattgtctgggtaaaagttggacgatacaggtggtggccagctgagatctgccatcctcgagctgttccttccaacattgataagatgagacatgatgtgggagagttcccagtcctcttttttggatctaatgactatttgtggactcaccaggcccgagtcttcccttacatggagggtgacgtgagcagcaaggataagatgggcaaaggagtggatgggacatataaaaaagtggagcacatgatccagaagaaccaatgtctcttcaccaacacccagtgtaaggtttgctgcgccttgcttatttctgagtcccagaagctggcacattaccagagcagcagaagcaaagacaagaaccagtgctgccccatctgtaacatgaccttttcctcccctgtcgtggcccagtcgcactacctggggaagacccacgcaaagaacttaaagctgaagcagcagtccactaaggtggaagccttgcaccagaatagagagatgatagacccagacaagttctgcagcctctgccatgcaactttcaacgaccctgtcatggctcaacaacattatgtgggcaagaaacacagaaaacaggagaccaagctcaaactaatggcacgctatgggcggctggcggaccctgctgtcactgactttccagctggaaagggctacccctgcaaaacatgtaagatagtgctgaactccatagaacagtaccaagctcatgtcagcggcttcaaacacaagaaccagtcaccaaaaacagtggcatcatccctgggccagattccaatgcaaaggcaacccattcagaaagactcaaccaccttggaagactagaggtgattctgcccagcatcccatattgggccagccatgagccagcttcccgtgactgctcagcccttggctccctcttgctcgttgttctcaccaggaaagtacacgggcctgaggcaggattgggccacagacagcctctcattggtccgggctaattcactcctgctgctcccctttggcaggggtcctgtaggtcatgacaggggaggcaagggtattgagagactcggggtctcgcggggtggtagtttggagggtggctttccccatttcccaacccctctgggccttaggtgctgaggcccctgccacctgtctttcctctaaaggtcagttttgggccagttcttgcaactaaagagcagagatctctctgggccctagacatttccagcaaaacctggaactttcatgccaaacctggggcagggcaggaaacagaggaaatggctgcaacatgggagcttggagctaatacgacactctgccttcccccagaaggtgcaggctttcctgagtcttagaccagatatggccagttgcgcaggtttctgccaactgtgaagtatcctcctggagcagtgacacaatcttggcggagcattgctacccccgctgccccctccacagttcctgaatggtgctaaggatctgcagcagttggcaacgagctggggctgggggcggcctccatgtccactgagatcataggacactccaatggggatgggacctttcccctcctccatcagaggtgctctgaccctaggttacacgggaaagtgccccacatgcaagtctccctgagggttctgcccctaaaggcagactgcctcatgcccgctagctgtgaggttcattgctaccctcggccctactagccctctcttcccccttgtgcagcggaccacttgcccagtttgctgtggtgctagccttccccatcatccaccgggtgatttctgggtcccagggaaagaaagagagagctgatgcaggtttctacagtgaggaacaggcgtttcccaggccccacacccagatttctctatctttgctgtgttttatggcctgggactgagtccacacggatagatttttccttgtaaccttgagacgagaattccaaggagtgtcaccatcagaggcttctcttcattgtgtcaaagaagcccctagctgctctcgtggcctccttcccccactccctatcccttcacctgtgaaatgcctttgctttgcatattgtgtgtggatgtgtgtgtgtgtgtgtgtgtgtttgtgtgtatgtgtgtgcttctgtgtgtgcctaatgctctgtctcttggtcactgaagcatccaaataaagaatttccctcatgggccagactacaacttaacagacctagggttttgagccatattgccattggatctagtatgtctgtcttgacccctcacccccaccccattcagacctcagtagtccccagtagtcactttaggagttgggacagagtcgagcaccctgtgaaagtctcccttgagttcaggtgccctgaactcagtacagcctcatcttctcatccaccaccttctcctgcttctcctgtcacatagggcctcatgaaggtctttaaagggtttaagctggggatctgctttatgtttgagagaactgttctggctgttatgtaaaggagtgcagggaggggcaggaaaggagacaaggaggccagtatggacactgtgtccagtatggctttccaggctaatcacttagggcagagacccagccttattcatctctacttcctgatgtccatagtggtgtgtcatgaatttttattgaatgaacaaatgaggtgtatgaggagagatggttttctcctgctcagctcttacacagtgataggtttgttccatgggacttatcataggcctggtgattcttgaaagagcatttttcatgactcaaaaatgagctgagaaggagtgttatggccaggtgcggcgtcatgcacctatagtcccagctgctcaggaggctaaggcagaaagaccattcaagcccaggagttccagcctgaagtatgctgtgatcatgcctgtgaataaccactgcactccagccagggcaacataacaagactctatctaa

SEQ ID NO: 1025 - DNA, 3215 bp, Homo sapiens
gttgatgccggcccaggatggatcagacctgtgaactacccagaagaaattgtctgctgcccttttccaatccagtgaatttagatgcccctgaagacaaggacagccctttcggatgatccagattccagtaccagtacattaggaaacatgctagaattacctggaacttcatcatcatctacttcacaggaattgccatttctggaatctcactccgttgcccaggctggaatgcagtggtaagatcttggctcactgcaacctccgcctcccaggttcaagcgattcttctgcctcaacctcccaagtagctgggattacaggcacacaccaccatgctcggctaatctttgtatttttagtagagatggggtttcaccatgtttgccaggctggtcttgaactcctgacctccagtgattctcccaccttggcctcccaaagtgctgggattacaggcatgagccaccgcacccagcctgtgacttaacctttttgagcctcagtttctttatctgcaaaatcgagataatgctgtcttgtaaggttgtgagggtgtcaacctaagaaaaagtctacgccactgaagtatgaagttggagatctcatctgggcaaaattcaagagacgcccatggtggccctgcaggatttgttctgatccgttgattaacacacattcaaaaatgaaagtggagcacatgatccagaagaaccaatgtctcttcaccaacacccagtgtaaggtttgctgcgccttgcttatttctgagtcccagaagctggcacattaccagagcaaaaaacatgccaacaaagtgaagagatacctagcaatccatggaatggagacattaaagggggaaacgaagaagctagactcagatcagaagagcagcagaagcaaagacaagaaccagtgctgccccatctgtaacatgaccttttcctcccctgtcgtggcccagtcgcactacctggggaagacccacgcaaagaacttaaagctgaagcagcagtccactaaggtggaagccttgcaccagaatagagagatgatagacccagacaagttctgcagcctctgccatgcaactttcaacgaccctgtcatggctcaacaacattatgtgggcaagaaacacagaaaacaggagaccaagctcaaactaatggcacgctatgggcggctggcggaccctgctgtcactgactttccagctggaaagggctacccctgcaaaacatgtaagatagtgctgaactccatagaacagtaccaagctcatgtcagcggcttcaaacacaagaaccagtcaccaaaaacagtggcatcatccctgggccagattccaatgcaaaggcaacccattcagaaagactcaaccaccttggaagactagagctaggggtggccgtgtcacagtctggccaaggaaatgaaattgggagttgctgtgtggaaactcaactctctggaacttcttccttcctcctgcctctgcacaaatgtgacggcagcagctgaagccaacatcttgcgaccatgagagaaaaacctggagaacggacgagtcctcaaccctgacttcagaccaacctacacccacctctggacgtggggctaagtgagagatggatacactgtttcatttaggccctgctcacttaggtttctgttattcacaccccaacgaaaccctccatggtccagggcaccgggcaaagtacagaagggcacgagtttacttcccgcttccctggagaccaccaaccctctcacccttccagcccagcctctgccacttcccagctgtcggtcctcctccaaacagacgtgcatgccaacacccggtgggtgtgaggcttgtaggcccaagtctagagaggctgagtctggcaaagcctgaaagcccctgtcctagcaagccaggccacaggtctagagtatccgagaccagtgaataaggggacggggggtgctactgaggctgtgagaagccccaggaccagcccagggtagttagaactgagtgaggttagccgggactaacctcactcagatccctcctccccagttcccctccatccactttggtttggaagcctccccagagctctcccaggctgtcatcagctctaaactctctgcctccacaaaaatgccctgggcaacctgtaactcacagccctgctgtcttcagagtataaactggagacagatgtacccagaattgaggacgggtgggaaatgaggagaaatgaaggctgaggaggggtcattctcacagtccctccctttcggtcacaggagggtgttgcccatgcttttgggtgggtcccaggcccatagctgcaaatattcatattggctactcttcagtgagcaaggggtatatgccaggcactggcattgtgcttgacatacatcatcatactgagtcctcacggaagatgtattattcccatttcacagaagatgaaactgaggcttgaggttaagtgatttgtccgtgaccacaaagagttttcgggactcaaacccagatctgtcactgggcaaggtggctcacacctataatcccagccctttgggagactgaggccagcagatctcctgtggccaggagttcaagcctggccaacaatggcaaaaccccgtctctaccaaaaatacaaaaattagctgggcgtggtggcacacacccgtaatcccagctactcaggtggctgaggcaggagaatcacttgaacccaggaggtggtggttgcagtgagcctagatcgtgccactgcattccagcctgagcgacagagtaagactctgtctccaaaaaaaacccagatctgtccgactctgacacccaacctttaatcactcactttctgtcaatgtcacctccgttttgaccagccaagctagacctccctggagcctgtggagaagccaaggtagaaaagggttggaaaagaatgataaaataggccaggtgcggtggctcaagcctgtactcccagcacttttggaggccgagacaggcagattgcttgagcccaggagttcaagaccagcctgggcaacataatgagaccctgtttcaacttaaaaaaaagaaatggtaatgaacaattgtcaattctgagcagctgggtatggtatgaccctgtgtactttttctgtattttaaaatgttctcaaaataaaacttgttt

SEQ ID NO: 1026 - DNA, 8167 bp, Homo sapiens
gacgcggggggaggggggtgcggcgagcggccccgctctctccccaccgctccgctcgcaccccagtgtaatgagggtcaccccctccccccagctggcccgggagggggcgcggggcacggttgatgccggcccaggatggatcagacctgtgaactacccagaagaaattgtctgctgcccttttccaatccagtgaatttagatgcccctgaagacaaggacagccctttcggtaatggtcaatccaatttttctgagccacttaatgggtgtactatgcagttatcgactgtcagtggaacatcccaaaatgcttatggacaagattctccatcttgttacattccactgcggagactacaggatttggcctccatgatcaatgtagagtatttaaatgggtctgctgatggatcagaatcctttcaagaccctgaaaaaagtgattcaagagctcagacgccaattgtttgcacttccttgagtcctggtggtcctacagcacttgctatgaaacaggaaccctcttgtaataactcccctgaactccaggtaaaagtaacaaagactatcaagaatggctttctgcactttgagaattttacttgtgtggacgatgcagatgtagattctgaaatggacccagaacagccagtcacagaggatgagagtatagaggagatctttgaggaaactcagaccaatgccacctgcaattatgagactaaatcagagaatggtgtaaaagtggccatgggaagtgaacaagacagcacaccagagagtagacacggtgcagtcaaatcgccattcttgccattagctcctcagactgaaacacagaaaaataagcaaagaaatgaagtggacggcagcaatgaaaaagcagcccttctcccagcccccttttcactaggagacacaaacattacaatagaagagcaattaaactcaataaatttatcttttcaggatgatccagattccagtaccagtacattaggaaacatgctagaattacctggaacttcatcatcatctacttcacaggaattgccattttgtcaacctaagaaaaagtctacgccactgaagtatgaagttggagatctcatctgggcaaaattcaagagacgcccatggtggccctgcaggatttgttctgatccgttgattaacacacattcaaaaatgaaagtttccaaccggaggccctatcggcagtactacgtggaggcttttggagatccttctgagagagcctgggtggctggaaaagcaatcgtcatgtttgaaggcagacatcaattcgaagagctacctgtccttaggagaagagggaaacagaaagaaaaaggatataggcataaggttcctcagaaaattttgagtaaatgggaagccagtgttggacttgcagaacagtatgatgttcccaaggggtcaaagaaccgaaaatgtattcctggttcaatcaagttggacagtgaagaagatatgccatttgaagactgcacaaatgatcctgagtcagaacatgacctgttgcttaatggctgtttgaaatcactggcttttgattctgaacattctgcagatgagaaggaaaagccttgcgctaaatctcgagccagaaagagctctgataatccaaaaaggactagtgtgaaaaagggccacatacaatttgaagcacataaagatgaacggaggggaaagattccagagaaccttggcctaaactttatctctggggatatatctgatacgcaggcctctaatgaactttccaggatagcaaatagcctcacagggtccaacactgccccaggaagttttctgttttcttcctgtggaaaaaacactgcaaagaaagaatttgagacttcaaatggtgactctttattgggcttgcctgagggtgctttgatctcaaagtgttctcgagagaagaataaaccccaacgaagcctggtgtgtggttcaaaagtgaagctctgctatattggagcaggtgatgaggaaaagcgaagtgattccattagtatctgtaccacttctgatgatggaagcagtgacctggatcccatagaacacagctcagagtctgataacagtgtccttgaaattccagatgctttcgatagaacagagaacatgttatctatgcagaaaaatgaaaagataaagtattctaggtttgctgccacaaacactagggtaaaagcaaaacagaagcctctcattagtaactcacatacagaccacttaatgggttgtactaagagtgcagagcctggaaccgagacgtctcaggttaatctctctgatctgaaggcatctactcttgttcacaaaccccagtcagattttacaaatgatgctctctctccaaaattcaacctgtcatcaagcatatccagtgagaactcgttaataaagggtggggcagcaaatcaagctctattacattcgaaaagcaaacagcccaagttccgaagtataaagtgcaaacacaaagaaaatccagttatggcagaacccccagttataaatgaggagtgcagtttgaaatgctgctcttctgataccaaaggctctcctttggccagcatttctaaaagtgggaaagtggatggtctaaaactactgaacaatatgcatgagaaaaccagggattcaagtgacatagaaacagcagtggtgaaacatgttttatccgagttgaaggaactctcttacagatccttaggtgaggatgtcagtgactctggaacatcaaagccatcaaaaccattacttttctcttctgcttctagtcagaatcacatacctattgaaccagactacaaattcagtacattgctaatgatgttgaaagatatgcatgatagtaagacgaaggagcagcggttgatgactgctcaaaacctggtctcttaccggagtcctggtcgtggggactgttctactaatagtcctgtaggagtctctaaggttttggtttcaggaggctccacacacaattcagagaaaaagggagatggcactcagaactccgccaatcctagccctagtgggggtgactctgcattatctggcgagttgtctgcttccctacctggcttactgtccgacaagagagacctccctgcttctggtaaaagtcgttcagactgtgttactaggcgcaactgtggacgatcaaagccttcatccaaattgcgagatgctttttcagcccaaatggtaaagaacacagtgaaccgtaaagccttaaagaccgagcgcaaaagaaaactgaatcagcttccaagtgtgactcttgatgctgtactgcagggagaccgagaacgtggaggttcattgagaggtggggcagaagatcctagtaaagaggatccccttcagataatgggccacttaacaagtgaagatggtgaccatttttctgatgtgcatttcgatagcaaggttaagcaatctgatcctggtaaaatttctgaaaaaggactctcttttgaaaacggaaaaggcccagagctggactctgtaatgaacagtgagaatgatgaactcaatggtgtaaatcaagtggtgcctaaaaagcggtggcagcgtttaaaccaaaggcgcactaaacctcgtaagcgcatgaacagatttaaagagaaagaaaactctgagtgtgcctttagggtcttacttcctagtgaccctgtgcaggaggggcgggatgagtttccagagcatagaactccttcagcaagcatacttgaggaaccactgacagagcaaaatcatgctgactgcttagattcagctgggccacggttaaatgtttgtgataaatccagtgccagcattggtgacatggaaaaggagccaggaattcccagtttgacaccacaggctgagctccctgaaccagctgtgcggtcagagaagaaacgccttaggaagccaagcaagtggcttttggaatatacagaagaatatgatcagatatttgctcctaagaaaaaacaaaagaaggtacaggagcaggtgcacaaggtaagttcccgctgtgaagaggaaagccttctagcccgaggtcgatctagtgctcagaacaagcaggtggacgagaattctttgatttcaaccaaagaagagcctccagttcttgaaagggaggctccgtttttggagggccccttggctcagtcagaacttggaggtggacatgctgagttgccgcagctgaccttgtctgtgcctgtggctccggaagtctctccacggcctgcccttgagtctgaggaattgctagttaaaacgccaggaaattatgaaagtaaacgtcaaagaaaaccaactaagaaacttcttgaatccaatgatttagaccctggatttatgcccaagaagggggaccttggcctttctaaaaagtgctatgaagctggtcacctggagaatggcataactgaatcttgtgccacatcttattcaaaagattttggtggaggcactaccaagatatttgacaagccaaggaagcgaaaacgacagaggcatgctgcagccaagatgcagtgtaaaaaagtgaaaaatgatgactcgtcaaaagagattccaggctcagagggagaactaatgcctcacaggacggccacaagccccaaggagactgttgaggaaggtgtagaacacgatcccgggatgcctgcctctaaaaaaatgcagggtgaacgcggtggaggagctgcactcaaggagaatgtctgtcagaattgtgaaaaattgggtgagctgctgttatgtgaggctcagtgctgtggggctttccacctggagtgccttggattgactgagatgccaagaggaaaatttatctgcaatgaatgtcgcacaggaatccatacctgttttgtatgtaagcagagtggggaagatgttaaaaggtgccttctacccttgtgtggaaagttttaccatgaagagtgtgtccagaagtacccacccactgttatgcagaacaagggcttccggtgctccctccacatctgtataacctgtcatgctgctaatccagccaatgtttctgcatctaaaggtcggttgatgcgctgtgtccgctgtcctgtggcataccacgccaatgacttttgcctggctgctgggtcaaagatccttgcatctaatagtatcatctgccctaatcactttacccctaggcggggctgccgaaatcatgagcatgttaatgttagctggtgctttgtgtgctcagaaggaggcagccttctgtgctgtgattcttgccctgctgcttttcatcgtgaatgcctgaacattgatatccctgaaggaaactggtattgcaatgactgtaaagcaggcaaaaagccacactacagggagattgtctgggtaaaagttggacgatacaggtggtggccagctgagatctgccatcctcgagctgttccttccaacattgataagatgagacatgatgtgggagagttcccagtcctcttttttggatctaatgactatttgtggactcaccaggcccgagtcttcccttacatggagggtgacgtgagcagcaaggataagatgggcaaaggagtggatgggacatataaaaaagtggagcacatgatccagaagaaccaatgtctcttcaccaacacccagtgtaaggtttgctgcgccttgcttatttctgagtcccagaagctggcacattaccagagcaaaaaacatgccaacaaagtgaagagatacctagcaatccatggaatggagacattaaagggggaaacgaagaagctagactcagatcagaagagcagcagaagcaaagacaagaaccagtgctgccccatctgtaacatgaccttttcctcccctgtcgtggcccagtcgcactacctggggaagacccacgcaaagaacttaaagctgaagcagcagtccactaaggtggaagccttgcaccagaatagagagatgatagacccagacaagttctgcagcctctgccatgcaactttcaacgaccctgtcatggctcaacaacattatgtgggcaagaaacacagaaaacaggagaccaagctcaaactaatggcacgctatgggcggctggcggaccctgctgtcactgactttccagctggaaagggctacccctgcaaaacatgtaagatagtgctgaactccatagaacagtaccaagctcatgtcagcggcttcaaacacaagaaccagtcaccaaaaacagtggcatcatccctgggccagattccaatgcaaaggcaacccattcagaaagactcaaccaccttggaagactagagctaggggtggccgtgtcacagtctggccaaggaaatgaaattgggagttgctgtgtggaaactcaactctctggaacttcttccttcctcctgcctctgcacaaatgtgacggcagcagctgaagccaacatcttgcgaccatgagagaaaaacctggagaacggacgagtcctcaaccctgacttcagaccaacctacacccacctctggacgtggggctaagtgagagatggatacactgtttcatttaggccctgctcacttaggtttctgttattcacaccccaacgaaaccctccatggtccagggcaccgggcaaagtacagaagggcacgagtttacttcccgcttccctggagaccaccaaccctctcacccttccagcccagcctctgccacttcccagctgtcggtcctcctccaaacagacgtgcatgccaacacccggtgggtgtgaggcttgtaggcccaagtctagagaggctgagtctggcaaagcctgaaagcccctgtcctagcaagccaggccacaggtctagagtatccgagaccagtgaataaggggacggggggtgctactgaggctgtgagaagccccaggaccagcccagggtagttagaactgagtgaggttagccgggactaacctcactcagatccctcctccccagttcccctccatccactttggtttggaagcctccccagagctctcccaggctgtcatcagctctaaactctctgcctccacaaaaatgccctgggcaacctgtaactcacagccctgctgtcttcagagtataaactggagacagatgtacccagaattgaggacgggtgggaaatgaggagaaatgaaggctgaggaggggtcattctcacagtccctccctttcggtcacaggagggtgttgcccatgcttttgggtgggtcccaggcccatagctgcaaatattcatattggctactcttcagtgagcaaggggtatatgccaggcactggcattgtgcttgacatacatcatcatactgagtcctcacggaagatgtattattcccatttcacagaagatgaaactgaggcttgaggttaagtgatttgtccgtgaccacaaagagttttcgggactcaaacccagatctgtcactgggcaaggtggctcacacctataatcccagccctttgggagactgaggccagcagatctcctgtggccaggagttcaagcctggccaacaatggcaaaaccccgtctctaccaaaaatacaaaaattagctgggcgtggtggcacacacccgtaatcccagctactcaggtggctgaggcaggagaatcacttgaacccaggaggtggtggttgcagtgagcctagatcgtgccactgcattccagcctgagcgacagagtaagactctgtctccaaaaaaaacccagatctgtccgactctgacacccaacctttaatcactcactttctgtcaatgtcacctccgttttgaccagccaagctagacctccctggagcctgtggagaagccaaggtagaaaagggttggaaaagaatgataaaataggccaggtgcggtggctcaagcctgtactcccagcacttttggaggccgagacaggcagattgcttgagcccaggagttcaagaccagcctgggcaacataatgagaccctgtttcaacttaaaaaaaagaaatggtaatgaacaattgtcaattctgagcagctgggtatggtatgaccctgtgtactttttctgtattttaaaatgttctcaaaataaaacttgttt

SEQ ID NO: 1027 - DNA, 8406 bp, Homo sapiens
gacgcggggggaggggggtgcggcgagcggccccgctctctccccaccgctccgctcgcaccccagtgtaatgagggtcaccccctccccccagctggcccgggagggggcgcggggcacggttgatgccggcccaggatggatcagacctgtgaactacccagaagaaattgtctgctgcccttttccaatccagtgaatttagatgcccctgaagacaaggacagccctttcggtaatggtcaatccaatttttctgagccacttaatgggtgtactatgcagttatcgactgtcagtggaacatcccaaaatgcttatggacaagattctccatcttgttacattccactgcggagactacaggatttggcctccatgatcaatgtagagtatttaaatgggtctgctgatggatcagaatcctttcaagaccctgaaaaaagtgattcaagagctcagacgccaattgtttgcacttccttgagtcctggtggtcctacagcacttgctatgaaacaggaaccctcttgtaataactcccctgaactccaggtaaaagtaacaaagactatcaagaatggctttctgcactttgagaattttacttgtgtggacgatgcagatgtagattctgaaatggacccagaacagccagtcacagaggatgagagtatagaggagatctttgaggaaactcagaccaatgccacctgcaattatgagactaaatcagagaatggtgtaaaagtggccatgggaagtgaacaagacagcacaccagagagtagacacggtgcagtcaaatcgccattcttgccattagctcctcagactgaaacacagaaaaataagcaaagaaatgaagtggacggcagcaatgaaaaagcagcccttctcccagcccccttttcactaggagacacaaacattacaatagaagagcaattaaactcaataaatttatcttttcaggatgatccagattccagtaccagtacattaggaaacatgctagaattacctggaacttcatcatcatctacttcacaggaattgccattttgtcaacctaagaaaaagtctacgccactgaagtatgaagttggagatctcatctgggcaaaattcaagagacgcccatggtggccctgcaggatttgttctgatccgttgattaacacacattcaaaaatgaaagtttccaaccggaggccctatcggcagtactacgtggaggcttttggagatccttctgagagagcctgggtggctggaaaagcaatcgtcatgtttgaaggcagacatcaattcgaagagctacctgtccttaggagaagagggaaacagaaagaaaaaggatataggcataaggttcctcagaaaattttgagtaaatgggaagccagtgttggacttgcagaacagtatgatgttcccaaggggtcaaagaaccgaaaatgtattcctggttcaatcaagttggacagtgaagaagatatgccatttgaagactgcacaaatgatcctgagtcagaacatgacctgttgcttaatggctgtttgaaatcactggcttttgattctgaacattctgcagatgagaaggaaaagccttgcgctaaatctcgagccagaaagagctctgataatccaaaaaggactagtgtgaaaaagggccacatacaatttgaagcacataaagatgaacggaggggaaagattccagagaaccttggcctaaactttatctctggggatatatctgatacgcaggcctctaatgaactttccaggatagcaaatagcctcacagggtccaacactgccccaggaagttttctgttttcttcctgtggaaaaaacactgcaaagaaagaatttgagacttcaaatggtgactctttattgggcttgcctgagggtgctttgatctcaaagtgttctcgagagaagaataaaccccaacgaagcctggtgtgtggttcaaaagtgaagctctgctatattggagcaggtgatgaggaaaagcgaagtgattccattagtatctgtaccacttctgatgatggaagcagtgacctggatcccatagaacacagctcagagtctgataacagtgtccttgaaattccagatgctttcgatagaacagagaacatgttatctatgcagaaaaatgaaaagataaagtattctaggtttgctgccacaaacactagggtaaaagcaaaacagaagcctctcattagtaactcacatacagaccacttaatgggttgtactaagagtgcagagcctggaaccgagacgtctcaggttaatctctctgatctgaaggcatctactcttgttcacaaaccccagtcagattttacaaatgatgctctctctccaaaattcaacctgtcatcaagcatatccagtgagaactcgttaataaagggtggggcagcaaatcaagctctattacattcgaaaagcaaacagcccaagttccgaagtataaagtgcaaacacaaagaaaatccagttatggcagaacccccagttataaatgaggagtgcagtttgaaatgctgctcttctgataccaaaggctctcctttggccagcatttctaaaagtgggaaagtggatggtctaaaactactgaacaatatgcatgagaaaaccagggattcaagtgacatagaaacagcagtggtgaaacatgttttatccgagttgaaggaactctcttacagatccttaggtgaggatgtcagtgactctggaacatcaaagccatcaaaaccattacttttctcttctgcttctagtcagaatcacatacctattgaaccagactacaaattcagtacattgctaatgatgttgaaagatatgcatgatagtaagacgaaggagcagcggttgatgactgctcaaaacctggtctcttaccggagtcctggtcgtggggactgttctactaatagtcctgtaggagtctctaaggttttggtttcaggaggctccacacacaattcagagaaaaagggagatggcactcagaactccgccaatcctagccctagtgggggtgactctgcattatctggcgagttgtctgcttccctacctggcttactgtccgacaagagagacctccctgcttctggtaaaagtcgttcagactgtgttactaggcgcaactgtggacgatcaaagccttcatccaaattgcgagatgctttttcagcccaaatggtaaagaacacagtgaaccgtaaagccttaaagaccgagcgcaaaagaaaactgaatcagcttccaagtgtgactcttgatgctgtactgcagggagaccgagaacgtggaggttcattgagaggtggggcagaagatcctagtaaagaggatccccttcagataatgggccacttaacaagtgaagatggtgaccatttttctgatgtgcatttcgatagcaaggttaagcaatctgatcctggtaaaatttctgaaaaaggactctcttttgaaaacggaaaaggcccagagctggactctgtaatgaacagtgagaatgatgaactcaatggtgtaaatcaagtggtgcctaaaaagcggtggcagcgtttaaaccaaaggcgcactaaacctcgtaagcgcatgaacagatttaaagagaaagaaaactctgagtgtgcctttagggtcttacttcctagtgaccctgtgcaggaggggcgggatgagtttccagagcatagaactccttcagcaagcatacttgaggaaccactgacagagcaaaatcatgctgactgcttagattcagctgggccacggttaaatgtttgtgataaatccagtgccagcattggtgacatggaaaaggagccaggaattcccagtttgacaccacaggctgagctccctgaaccagctgtgcggtcagagaagaaacgccttaggaagccaagcaagtggcttttggaatatacagaagaatatgatcagatatttgctcctaagaaaaaacaaaagaaggtacaggagcaggtgcacaaggtaagttcccgctgtgaagaggaaagccttctagcccgaggtcgatctagtgctcagaacaagcaggtggacgagaattctttgatttcaaccaaagaagagcctccagttcttgaaagggaggctccgtttttggagggccccttggctcagtcagaacttggaggtggacatgctgagttgccgcagctgaccttgtctgtgcctgtggctccggaagtctctccacggcctgcccttgagtctgaggaattgctagttaaaacgccaggaaattatgaaagtaaacgtcaaagaaaaccaactaagaaacttcttgaatccaatgatttagaccctggatttatgcccaagaagggggaccttggcctttctaaaaagtgctatgaagctggtcacctggagaatggcataactgaatcttgtgccacatcttattcaaaagattttggtggaggcactaccaagatatttgacaagccaaggaagcgaaaacgacagaggcatgctgcagccaagatgcagtgtaaaaaagtgaaaaatgatgactcgtcaaaagagattccaggctcagagggagaactaatgcctcacaggacggccacaagccccaaggagactgttgaggaaggtgtagaacacgatcccgggatgcctgcctctaaaaaaatgcagggtgaacgcggtggaggagctgcactcaaggagaatgtctgtcagaattgtgaaaaattgggtgagctgctgttatgtgaggctcagtgctgtggggctttccacctggagtgccttggattgactgagatgccaagaggaaaatttatctgcaatgaatgtcgcacaggaatccatacctgttttgtatgtaagcagagtggggaagatgttaaaaggtgccttctacccttgtgtggaaagttttaccatgaagagtgtgtccagaagtacccacccactgttatgcagaacaagggcttccggtgctccctccacatctgtataacctgtcatgctgctaatccagccaatgtttctgcatctaaaggtcggttgatgcgctgtgtccgctgtcctgtggcataccacgccaatgacttttgcctggctgctgggtcaaagatccttgcatctaatagtatcatctgccctaatcactttacccctaggcggggctgccgaaatcatgagcatgttaatgttagctggtgctttgtgtgctcagaaggaggcagccttctgtgctgtgattcttgccctgctgcttttcatcgtgaatgcctgaacattgatatccctgaaggaaactggtattgcaatgactgtaaagcaggcaaaaagccacactacagggagattgtctgggtaaaagttggacgatacaggtggtggccagctgagatctgccatcctcgagctgttccttccaacattgataagatgagacatgatgtgggagagttcccagtcctcttttttggatctaatgactatttgtggactcaccaggcccgagtcttcccttacatggagggtgacgtgagcagcaaggataagatgggcaaaggagtggatgggacatataaaaaagtggagcacatgatccagaagaaccaatgtctcttcaccaacacccagtgtaaggtttgctgcgccttgcttatttctgagtcccagaagctggcacattaccagagcagcagaagcaaagacaagaaccagtgctgccccatctgtaacatgaccttttcctcccctgtcgtggcccagtcgcactacctggggaagacccacgcaaagaacttaaagctgaagcagcagtccactaaggtggaagccttgcaccagaatagagagatgatagacccagacaagttctgcagcctctgccatgcaactttcaacgaccctgtcatggctcaacaacattatgtgggcaagaaacacagaaaacaggagaccaagctcaaactaatggcacgctatgggcggctggcggaccctgctgtcactgactttccagctggaaagggctacccctgcaaaacatgtaagatagtgctgaactccatagaacagtaccaagctcatgtcagcggcttcaaacacaagaaccagtcaccaaaaacagtggcatcatccctgggccagattccaatgcaaaggcaacccattcagaaagactcaaccaccttggaagactagaggtgattctgcccagcatcccatattgggccagccatgagccagcttcccgtgactgctcagcccttggctccctcttgctcgttgttctcaccaggaaagtacacgggcctgaggcaggattgggccacagacagcctctcattggtccgggctaattcactcctgctgctcccctttggcaggggtcctgtaggtcatgacaggggaggcaagggtattgagagactcggggtctcgcggggtggtagtttggagggtggctttccccatttcccaacccctctgggccttaggtgctgaggcccctgccacctgtctttcctctaaaggtcagttttgggccagttcttgcaactaaagagcagagatctctctgggccctagacatttccagcaaaacctggaactttcatgccaaacctggggcagggcaggaaacagaggaaatggctgcaacatgggagcttggagctaatacgacactctgccttcccccagaaggtgcaggctttcctgagtcttagaccagatatggccagttgcgcaggtttctgccaactgtgaagtatcctcctggagcagtgacacaatcttggcggagcattgctacccccgctgccccctccacagttcctgaatggtgctaaggatctgcagcagttggcaacgagctggggctgggggcggcctccatgtccactgagatcataggacactccaatggggatgggacctttcccctcctccatcagaggtgctctgaccctaggttacacgggaaagtgccccacatgcaagtctccctgagggttctgcccctaaaggcagactgcctcatgcccgctagctgtgaggttcattgctaccctcggccctactagccctctcttcccccttgtgcagcggaccacttgcccagtttgctgtggtgctagccttccccatcatccaccgggtgatttctgggtcccagggaaagaaagagagagctgatgcaggtttctacagtgaggaacaggcgtttcccaggccccacacccagatttctctatctttgctgtgttttatggcctgggactgagtccacacggatagatttttccttgtaaccttgagacgagaattccaaggagtgtcaccatcagaggcttctcttcattgtgtcaaagaagcccctagctgctctcgtggcctccttcccccactccctatcccttcacctgtgaaatgcctttgctttgcatattgtgtgtggatgtgtgtgtgtgtgtgtgtgtgtttgtgtgtatgtgtgtgcttctgtgtgtgcctaatgctctgtctcttggtcactgaagcatccaaataaagaatttccctcatgggccagactacaacttaacagacctagggttttgagccatattgccattggatctagtatgtctgtcttgacccctcacccccaccccattcagacctcagtagtccccagtagtcactttaggagttgggacagagtcgagcaccctgtgaaagtctcccttgagttcaggtgccctgaactcagtacagcctcatcttctcatccaccaccttctcctgcttctcctgtcacatagggcctcatgaaggtctttaaagggtttaagctggggatctgctttatgtttgagagaactgttctggctgttatgtaaaggagtgcagggaggggcaggaaaggagacaaggaggccagtatggacactgtgtccagtatggctttccaggctaatcacttagggcagagacccagccttattcatctctacttcctgatgtccatagtggtgtgtcatgaatttttattgaatgaacaaatgaggtgtatgaggagagatggttttctcctgctcagctcttacacagtgataggtttgttccatgggacttatcataggcctggtgattcttgaaagagcatttttcatgactcaaaaatgagctgagaaggagtgttatggccaggtgcggcgtcatgcacctatagtcccagctgctcaggaggctaaggcagaaagaccattcaagcccaggagttccagcctgaagtatgctgtgatcatgcctgtgaataaccactgcactccagccagggcaacataacaagactctatctaa

SEQ ID NO: 1028 - DNA, 6638 bp, Homo sapiens
ggccgggtagggggttcgcctgcggccgcgtctgctcggggcctgaggcctcgaagaccccagcccaagcccccaggttgatgccggcccaggatggatcagacctgtgaactacccagaagaaattgtctgctgcccttttccaatccagtgaatttagatgcccctgaagacaaggacagccctttcggatgatccagattccagtaccagtacattaggaaacatgctagaattacctggaacttcatcatcatctacttcacaggaattgccattttgtcaacctaagaaaaagtctacgccactgaagtatgaagttggagatctcatctgggcaaaattcaagagacgcccatggtggccctgcaggatttgttctgatccgttgattaacacacattcaaaaatgaaagtttccaaccggaggccctatcggcagtactacgtggaggcttttggagatccttctgagagagcctgggtggctggaaaagcaatcgtcatgtttgaaggcagacatcaattcgaagagctacctgtccttaggagaagagggaaacagaaagaaaaaggatataggcataaggttcctcagaaaattttgagtaaatgggaagccagtgttggacttgcagaacagtatgatgttcccaaggggtcaaagaaccgaaaatgtattcctggttcaatcaagttggacagtgaagaagatatgccatttgaagactgcacaaatgatcctgagtcagaacatgacctgttgcttaatggctgtttgaaatcactggcttttgattctgaacattctgcagatgagaaggaaaagccttgcgctaaatctcgagccagaaagagctctgataatccaaaaaggactagtgtgaaaaagggccacatacaatttgaagcacataaagatgaacggaggggaaagattccagagaaccttggcctaaactttatctctggggatatatctgatacgcaggcctctaatgaactttccaggatagcaaatagcctcacagggtccaacactgccccaggaagttttctgttttcttcctgtggaaaaaacactgcaaagaaagaatttgagacttcaaatggtgactctttattgggcttgcctgagggtgctttgatctcaaagtgttctcgagagaagaataaaccccaacgaagcctggtgtgtggttcaaaagtgaagctctgctatattggagcaggtgatgaggaaaagcgaagtgattccattagtatctgtaccacttctgatgatggaagcagtgacctggatcccatagaacacagctcagagtctgataacagtgtccttgaaattccagatgctttcgatagaacagagaacatgttatctatgcagaaaaatgaaaagataaagtattctaggtttgctgccacaaacactagggtaaaagcaaaacagaagcctctcattagtaactcacatacagaccacttaatgggttgtactaagagtgcagagcctggaaccgagacgtctcaggttaatctctctgatctgaaggcatctactcttgttcacaaaccccagtcagattttacaaatgatgctctctctccaaaattcaacctgtcatcaagcatatccagtgagaactcgttaataaagggtggggcagcaaatcaagctctattacattcgaaaagcaaacagcccaagttccgaagtataaagtgcaaacacaaagaaaatccagttatggcagaacccccagttataaatgaggagtgcagtttgaaatgctgctcttctgataccaaaggctctcctttggccagcatttctaaaagtgggaaagtggatggtctaaaactactgaacaatatgcatgagaaaaccagggattcaagtgacatagaaacagcagtggtgaaacatgttttatccgagttgaaggaactctcttacagatccttaggtgaggatgtcagtgactctggaacatcaaagccatcaaaaccattacttttctcttctgcttctagtcagaatcacatacctattgaaccagactacaaattcagtacattgctaatgatgttgaaagatatgcatgatagtaagacgaaggagcagcggttgatgactgctcaaaacctggtctcttaccggagtcctggtcgtggggactgttctactaatagtcctgtaggagtctctaaggttttggtttcaggaggctccacacacaattcagagaaaaagggagatggcactcagaactccgccaatcctagccctagtgggggtgactctgcattatctggcgagttgtctgcttccctacctggcttactgtccgacaagagagacctccctgcttctggtaaaagtcgttcagactgtgttactaggcgcaactgtggacgatcaaagccttcatccaaattgcgagatgctttttcagcccaaatggtaaagaacacagtgaaccgtaaagccttaaagaccgagcgcaaaagaaaactgaatcagcttccaagtgtgactcttgatgctgtactgcagggagaccgagaacgtggaggttcattgagaggtggggcagaagatcctagtaaagaggatccccttcagataatgggccacttaacaagtgaagatggtgaccatttttctgatgtgcatttcgatagcaaggttaagcaatctgatcctggtaaaatttctgaaaaaggactctcttttgaaaacggaaaaggcccagagctggactctgtaatgaacagtgagaatgatgaactcaatggtgtaaatcaagtggtgcctaaaaagcggtggcagcgtttaaaccaaaggcgcactaaacctcgtaagcgcatgaacagatttaaagagaaagaaaactctgagtgtgcctttagggtcttacttcctagtgaccctgtgcaggaggggcgggatgagtttccagagcatagaactccttcagcaagcatacttgaggaaccactgacagagcaaaatcatgctgactgcttagattcagctgggccacggttaaatgtttgtgataaatccagtgccagcattggtgacatggaaaaggagccaggaattcccagtttgacaccacaggctgagctccctgaaccagctgtgcggtcagagaagaaacgccttaggaagccaagcaagtggcttttggaatatacagaagaatatgatcagatatttgctcctaagaaaaaacaaaagaaggtacaggagcaggtgcacaaggtaagttcccgctgtgaagaggaaagccttctagcccgaggtcgatctagtgctcagaacaagcaggtggacgagaattctttgatttcaaccaaagaagagcctccagttcttgaaagggaggctccgtttttggagggccccttggctcagtcagaacttggaggtggacatgctgagttgccgcagctgaccttgtctgtgcctgtggctccggaagtctctccacggcctgcccttgagtctgaggaattgctagttaaaacgccaggaaattatgaaagtaaacgtcaaagaaaaccaactaagaaacttcttgaatccaatgatttagaccctggatttatgcccaagaagggggaccttggcctttctaaaaagtgctatgaagctggtcacctggagaatggcataactgaatcttgtgccacatcttattcaaaagattttggtggaggcactaccaagatatttgacaagccaaggaagcgaaaacgacagaggcatgctgcagccaagatgcagtgtaaaaaagtgaaaaatgatgactcgtcaaaagagattccaggctcagagggagaactaatgcctcacaggacggccacaagccccaaggagactgttgaggaaggtgtagaacacgatcccgggatgcctgcctctaaaaaaatgcagggtgaacgcggtggaggagctgcactcaaggagaatgtctgtcagaattgtgaaaaattgggtgagctgctgttatgtgaggctcagtgctgtggggctttccacctggagtgccttggattgactgagatgccaagaggaaaatttatctgcaatgaatgtcgcacagtggagcacatgatccagaagaaccaatgtctcttcaccaacacccagtgtaaggtttgctgcgccttgcttatttctgagtcccagaagctggcacattaccagagcaaaaaacatgccaacaaagtgaagagatacctagcaatccatggaatggagacattaaagggggaaacgaagaagctagactcagatcagaagagcagcagaagcaaagacaagaaccagtgctgccccatctgtaacatgaccttttcctcccctgtcgtggcccagtcgcactacctggggaagacccacgcaaagaacttaaagctgaagcagcagtccactaaggtggaagccttgcaccagaatagagagatgatagacccagacaagttctgcagcctctgccatgcaactttcaacgaccctgtcatggctcaacaacattatgtgggcaagaaacacagaaaacaggagaccaagctcaaactaatggcacgctatgggcggctggcggaccctgctgtcactgactttccagctggaaagggctacccctgcaaaacatgtaagatagtgctgaactccatagaacagtaccaagctcatgtcagcggcttcaaacacaagaaccagtcaccaaaaacagtggcatcatccctgggccagattccaatgcaaaggcaacccattcagaaagactcaaccaccttggaagactagagctaggggtggccgtgtcacagtctggccaaggaaatgaaattgggagttgctgtgtggaaactcaactctctggaacttcttccttcctcctgcctctgcacaaatgtgacggcagcagctgaagccaacatcttgcgaccatgagagaaaaacctggagaacggacgagtcctcaaccctgacttcagaccaacctacacccacctctggacgtggggctaagtgagagatggatacactgtttcatttaggccctgctcacttaggtttctgttattcacaccccaacgaaaccctccatggtccagggcaccgggcaaagtacagaagggcacgagtttacttcccgcttccctggagaccaccaaccctctcacccttccagcccagcctctgccacttcccagctgtcggtcctcctccaaacagacgtgcatgccaacacccggtgggtgtgaggcttgtaggcccaagtctagagaggctgagtctggcaaagcctgaaagcccctgtcctagcaagccaggccacaggtctagagtatccgagaccagtgaataaggggacggggggtgctactgaggctgtgagaagccccaggaccagcccagggtagttagaactgagtgaggttagccgggactaacctcactcagatccctcctccccagttcccctccatccactttggtttggaagcctccccagagctctcccaggctgtcatcagctctaaactctctgcctccacaaaaatgccctgggcaacctgtaactcacagccctgctgtcttcagagtataaactggagacagatgtacccagaattgaggacgggtgggaaatgaggagaaatgaaggctgaggaggggtcattctcacagtccctccctttcggtcacaggagggtgttgcccatgcttttgggtgggtcccaggcccatagctgcaaatattcatattggctactcttcagtgagcaaggggtatatgccaggcactggcattgtgcttgacatacatcatcatactgagtcctcacggaagatgtattattcccatttcacagaagatgaaactgaggcttgaggttaagtgatttgtccgtgaccacaaagagttttcgggactcaaacccagatctgtcactgggcaaggtggctcacacctataatcccagccctttgggagactgaggccagcagatctcctgtggccaggagttcaagcctggccaacaatggcaaaaccccgtctctaccaaaaatacaaaaattagctgggcgtggtggcacacacccgtaatcccagctactcaggtggctgaggcaggagaatcacttgaacccaggaggtggtggttgcagtgagcctagatcgtgccactgcattccagcctgagcgacagagtaagactctgtctccaaaaaaaacccagatctgtccgactctgacacccaacctttaatcactcactttctgtcaatgtcacctccgttttgaccagccaagctagacctccctggagcctgtggagaagccaaggtagaaaagggttggaaaagaatgataaaataggccaggtgcggtggctcaagcctgtactcccagcacttttggaggccgagacaggcagattgcttgagcccaggagttcaagaccagcctgggcaacataatgagaccctgtttcaacttaaaaaaaagaaatggtaatgaacaattgtcaattctgagcagctgggtatggtatgaccctgtgtactttttctgtattttaaaatgttctcaaaataaaacttgttt

SEQ ID NO: 1029 - DNA, 7621 bp, Homo sapiens
ggccgggtagggggttcgcctgcggccgcgtctgctcggggcctgaggcctcgaagaccccagcccaagcccccaggttgatgccggcccaggatggatcagacctgtgaactacccagaagaaattgtctgctgcccttttccaatccagtgaatttagatgcccctgaagacaaggacagccctttcggatgatccagattccagtaccagtacattaggaaacatgctagaattacctggaacttcatcatcatctacttcacaggaattgccattttgtcaacctaagaaaaagtctacgccactgaagtatgaagttggagatctcatctgggcaaaattcaagagacgcccatggtggccctgcaggatttgttctgatccgttgattaacacacattcaaaaatgaaagtttccaaccggaggccctatcggcagtactacgtggaggcttttggagatccttctgagagagcctgggtggctggaaaagcaatcgtcatgtttgaaggcagacatcaattcgaagagctacctgtccttaggagaagagggaaacagaaagaaaaaggatataggcataaggttcctcagaaaattttgagtaaatgggaagccagtgttggacttgcagaacagtatgatgttcccaaggggtcaaagaaccgaaaatgtattcctggttcaatcaagttggacagtgaagaagatatgccatttgaagactgcacaaatgatcctgagtcagaacatgacctgttgcttaatggctgtttgaaatcactggcttttgattctgaacattctgcagatgagaaggaaaagccttgcgctaaatctcgagccagaaagagctctgataatccaaaaaggactagtgtgaaaaagggccacatacaatttgaagcacataaagatgaacggaggggaaagattccagagaaccttggcctaaactttatctctggggatatatctgatacgcaggcctctaatgaactttccaggatagcaaatagcctcacagggtccaacactgccccaggaagttttctgttttcttcctgtggaaaaaacactgcaaagaaagaatttgagacttcaaatggtgactctttattgggcttgcctgagggtgctttgatctcaaagtgttctcgagagaagaataaaccccaacgaagcctggtgtgtggttcaaaagtgaagctctgctatattggagcaggtgatgaggaaaagcgaagtgattccattagtatctgtaccacttctgatgatggaagcagtgacctggatcccatagaacacagctcagagtctgataacagtgtccttgaaattccagatgctttcgatagaacagagaacatgttatctatgcagaaaaatgaaaagataaagtattctaggtttgctgccacaaacactagggtaaaagcaaaacagaagcctctcattagtaactcacatacagaccacttaatgggttgtactaagagtgcagagcctggaaccgagacgtctcaggttaatctctctgatctgaaggcatctactcttgttcacaaaccccagtcagattttacaaatgatgctctctctccaaaattcaacctgtcatcaagcatatccagtgagaactcgttaataaagggtggggcagcaaatcaagctctattacattcgaaaagcaaacagcccaagttccgaagtataaagtgcaaacacaaagaaaatccagttatggcagaacccccagttataaatgaggagtgcagtttgaaatgctgctcttctgataccaaaggctctcctttggccagcatttctaaaagtgggaaagtggatggtctaaaactactgaacaatatgcatgagaaaaccagggattcaagtgacatagaaacagcagtggtgaaacatgttttatccgagttgaaggaactctcttacagatccttaggtgaggatgtcagtgactctggaacatcaaagccatcaaaaccattacttttctcttctgcttctagtcagaatcacatacctattgaaccagactacaaattcagtacattgctaatgatgttgaaagatatgcatgatagtaagacgaaggagcagcggttgatgactgctcaaaacctggtctcttaccggagtcctggtcgtggggactgttctactaatagtcctgtaggagtctctaaggttttggtttcaggaggctccacacacaattcagagaaaaagggagatggcactcagaactccgccaatcctagccctagtgggggtgactctgcattatctggcgagttgtctgcttccctacctggcttactgtccgacaagagagacctccctgcttctggtaaaagtcgttcagactgtgttactaggcgcaactgtggacgatcaaagccttcatccaaattgcgagatgctttttcagcccaaatggtaaagaacacagtgaaccgtaaagccttaaagaccgagcgcaaaagaaaactgaatcagcttccaagtgtgactcttgatgctgtactgcagggagaccgagaacgtggaggttcattgagaggtggggcagaagatcctagtaaagaggatccccttcagataatgggccacttaacaagtgaagatggtgaccatttttctgatgtgcatttcgatagcaaggttaagcaatctgatcctggtaaaatttctgaaaaaggactctcttttgaaaacggaaaaggcccagagctggactctgtaatgaacagtgagaatgatgaactcaatggtgtaaatcaagtggtgcctaaaaagcggtggcagcgtttaaaccaaaggcgcactaaacctcgtaagcgcatgaacagatttaaagagaaagaaaactctgagtgtgcctttagggtcttacttcctagtgaccctgtgcaggaggggcgggatgagtttccagagcatagaactccttcagcaagcatacttgaggaaccactgacagagcaaaatcatgctgactgcttagattcagctgggccacggttaaatgtttgtgataaatccagtgccagcattggtgacatggaaaaggagccaggaattcccagtttgacaccacaggctgagctccctgaaccagctgtgcggtcagagaagaaacgccttaggaagccaagcaagtggcttttggaatatacagaagaatatgatcagatatttgctcctaagaaaaaacaaaagaaggtacaggagcaggtgcacaaggtaagttcccgctgtgaagaggaaagccttctagcccgaggtcgatctagtgctcagaacaagcaggtggacgagaattctttgatttcaaccaaagaagagcctccagttcttgaaagggaggctccgtttttggagggccccttggctcagtcagaacttggaggtggacatgctgagttgccgcagctgaccttgtctgtgcctgtggctccggaagtctctccacggcctgcccttgagtctgaggaattgctagttaaaacgccaggaaattatgaaagtaaacgtcaaagaaaaccaactaagaaacttcttgaatccaatgatttagaccctggatttatgcccaagaagggggaccttggcctttctaaaaagtgctatgaagctggtcacctggagaatggcataactgaatcttgtgccacatcttattcaaaagattttggtggaggcactaccaagatatttgacaagccaaggaagcgaaaacgacagaggcatgctgcagccaagatgcagtgtaaaaaagtgaaaaatgatgactcgtcaaaagagattccaggctcagagggagaactaatgcctcacaggacggccacaagccccaaggagactgttgaggaaggtgtagaacacgatcccgggatgcctgcctctaaaaaaatgcagggtgaacgcggtggaggagctgcactcaaggagaatgtctgtcagaattgtgaaaaattgggtgagctgctgttatgtgaggctcagtgctgtggggctttccacctggagtgccttggattgactgagatgccaagaggaaaatttatctgcaatgaatgtcgcacaggaatccatacctgttttgtatgtaagcagagtggggaagatgttaaaaggtgccttctacccttgtgtggaaagttttaccatgaagagtgtgtccagaagtacccacccactgttatgcagaacaagggcttccggtgctccctccacatctgtataacctgtcatgctgctaatccagccaatgtttctgcatctaaaggtcggttgatgcgctgtgtccgctgtcctgtggcataccacgccaatgacttttgcctggctgctgggtcaaagatccttgcatctaatagtatcatctgccctaatcactttacccctaggcggggctgccgaaatcatgagcatgttaatgttagctggtgctttgtgtgctcagaaggaggcagccttctgtgctgtgattcttgccctgctgcttttcatcgtgaatgcctgaacattgatatccctgaaggaaactggtattgcaatgactgtaaagcaggcaaaaagccacactacagggagattgtctgggtaaaagttggacgatacaggtggtggccagctgagatctgccatcctcgagctgttccttccaacattgataagatgagacatgatgtgggagagttcccagtcctcttttttggatctaatgactatttgtggactcaccaggcccgagtcttcccttacatggagggtgacgtgagcagcaaggataagatgggcaaaggagtggatgggacatataaaaaagtggagcacatgatccagaagaaccaatgtctcttcaccaacacccagtgtaaggtttgctgcgccttgcttatttctgagtcccagaagctggcacattaccagagcagcagaagcaaagacaagaaccagtgctgccccatctgtaacatgaccttttcctcccctgtcgtggcccagtcgcactacctggggaagacccacgcaaagaacttaaagctgaagcagcagtccactaaggtggaagccttgcaccagaatagagagatgatagacccagacaagttctgcagcctctgccatgcaactttcaacgaccctgtcatggctcaacaacattatgtgggcaagaaacacagaaaacaggagaccaagctcaaactaatggcacgctatgggcggctggcggaccctgctgtcactgactttccagctggaaagggctacccctgcaaaacatgtaagatagtgctgaactccatagaacagtaccaagctcatgtcagcggcttcaaacacaagaaccagtcaccaaaaacagtggcatcatccctgggccagattccaatgcaaaggcaacccattcagaaagactcaaccaccttggaagactagaggtgattctgcccagcatcccatattgggccagccatgagccagcttcccgtgactgctcagcccttggctccctcttgctcgttgttctcaccaggaaagtacacgggcctgaggcaggattgggccacagacagcctctcattggtccgggctaattcactcctgctgctcccctttggcaggggtcctgtaggtcatgacaggggaggcaagggtattgagagactcggggtctcgcggggtggtagtttggagggtggctttccccatttcccaacccctctgggccttaggtgctgaggcccctgccacctgtctttcctctaaaggtcagttttgggccagttcttgcaactaaagagcagagatctctctgggccctagacatttccagcaaaacctggaactttcatgccaaacctggggcagggcaggaaacagaggaaatggctgcaacatgggagcttggagctaatacgacactctgccttcccccagaaggtgcaggctttcctgagtcttagaccagatatggccagttgcgcaggtttctgccaactgtgaagtatcctcctggagcagtgacacaatcttggcggagcattgctacccccgctgccccctccacagttcctgaatggtgctaaggatctgcagcagttggcaacgagctggggctgggggcggcctccatgtccactgagatcataggacactccaatggggatgggacctttcccctcctccatcagaggtgctctgaccctaggttacacgggaaagtgccccacatgcaagtctccctgagggttctgcccctaaaggcagactgcctcatgcccgctagctgtgaggttcattgctaccctcggccctactagccctctcttcccccttgtgcagcggaccacttgcccagtttgctgtggtgctagccttccccatcatccaccgggtgatttctgggtcccagggaaagaaagagagagctgatgcaggtttctacagtgaggaacaggcgtttcccaggccccacacccagatttctctatctttgctgtgttttatggcctgggactgagtccacacggatagatttttccttgtaaccttgagacgagaattccaaggagtgtcaccatcagaggcttctcttcattgtgtcaaagaagcccctagctgctctcgtggcctccttcccccactccctatcccttcacctgtgaaatgcctttgctttgcatattgtgtgtggatgtgtgtgtgtgtgtgtgtgtgtttgtgtgtatgtgtgtgcttctgtgtgtgcctaatgctctgtctcttggtcactgaagcatccaaataaagaatttccctcatgggccagactacaacttaacagacctagggttttgagccatattgccattggatctagtatgtctgtcttgacccctcacccccaccccattcagacctcagtagtccccagtagtcactttaggagttgggacagagtcgagcaccctgtgaaagtctcccttgagttcaggtgccctgaactcagtacagcctcatcttctcatccaccaccttctcctgcttctcctgtcacatagggcctcatgaaggtctttaaagggtttaagctggggatctgctttatgtttgagagaactgttctggctgttatgtaaaggagtgcagggaggggcaggaaaggagacaaggaggccagtatggacactgtgtccagtatggctttccaggctaatcacttagggcagagacccagccttattcatctctacttcctgatgtccatagtggtgtgtcatgaatttttattgaatgaacaaatgaggtgtatgaggagagatggttttctcctgctcagctcttacacagtgataggtttgttccatgggacttatcataggcctggtgattcttgaaagagcatttttcatgactcaaaaatgagctgagaaggagtgttatggccaggtgcggcgtcatgcacctatagtcccagctgctcaggaggctaaggcagaaagaccattcaagcccaggagttccagcctgaagtatgctgtgatcatgcctgtgaataaccactgcactccagccagggcaacataacaagactctatctaa

SEQ ID NO: 1030 - DNA, 6024 bp, Homo sapiens
gttgatgccggcccaggatggatcagacctgtgaactacccagaagaaattgtctgctgcccttttccaatccagtgaatttagatgcccctgaagacaaggacagccctttcggtaatggtcaatccaatttttctgagccacttaatgggtgtactatgcagttatcgactgtcagtggaacatcccaaaatgcttatggacaagattctccatcttgttacattccactgcggagactacaggatttggcctccatgatcaatgtagagtatttaaatgggtctgctgatggatcagaatcctttcaagaccctgaaaaaagtgattcaagagctcagacgccaattgtttgcacttccttgagtcctggtggtcctacagcacttgctatgaaacaggaaccctcttgtaataactcccctgaactccaggtaaaagtaacaaagactatcaagaatggctttctgcactttgagaattttacttgtgtggacgatgcagatgtagattctgaaatggacccagaacagccagtcacagaggatgagagtatagaggagatctttgaggaaactcagaccaatgccacctgcaattatgagactaaatcagagaatggtgtaaaagtggccatgggaagtgaacaagacagcacaccagagagtagacacggtgcagtcaaatcgccattcttgccattagctcctcagactgaaacacagaaaaataagcaaagaaatgaagtggacggcagcaatgaaaaagcagcccttctcccagcccccttttcactaggagacacaaacattacaatagaagagcaattaaactcaataaatttatcttttcaggatgatccagattccagtaccagtacattaggaaacatgctagaattacctggaacttcatcatcatctacttcacaggaattgccatttgttcctcagaaaattttgagtaaatgggaagccagtgttggacttgcagaacagtatgatgttcccaaggggtcaaagaaccgaaaatgtattcctggttcaatcaagttggacagtgaagaagatatgccatttgaagactgcacaaatgatcctgagtcagaacatgacctgttgcttaatggctgtttgaaatcactggcttttgattctgaacattctgcagatgagaaggaaaagccttgcgctaaatctcgagccagaaagagctctgataatccaaaaaggactagtgtgaaaaagggccacatacaatttgaagcacataaagatgaacggaggggaaagattccagagaaccttggcctaaactttatctctggggatatatctgatacgcaggcctctaatgaactttccaggatagcaaatagcctcacagggtccaacactgccccaggaagttttctgttttcttcctgtggaaaaaacactgcaaagaaagaatttgagacttcaaatggtgactctttattgggcttgcctgagggtgctttgatctcaaagtgttctcgagagaagaataaaccccaacgaagcctggtgtgtggttcaaaagtgaagctctgctatattggagcaggtgatgaggaaaagcgaagtgattccattagtatctgtaccacttctgatgatggaagcagtgacctggatcccatagaacacagctcagagtctgataacagtgtccttgaaattccagatgctttcgatagaacagagaacatgttatctatgcagaaaaatgaaaagataaagtattctaggtttgctgccacaaacactagggtaaaagcaaaacagaagcctctcattagtaactcacatacagaccacttaatgggttgtactaagagtgcagagcctggaaccgagacgtctcaggttaatctctctgatctgaaggcatctactcttgttcacaaaccccagtcagattttacaaatgatgctctctctccaaaattcaacctgtcatcaagcatatccagtgagaactcgttaataaagggtggggcagcaaatcaagctctattacattcgaaaagcaaacagcccaagttccgaagtataaagtgcaaacacaaagaaaatccagttatggcagaacccccagttataaatgaggagtgcagtttgaaatgctgctcttctgataccaaaggctctcctttggccagcatttctaaaagtgggaaagtggatggtctaaaactactgaacaatatgcatgagaaaaccagggattcaagtgacatagaaacagcagtggtgaaacatgttttatccgagttgaaggaactctcttacagatccttaggtgaggatgtcagtgactctggaacatcaaagccatcaaaaccattacttttctcttctgcttctagtcagaatcacatacctattgaaccagactacaaattcagtacattgctaatgatgttgaaagatatgcatgatagtaagacgaaggagcagcggttgatgactgctcaaaacctggtctcttaccggagtcctggtcgtggggactgttctactaatagtcctgtaggagtctctaaggttttggtttcaggaggctccacacacaattcagagaaaaagggagatggcactcagaactccgccaatcctagccctagtgggggtgactctgcattatctggcgagttgtctgcttccctacctggcttactgtccgacaagagagacctccctgcttctggtaaaagtcgttcagactgtgttactaggcgcaactgtggacgatcaaagccttcatccaaattgcgagatgctttttcagcccaaatggtaaagaacacagtgaaccgtaaagccttaaagaccgagcgcaaaagaaaactgaatcagcttccaagtgtgactcttgatgctgtactgcagggagaccgagaacgtggaggttcattgagaggtggggcagaagatcctagtaaagaggatccccttcagataatgggccacttaacaagtgaagatggtgaccatttttctgatgtgcatttcgatagcaaggttaagcaatctgatcctggtaaaatttctgaaaaaggactctcttttgaaaacggaaaaggcccagagctggactctgtaatgaacagtgagaatgatgaactcaatggtgtaaatcaagtggtgcctaaaaagcggtggcagcgtttaaaccaaaggcgcactaaacctcgtaagcgcatgaacagatttaaagagaaagaaaactctgagtgtgcctttagggtcttacttcctagtgaccctgtgcaggaggggcgggatgagtttccagagcatagaactccttcagcaagcatacttgaggaaccactgacagagcaaaatcatgctgactgcttagattcagctgggccacggttaaatgtttgtgataaatccagtgccagcattggtgacatggaaaaggagccaggaattcccagtttgacaccacaggctgagctccctgaaccagtggagcacatgatccagaagaaccaatgtctcttcaccaacacccagtgtaaggtttgctgcgccttgcttatttctgagtcccagaagctggcacattaccagagcaaaaaacatgccaacaaagtgaagagatacctagcaatccatggaatggagacattaaagggggaaacgaagaagctagactcagatcagaagagcagcagaagcaaagacaagaaccagtgctgccccatctgtaacatgaccttttcctcccctgtcgtggcccagtcgcactacctggggaagacccacgcaaagaacttaaagctgaagcagcagtccactaaggtggaagccttgcaccagaatagagagatgatagacccagacaagttctgcagcctctgccatgcaactttcaacgaccctgtcatggctcaacaacattatgtgggcaagaaacacagaaaacaggagaccaagctcaaactaatggcacgctatgggcggctggcggaccctgctgtcactgactttccagctggaaagggctacccctgcaaaacatgtaagatagtgctgaactccatagaacagtaccaagctcatgtcagcggcttcaaacacaagaaccagtcaccaaaaacagtggcatcatccctgggccagattccaatgcaaaggcaacccattcagaaagactcaaccaccttggaagactagagctaggggtggccgtgtcacagtctggccaaggaaatgaaattgggagttgctgtgtggaaactcaactctctggaacttcttccttcctcctgcctctgcacaaatgtgacggcagcagctgaagccaacatcttgcgaccatgagagaaaaacctggagaacggacgagtcctcaaccctgacttcagaccaacctacacccacctctggacgtggggctaagtgagagatggatacactgtttcatttaggccctgctcacttaggtttctgttattcacaccccaacgaaaccctccatggtccagggcaccgggcaaagtacagaagggcacgagtttacttcccgcttccctggagaccaccaaccctctcacccttccagcccagcctctgccacttcccagctgtcggtcctcctccaaacagacgtgcatgccaacacccggtgggtgtgaggcttgtaggcccaagtctagagaggctgagtctggcaaagcctgaaagcccctgtcctagcaagccaggccacaggtctagagtatccgagaccagtgaataaggggacggggggtgctactgaggctgtgagaagccccaggaccagcccagggtagttagaactgagtgaggttagccgggactaacctcactcagatccctcctccccagttcccctccatccactttggtttggaagcctccccagagctctcccaggctgtcatcagctctaaactctctgcctccacaaaaatgccctgggcaacctgtaactcacagccctgctgtcttcagagtataaactggagacagatgtacccagaattgaggacgggtgggaaatgaggagaaatgaaggctgaggaggggtcattctcacagtccctccctttcggtcacaggagggtgttgcccatgcttttgggtgggtcccaggcccatagctgcaaatattcatattggctactcttcagtgagcaaggggtatatgccaggcactggcattgtgcttgacatacatcatcatactgagtcctcacggaagatgtattattcccatttcacagaagatgaaactgaggcttgaggttaagtgatttgtccgtgaccacaaagagttttcgggactcaaacccagatctgtcactgggcaaggtggctcacacctataatcccagccctttgggagactgaggccagcagatctcctgtggccaggagttcaagcctggccaacaatggcaaaaccccgtctctaccaaaaatacaaaaattagctgggcgtggtggcacacacccgtaatcccagctactcaggtggctgaggcaggagaatcacttgaacccaggaggtggtggttgcagtgagcctagatcgtgccactgcattccagcctgagcgacagagtaagactctgtctccaaaaaaaacccagatctgtccgactctgacacccaacctttaatcactcactttctgtcaatgtcacctccgttttgaccagccaagctagacctccctggagcctgtggagaagccaaggtagaaaagggttggaaaagaatgataaaataggccaggtgcggtggctcaagcctgtactcccagcacttttggaggccgagacaggcagattgcttgagcccaggagttcaagaccagcctgggcaacataatgagaccctgtttcaacttaaaaaaaagaaatggtaatgaacaattgtcaattctgagcagctgggtatggtatgaccctgtgtactttttctgtattttaaaatgttctcaaaataaaacttgttt

SEQ ID NO: 1031 - DNA, 3022 bp, Homo sapiens
gttgatgccggcccaggatggatcagacctgtgaactacccagaagaaattgtctgctgcccttttccaatccagtgaatttagatgcccctgaagacaaggacagccctttcggatgatccagattccagtaccagtacattaggaaacatgctagaattacctggaacttcatcatcatctacttcacaggaattgccatttctggaatctcactccgttgcccaggctggaatgcagtggtaagatcttggctcactgcaacctccgcctcccaggttcaagcgattcttctgcctcaacctcccaagtagctgggattacaggcacacaccaccatgctcggctaatctttgtatttttagtagagatggggtttcaccatgtttgccaggctggtcttgaactcctgacctccagtgattctcccaccttggcctcccaaagtgctgggattacaggcatgagccaccgcacccagcctgtgacttaacctttttgagcctcagtttctttatctgcaaaatcgagataatgctgtcttgtaaggttgtgagggtgtcaacctaagaaaaagtctacgccactgaagtatgaagttggagatctcatctgggcaaaattcaagagacgcccatggtggccctgcaggatttgttctgatccgttgattaacacacattcaaaaatgaaagctggaaagggctacccctgcaaaacatgtaagatagtgctgaactccatagaacagtaccaagctcatgtcagcggcttcaaacacaagaaccagtcaccaaaaacagtggcatcatccctgggccagattccaatgcaaaggcaacccattcagaaagactcaaccaccttggaagactagaggtgattctgcccagcatcccatattgggccagccatgagccagcttcccgtgactgctcagcccttggctccctcttgctcgttgttctcaccaggaaagtacacgggcctgaggcaggattgggccacagacagcctctcattggtccgggctaattcactcctgctgctcccctttggcaggggtcctgtaggtcatgacaggggaggcaagggtattgagagactcggggtctcgcggggtggtagtttggagggtggctttccccatttcccaacccctctgggccttaggtgctgaggcccctgccacctgtctttcctctaaaggtcagttttgggccagttcttgcaactaaagagcagagatctctctgggccctagacatttccagcaaaacctggaactttcatgccaaacctggggcagggcaggaaacagaggaaatggctgcaacatgggagcttggagctaatacgacactctgccttcccccagaaggtgcaggctttcctgagtcttagaccagatatggccagttgcgcaggtttctgccaactgtgaagtatcctcctggagcagtgacacaatcttggcggagcattgctacccccgctgccccctccacagttcctgaatggtgctaaggatctgcagcagttggcaacgagctggggctgggggcggcctccatgtccactgagatcataggacactccaatggggatgggacctttcccctcctccatcagaggtgctctgaccctaggttacacgggaaagtgccccacatgcaagtctccctgagggttctgcccctaaaggcagactgcctcatgcccgctagctgtgaggttcattgctaccctcggccctactagccctctcttcccccttgtgcagcggaccacttgcccagtttgctgtggtgctagccttccccatcatccaccgggtgatttctgggtcccagggaaagaaagagagagctgatgcaggtttctacagtgaggaacaggcgtttcccaggccccacacccagatttctctatctttgctgtgttttatggcctgggactgagtccacacggatagatttttccttgtaaccttgagacgagaattccaaggagtgtcaccatcagaggcttctcttcattgtgtcaaagaagcccctagctgctctcgtggcctccttcccccactccctatcccttcacctgtgaaatgcctttgctttgcatattgtgtgtggatgtgtgtgtgtgtgtgtgtgtgtttgtgtgtatgtgtgtgcttctgtgtgtgcctaatgctctgtctcttggtcactgaagcatccaaataaagaatttccctcatgggccagactacaacttaacagacctagggttttgagccatattgccattggatctagtatgtctgtcttgacccctcacccccaccccattcagacctcagtagtccccagtagtcactttaggagttgggacagagtcgagcaccctgtgaaagtctcccttgagttcaggtgccctgaactcagtacagcctcatcttctcatccaccaccttctcctgcttctcctgtcacatagggcctcatgaaggtctttaaagggtttaagctggggatctgctttatgtttgagagaactgttctggctgttatgtaaaggagtgcagggaggggcaggaaaggagacaaggaggccagtatggacactgtgtccagtatggctttccaggctaatcacttagggcagagacccagccttattcatctctacttcctgatgtccatagtggtgtgtcatgaatttttattgaatgaacaaatgaggtgtatgaggagagatggttttctcctgctcagctcttacacagtgataggtttgttccatgggacttatcataggcctggtgattcttgaaagagcatttttcatgactcaaaaatgagctgagaaggagtgttatggccaggtgcggcgtcatgcacctatagtcccagctgctcaggaggctaaggcagaaagaccattcaagcccaggagttccagcctgaagtatgctgtgatcatgcctgtgaataaccactgcactccagccagggcaacataacaagactctatctaa

SEQ ID NO: 1032 - DNA, 3721 bp, Homo sapiens
gacgcggggggaggggggtgcggcgagcggccccgctctctccccaccgctccgctcgcaccccagtgtaatgagggtcaccccctccccccagctggcccgggagggggcgcggggcacggttgatgccggcccaggatggatcagacctgtgaactacccagaagaaattgtctgctgcccttttccaatccagtgaatttagatgcccctgaagacaaggacagccctttcggtaatggtcaatccaatttttctgagccacttaatgggtgtactatgcagttatcgactgtcagtggaacatcccaaaatgcttatggacaagattctccatcttgttacattccactgcggagactacaggatttggcctccatgatcaatgtagagtatttaaatgggtctgctgatggatcagaatcctttcaagaccctgaaaaaagtgattcaagagctcagacgccaattgtttgcacttccttgagtcctggtggtcctacagcacttgctatgaaacaggaaccctcttgtaataactcccctgaactccaggtaaaagtaacaaagactatcaagaatggctttctgcactttgagaattttacttgtgtggacgatgcagatgtagattctgaaatggacccagaacagccagtcacagaggatgagagtatagaggagatctttgaggaaactcagaccaatgccacctgcaattatgagactaaatcagagaatggtgtaaaagtggccatgggaagtgaacaagacagcacaccagagagtagacacggtgcagtcaaatcgccattcttgccattagctcctcagactgaaacacagaaaaataagcaaagaaatgaagtggacggcagcaatgaaaaagcagcccttctcccagcccccttttcactaggagacacaaacattacaatagaagagcaattaaactcaataaatttatcttttcaggatgatccagattccagtaccagtacattaggaaacatgctagaattacctggaacttcatcatcatctacttcacaggaattgccattttgtcaacctaagaaaaagtctacgccactgaagtatgaagttggagatctcatctgggcaaaattcaagagacgcccatggtggccctgcaggatttgttctgatccgttgattaacacacattcaaaaatgaaagtggagcacatgatccagaagaaccaatgtctcttcaccaacacccagtgtaaggtttgctgcgccttgcttatttctgagtcccagaagctggcacattaccagagcaaaaaacatgccaacaaagtgaagagatacctagcaatccatggaatggagacattaaagggggaaacgaagaagctagactcagatcagaagagcagcagaagcaaagacaagaaccagtgctgccccatctgtaacatgaccttttcctcccctgtcgtggcccagtcgcactacctggggaagacccacgcaaagaacttaaagctgaagcagcagtccactaaggtggaagccttgcaccagaatagagagatgatagacccagacaagttctgcagcctctgccatgcaactttcaacgaccctgtcatggctcaacaacattatgtgggcaagaaacacagaaaacaggagaccaagctcaaactaatggcacgctatgggcggctggcggaccctgctgtcactgactttccagctggaaagggctacccctgcaaaacatgtaagatagtgctgaactccatagaacagtaccaagctcatgtcagcggcttcaaacacaagaaccagtcaccaaaaacagtggcatcatccctgggccagattccaatgcaaaggcaacccattcagaaagactcaaccaccttggaagactagagctaggggtggccgtgtcacagtctggccaaggaaatgaaattgggagttgctgtgtggaaactcaactctctggaacttcttccttcctcctgcctctgcacaaatgtgacggcagcagctgaagccaacatcttgcgaccatgagagaaaaacctggagaacggacgagtcctcaaccctgacttcagaccaacctacacccacctctggacgtggggctaagtgagagatggatacactgtttcatttaggccctgctcacttaggtttctgttattcacaccccaacgaaaccctccatggtccagggcaccgggcaaagtacagaagggcacgagtttacttcccgcttccctggagaccaccaaccctctcacccttccagcccagcctctgccacttcccagctgtcggtcctcctccaaacagacgtgcatgccaacacccggtgggtgtgaggcttgtaggcccaagtctagagaggctgagtctggcaaagcctgaaagcccctgtcctagcaagccaggccacaggtctagagtatccgagaccagtgaataaggggacggggggtgctactgaggctgtgagaagccccaggaccagcccagggtagttagaactgagtgaggttagccgggactaacctcactcagatccctcctccccagttcccctccatccactttggtttggaagcctccccagagctctcccaggctgtcatcagctctaaactctctgcctccacaaaaatgccctgggcaacctgtaactcacagccctgctgtcttcagagtataaactggagacagatgtacccagaattgaggacgggtgggaaatgaggagaaatgaaggctgaggaggggtcattctcacagtccctccctttcggtcacaggagggtgttgcccatgcttttgggtgggtcccaggcccatagctgcaaatattcatattggctactcttcagtgagcaaggggtatatgccaggcactggcattgtgcttgacatacatcatcatactgagtcctcacggaagatgtattattcccatttcacagaagatgaaactgaggcttgaggttaagtgatttgtccgtgaccacaaagagttttcgggactcaaacccagatctgtcactgggcaaggtggctcacacctataatcccagccctttgggagactgaggccagcagatctcctgtggccaggagttcaagcctggccaacaatggcaaaaccccgtctctaccaaaaatacaaaaattagctgggcgtggtggcacacacccgtaatcccagctactcaggtggctgaggcaggagaatcacttgaacccaggaggtggtggttgcagtgagcctagatcgtgccactgcattccagcctgagcgacagagtaagactctgtctccaaaaaaaacccagatctgtccgactctgacacccaacctttaatcactcactttctgtcaatgtcacctccgttttgaccagccaagctagacctccctggagcctgtggagaagccaaggtagaaaagggttggaaaagaatgataaaataggccaggtgcggtggctcaagcctgtactcccagcacttttggaggccgagacaggcagattgcttgagcccaggagttcaagaccagcctgggcaacataatgagaccctgtttcaacttaaaaaaaagaaatggtaatgaacaattgtcaattctgagcagctgggtatggtatgaccctgtgtactttttctgtattttaaaatgttctcaaaataaaacttgttt

SEQ ID NO: 1033 - DNA, 6187 bp, Homo sapiens
gttgatgccggcccaggatggatcagacctgtgaactacccagaagaaattgtctgctgcccttttccaatccagtgaatttagatgcccctgaagacaaggacagccctttcggatgatccagattccagtaccagtacattaggaaacatgctagaattacctggaacttcatcatcatctacttcacaggaattgccatttctggaatctcactccgttgcccaggctggaatgcagtggtaagatcttggctcactgcaacctccgcctcccaggttcaagcgattcttctgcctcaacctcccaagtagctgggattacaggcacacaccaccatgctcggctaatctttgtatttttagtagagatggggtttcaccatgtttgccaggctggtcttgaactcctgacctccagtgattctcccaccttggcctcccaaagtgctgggattacaggcatgagccaccgcacccagcctgtgacttaacctttttgagcctcagtttctttatctgcaaaatcgagataatgctgtcttgtaaggttgtgagggtgtcaacctaagaaaaagtctacgccactgaagtatgaagttggagatctcatctgggcaaaattcaagagacgcccatggtggccctgcaggatttgttctgatccgttgattaacacacattcaaaaatgaaagtttccaaccggaggccctatcggcagtactacgtggaggcttttggagatccttctgagagagcctgggtggctggaaaagcaatcgtcatgtttgaaggcagacatcaattcgaagagctacctgtccttaggagaagagggaaacagaaagaaaaaggatataggcataaggttcctcagaaaattttgagtaaatgggaagccagtgttggacttgcagaacagtatgatgttcccaaggggtcaaagaaccgaaaatgtattcctggttcaatcaagttggacagtgaagaagatatgccatttgaagactgcacaaatgatcctgagtcagaacatgacctgttgcttaatggctgtttgaaatcactggcttttgattctgaacattctgcagatgagaaggaaaagccttgcgctaaatctcgagccagaaagagctctgataatccaaaaaggactagtgtgaaaaagggccacatacaatttgaagcacataaagatgaacggaggggaaagattccagagaaccttggcctaaactttatctctggggatatatctgatacgcaggcctctaatgaactttccaggatagcaaatagcctcacagggtccaacactgccccaggaagttttctgttttcttcctgtggaaaaaacactgcaaagaaagaatttgagacttcaaatggtgactctttattgggcttgcctgagggtgctttgatctcaaagtgttctcgagagaagaataaaccccaacgaagcctggtgtgtggttcaaaagtgaagctctgctatattggagcaggtgatgaggaaaagcgaagtgattccattagtatctgtaccacttctgatgatggaagcagtgacctggatcccatagaacacagctcagagtctgataacagtgtccttgaaattccagatgctttcgatagaacagagaacatgttatctatgcagaaaaatgaaaagataaagtattctaggtttgctgccacaaacactagggtaaaagcaaaacagaagcctctcattagtaactcacatacagaccacttaatgggttgtactaagagtgcagagcctggaaccgagacgtctcaggttaatctctctgatctgaaggcatctactcttgttcacaaaccccagtcagattttacaaatgatgctctctctccaaaattcaacctgtcatcaagcatatccagtgagaactcgttaataaagggtggggcagcaaatcaagctctattacattcgaaaagcaaacagcccaagttccgaagtataaagtgcaaacacaaagaaaatccagttatggcagaacccccagttataaatgaggagtgcagtttgaaatgctgctcttctgataccaaaggctctcctttggccagcatttctaaaagtgggaaagtggatggtctaaaactactgaacaatatgcatgagaaaaccagggattcaagtgacatagaaacagcagtggtgaaacatgttttatccgagttgaaggaactctcttacagatccttaggtgaggatgtcagtgactctggaacatcaaagccatcaaaaccattacttttctcttctgcttctagtcagaatcacatacctattgaaccagactacaaattcagtacattgctaatgatgttgaaagatatgcatgatagtaagacgaaggagcagcggttgatgactgctcaaaacctggtctcttaccggagtcctggtcgtggggactgttctactaatagtcctgtaggagtctctaaggttttggtttcaggaggctccacacacaattcagagaaaaagggagatggcactcagaactccgccaatcctagccctagtgggggtgactctgcattatctggcgagttgtctgcttccctacctggcttactgtccgacaagagagacctccctgcttctggtaaaagtcgttcagactgtgttactaggcgcaactgtggacgatcaaagccttcatccaaattgcgagatgctttttcagcccaaatggtaaagaacacagtgaaccgtaaagccttaaagaccgagcgcaaaagaaaactgaatcagcttccaagtgtgactcttgatgctgtactgcagggagaccgagaacgtggaggttcattgagaggtggggcagaagatcctagtaaagaggatccccttcagataatgggccacttaacaagtgaagatggtgaccatttttctgatgtgcatttcgatagcaaggttaagcaatctgatcctggtaaaatttctgaaaaaggactctcttttgaaaacggaaaaggcccagagctggactctgtaatgaacagtgagaatgatgaactcaatggtgtaaatcaagtggtgcctaaaaagcggtggcagcgtttaaaccaaaggcgcactaaacctcgtaagcgcatgaacagatttaaagagaaagaaaactctgagtgtgcctttagggtcttacttcctagtgaccctgtgcaggaggggcgggatgagtttccagagcatagaactccttcagcaagcatacttgaggaaccactgacagagcaaaatcatgctgactgcttagattcagctgggccacggttaaatgtttgtgataaatccagtgccagcattggtgacatggaaaaggagccaggaattcccagtttgacaccacaggctgagctccctgaaccagtggagcacatgatccagaagaaccaatgtctcttcaccaacacccagtgtaaggtttgctgcgccttgcttatttctgagtcccagaagctggcacattaccagagcagcagaagcaaagacaagaaccagtgctgccccatctgtaacatgaccttttcctcccctgtcgtggcccagtcgcactacctggggaagacccacgcaaagaacttaaagctgaagcagcagtccactaaggtggaagccttgcaccagaatagagagatgatagacccagacaagttctgcagcctctgccatgcaactttcaacgaccctgtcatggctcaacaacattatgtgggcaagaaacacagaaaacaggagaccaagctcaaactaatggcacgctatgggcggctggcggaccctgctgtcactgactttccagctggaaagggctacccctgcaaaacatgtaagatagtgctgaactccatagaacagtaccaagctcatgtcagcggcttcaaacacaagaaccagtcaccaaaaacagtggcatcatccctgggccagattccaatgcaaaggcaacccattcagaaagactcaaccaccttggaagactagaggtgattctgcccagcatcccatattgggccagccatgagccagcttcccgtgactgctcagcccttggctccctcttgctcgttgttctcaccaggaaagtacacgggcctgaggcaggattgggccacagacagcctctcattggtccgggctaattcactcctgctgctcccctttggcaggggtcctgtaggtcatgacaggggaggcaagggtattgagagactcggggtctcgcggggtggtagtttggagggtggctttccccatttcccaacccctctgggccttaggtgctgaggcccctgccacctgtctttcctctaaaggtcagttttgggccagttcttgcaactaaagagcagagatctctctgggccctagacatttccagcaaaacctggaactttcatgccaaacctggggcagggcaggaaacagaggaaatggctgcaacatgggagcttggagctaatacgacactctgccttcccccagaaggtgcaggctttcctgagtcttagaccagatatggccagttgcgcaggtttctgccaactgtgaagtatcctcctggagcagtgacacaatcttggcggagcattgctacccccgctgccccctccacagttcctgaatggtgctaaggatctgcagcagttggcaacgagctggggctgggggcggcctccatgtccactgagatcataggacactccaatggggatgggacctttcccctcctccatcagaggtgctctgaccctaggttacacgggaaagtgccccacatgcaagtctccctgagggttctgcccctaaaggcagactgcctcatgcccgctagctgtgaggttcattgctaccctcggccctactagccctctcttcccccttgtgcagcggaccacttgcccagtttgctgtggtgctagccttccccatcatccaccgggtgatttctgggtcccagggaaagaaagagagagctgatgcaggtttctacagtgaggaacaggcgtttcccaggccccacacccagatttctctatctttgctgtgttttatggcctgggactgagtccacacggatagatttttccttgtaaccttgagacgagaattccaaggagtgtcaccatcagaggcttctcttcattgtgtcaaagaagcccctagctgctctcgtggcctccttcccccactccctatcccttcacctgtgaaatgcctttgctttgcatattgtgtgtggatgtgtgtgtgtgtgtgtgtgtgtttgtgtgtatgtgtgtgcttctgtgtgtgcctaatgctctgtctcttggtcactgaagcatccaaataaagaatttccctcatgggccagactacaacttaacagacctagggttttgagccatattgccattggatctagtatgtctgtcttgacccctcacccccaccccattcagacctcagtagtccccagtagtcactttaggagttgggacagagtcgagcaccctgtgaaagtctcccttgagttcaggtgccctgaactcagtacagcctcatcttctcatccaccaccttctcctgcttctcctgtcacatagggcctcatgaaggtctttaaagggtttaagctggggatctgctttatgtttgagagaactgttctggctgttatgtaaaggagtgcagggaggggcaggaaaggagacaaggaggccagtatggacactgtgtccagtatggctttccaggctaatcacttagggcagagacccagccttattcatctctacttcctgatgtccatagtggtgtgtcatgaatttttattgaatgaacaaatgaggtgtatgaggagagatggttttctcctgctcagctcttacacagtgataggtttgttccatgggacttatcataggcctggtgattcttgaaagagcatttttcatgactcaaaaatgagctgagaaggagtgttatggccaggtgcggcgtcatgcacctatagtcccagctgctcaggaggctaaggcagaaagaccattcaagcccaggagttccagcctgaagtatgctgtgatcatgcctgtgaataaccactgcactccagccagggcaacataacaagactctatctaa

SEQ ID NO: 1034 - DNA, 7661 bp, Homo sapiens
gttgatgccggcccaggatggatcagacctgtgaactacccagaagaaattgtctgctgcccttttccaatccagtgaatttagatgcccctgaagacaaggacagccctttcggatgatccagattccagtaccagtacattaggaaacatgctagaattacctggaacttcatcatcatctacttcacaggaattgccatttctggaatctcactccgttgcccaggctggaatgcagtggtaagatcttggctcactgcaacctccgcctcccaggttcaagcgattcttctgcctcaacctcccaagtagctgggattacaggcacacaccaccatgctcggctaatctttgtatttttagtagagatggggtttcaccatgtttgccaggctggtcttgaactcctgacctccagtgattctcccaccttggcctcccaaagtgctgggattacaggcatgagccaccgcacccagcctgtgacttaacctttttgagcctcagtttctttatctgcaaaatcgagataatgctgtcttgtaaggttgtgagggtgtcaacctaagaaaaagtctacgccactgaagtatgaagttggagatctcatctgggcaaaattcaagagacgcccatggtggccctgcaggatttgttctgatccgttgattaacacacattcaaaaatgaaagtttccaaccggaggccctatcggcagtactacgtggaggcttttggagatccttctgagagagcctgggtggctggaaaagcaatcgtcatgtttgaaggcagacatcaattcgaagagctacctgtccttaggagaagagggaaacagaaagaaaaaggatataggcataaggttcctcagaaaattttgagtaaatgggaagccagtgttggacttgcagaacagtatgatgttcccaaggggtcaaagaaccgaaaatgtattcctggttcaatcaagttggacagtgaagaagatatgccatttgaagactgcacaaatgatcctgagtcagaacatgacctgttgcttaatggctgtttgaaatcactggcttttgattctgaacattctgcagatgagaaggaaaagccttgcgctaaatctcgagccagaaagagctctgataatccaaaaaggactagtgtgaaaaagggccacatacaatttgaagcacataaagatgaacggaggggaaagattccagagaaccttggcctaaactttatctctggggatatatctgatacgcaggcctctaatgaactttccaggatagcaaatagcctcacagggtccaacactgccccaggaagttttctgttttcttcctgtggaaaaaacactgcaaagaaagaatttgagacttcaaatggtgactctttattgggcttgcctgagggtgctttgatctcaaagtgttctcgagagaagaataaaccccaacgaagcctggtgtgtggttcaaaagtgaagctctgctatattggagcaggtgatgaggaaaagcgaagtgattccattagtatctgtaccacttctgatgatggaagcagtgacctggatcccatagaacacagctcagagtctgataacagtgtccttgaaattccagatgctttcgatagaacagagaacatgttatctatgcagaaaaatgaaaagataaagtattctaggtttgctgccacaaacactagggtaaaagcaaaacagaagcctctcattagtaactcacatacagaccacttaatgggttgtactaagagtgcagagcctggaaccgagacgtctcaggttaatctctctgatctgaaggcatctactcttgttcacaaaccccagtcagattttacaaatgatgctctctctccaaaattcaacctgtcatcaagcatatccagtgagaactcgttaataaagggtggggcagcaaatcaagctctattacattcgaaaagcaaacagcccaagttccgaagtataaagtgcaaacacaaagaaaatccagttatggcagaacccccagttataaatgaggagtgcagtttgaaatgctgctcttctgataccaaaggctctcctttggccagcatttctaaaagtgggaaagtggatggtctaaaactactgaacaatatgcatgagaaaaccagggattcaagtgacatagaaacagcagtggtgaaacatgttttatccgagttgaaggaactctcttacagatccttaggtgaggatgtcagtgactctggaacatcaaagccatcaaaaccattacttttctcttctgcttctagtcagaatcacatacctattgaaccagactacaaattcagtacattgctaatgatgttgaaagatatgcatgatagtaagacgaaggagcagcggttgatgactgctcaaaacctggtctcttaccggagtcctggtcgtggggactgttctactaatagtcctgtaggagtctctaaggttttggtttcaggaggctccacacacaattcagagaaaaagggagatggcactcagaactccgccaatcctagccctagtgggggtgactctgcattatctggcgagttgtctgcttccctacctggcttactgtccgacaagagagacctccctgcttctggtaaaagtcgttcagactgtgttactaggcgcaactgtggacgatcaaagccttcatccaaattgcgagatgctttttcagcccaaatggtaaagaacacagtgaaccgtaaagccttaaagaccgagcgcaaaagaaaactgaatcagcttccaagtgtgactcttgatgctgtactgcagggagaccgagaacgtggaggttcattgagaggtggggcagaagatcctagtaaagaggatccccttcagataatgggccacttaacaagtgaagatggtgaccatttttctgatgtgcatttcgatagcaaggttaagcaatctgatcctggtaaaatttctgaaaaaggactctcttttgaaaacggaaaaggcccagagctggactctgtaatgaacagtgagaatgatgaactcaatggtgtaaatcaagtggtgcctaaaaagcggtggcagcgtttaaaccaaaggcgcactaaacctcgtaagcgcatgaacagatttaaagagaaagaaaactctgagtgtgcctttagggtcttacttcctagtgaccctgtgcaggaggggcgggatgagtttccagagcatagaactccttcagcaagcatacttgaggaaccactgacagagcaaaatcatgctgactgcttagattcagctgggccacggttaaatgtttgtgataaatccagtgccagcattggtgacatggaaaaggagccaggaattcccagtttgacaccacaggctgagctccctgaaccagctgtgcggtcagagaagaaacgccttaggaagccaagcaagtggcttttggaatatacagaagaatatgatcagatatttgctcctaagaaaaaacaaaagaaggtacaggagcaggtgcacaaggtaagttcccgctgtgaagaggaaagccttctagcccgaggtcgatctagtgctcagaacaagcaggtggacgagaattctttgatttcaaccaaagaagagcctccagttcttgaaagggaggctccgtttttggagggccccttggctcagtcagaacttggaggtggacatgctgagttgccgcagctgaccttgtctgtgcctgtggctccggaagtctctccacggcctgcccttgagtctgaggaattgctagttaaaacgccaggaaattatgaaagtaaacgtcaaagaaaaccaactaagaaacttcttgaatccaatgatttagaccctggatttatgcccaagaagggggaccttggcctttctaaaaagtgctatgaagctggtcacctggagaatggcataactgaatcttgtgccacatcttattcaaaagattttggtggaggcactaccaagatatttgacaagccaaggaagcgaaaacgacagaggcatgctgcagccaagatgcagtgtaaaaaagtgaaaaatgatgactcgtcaaaagagattccaggctcagagggagaactaatgcctcacaggacggccacaagccccaaggagactgttgaggaaggtgtagaacacgatcccgggatgcctgcctctaaaaaaatgcagggtgaacgcggtggaggagctgcactcaaggagaatgtctgtcagaattgtgaaaaattgggtgagctgctgttatgtgaggctcagtgctgtggggctttccacctggagtgccttggattgactgagatgccaagaggaaaatttatctgcaatgaatgtcgcacaggaatccatacctgttttgtatgtaagcagagtggggaagatgttaaaaggtgccttctacccttgtgtggaaagttttaccatgaagagtgtgtccagaagtacccacccactgttatgcagaacaagggcttccggtgctccctccacatctgtataacctgtcatgctgctaatccagccaatgtttctgcatctaaaggtcggttgatgcgctgtgtccgctgtcctgtggcataccacgccaatgacttttgcctggctgctgggtcaaagatccttgcatctaatagtatcatctgccctaatcactttacccctaggcggggctgccgaaatcatgagcatgttaatgttagctggtgctttgtgtgctcagaaggaggcagccttctgtgctgtgattcttgccctgctgcttttcatcgtgaatgcctgaacattgatatccctgaaggaaactggtattgcaatgactgtaaagcaggcaaaaagccacactacagggagattgtctgggtaaaagttggacgatacaggtggtggccagctgagatctgccatcctcgagctgttccttccaacattgataagatgagacatgatgtgggagagttcccagtcctcttttttggatctaatgactatttgtggactcaccaggcccgagtcttcccttacatggagggtgacgtgagcagcaaggataagatgggcaaaggagtggatgggacatataaaaaagtggagcacatgatccagaagaaccaatgtctcttcaccaacacccagtgtaaggtttgctgcgccttgcttatttctgagtcccagaagctggcacattaccagagcaaaaaacatgccaacaaagtgaagagatacctagcaatccatggaatggagacattaaagggggaaacgaagaagctagactcagatcagaagagcagcagaagcaaagacaagaaccagtgctgccccatctgtaacatgaccttttcctcccctgtcgtggcccagtcgcactacctggggaagacccacgcaaagaacttaaagctgaagcagcagtccactaaggtggaagccttgcaccagaatagagagatgatagacccagacaagttctgcagcctctgccatgcaactttcaacgaccctgtcatggctcaacaacattatgtgggcaagaaacacagaaaacaggagaccaagctcaaactaatggcacgctatgggcggctggcggaccctgctgtcactgactttccagctggaaagggctacccctgcaaaacatgtaagatagtgctgaactccatagaacagtaccaagctcatgtcagcggcttcaaacacaagaaccagtcaccaaaaacagtggcatcatccctgggccagattccaatgcaaaggcaacccattcagaaagactcaaccaccttggaagactagagctaggggtggccgtgtcacagtctggccaaggaaatgaaattgggagttgctgtgtggaaactcaactctctggaacttcttccttcctcctgcctctgcacaaatgtgacggcagcagctgaagccaacatcttgcgaccatgagagaaaaacctggagaacggacgagtcctcaaccctgacttcagaccaacctacacccacctctggacgtggggctaagtgagagatggatacactgtttcatttaggccctgctcacttaggtttctgttattcacaccccaacgaaaccctccatggtccagggcaccgggcaaagtacagaagggcacgagtttacttcccgcttccctggagaccaccaaccctctcacccttccagcccagcctctgccacttcccagctgtcggtcctcctccaaacagacgtgcatgccaacacccggtgggtgtgaggcttgtaggcccaagtctagagaggctgagtctggcaaagcctgaaagcccctgtcctagcaagccaggccacaggtctagagtatccgagaccagtgaataaggggacggggggtgctactgaggctgtgagaagccccaggaccagcccagggtagttagaactgagtgaggttagccgggactaacctcactcagatccctcctccccagttcccctccatccactttggtttggaagcctccccagagctctcccaggctgtcatcagctctaaactctctgcctccacaaaaatgccctgggcaacctgtaactcacagccctgctgtcttcagagtataaactggagacagatgtacccagaattgaggacgggtgggaaatgaggagaaatgaaggctgaggaggggtcattctcacagtccctccctttcggtcacaggagggtgttgcccatgcttttgggtgggtcccaggcccatagctgcaaatattcatattggctactcttcagtgagcaaggggtatatgccaggcactggcattgtgcttgacatacatcatcatactgagtcctcacggaagatgtattattcccatttcacagaagatgaaactgaggcttgaggttaagtgatttgtccgtgaccacaaagagttttcgggactcaaacccagatctgtcactgggcaaggtggctcacacctataatcccagccctttgggagactgaggccagcagatctcctgtggccaggagttcaagcctggccaacaatggcaaaaccccgtctctaccaaaaatacaaaaattagctgggcgtggtggcacacacccgtaatcccagctactcaggtggctgaggcaggagaatcacttgaacccaggaggtggtggttgcagtgagcctagatcgtgccactgcattccagcctgagcgacagagtaagactctgtctccaaaaaaaacccagatctgtccgactctgacacccaacctttaatcactcactttctgtcaatgtcacctccgttttgaccagccaagctagacctccctggagcctgtggagaagccaaggtagaaaagggttggaaaagaatgataaaataggccaggtgcggtggctcaagcctgtactcccagcacttttggaggccgagacaggcagattgcttgagcccaggagttcaagaccagcctgggcaacataatgagaccctgtttcaacttaaaaaaaagaaatggtaatgaacaattgtcaattctgagcagctgggtatggtatgaccctgtgtactttttctgtattttaaaatgttctcaaaataaaacttgttt

SEQ ID NO: 1035 - DNA, 2408 bp, Homo sapiens
ggccgggtagggggttcgcctgcggccgcgtctgctcggggcctgaggcctcgaagaccccagcccaagcccccaggttgatgccggcccaggatggatcagacctgtgaactacccagaagaaattgtctgctgcccttttccaatccagtgaatttagatgcccctgaagacaaggacagccctttcggatgatccagattccagtaccagtacattaggaaacatgctagaattacctggaacttcatcatcatctacttcacaggaattgccattttgtcaacctaagaaaaagtctacgccactgaagtatgaagttggagatctcatctgggcaaaattcaagagacgcccatggtggccctgcaggatttgttctgatccgttgattaacacacattcaaaaatgaaagctggaaagggctacccctgcaaaacatgtaagatagtgctgaactccatagaacagtaccaagctcatgtcagcggcttcaaacacaagaaccagtcaccaaaaacagtggcatcatccctgggccagattccaatgcaaaggcaacccattcagaaagactcaaccaccttggaagactagagctaggggtggccgtgtcacagtctggccaaggaaatgaaattgggagttgctgtgtggaaactcaactctctggaacttcttccttcctcctgcctctgcacaaatgtgacggcagcagctgaagccaacatcttgcgaccatgagagaaaaacctggagaacggacgagtcctcaaccctgacttcagaccaacctacacccacctctggacgtggggctaagtgagagatggatacactgtttcatttaggccctgctcacttaggtttctgttattcacaccccaacgaaaccctccatggtccagggcaccgggcaaagtacagaagggcacgagtttacttcccgcttccctggagaccaccaaccctctcacccttccagcccagcctctgccacttcccagctgtcggtcctcctccaaacagacgtgcatgccaacacccggtgggtgtgaggcttgtaggcccaagtctagagaggctgagtctggcaaagcctgaaagcccctgtcctagcaagccaggccacaggtctagagtatccgagaccagtgaataaggggacggggggtgctactgaggctgtgagaagccccaggaccagcccagggtagttagaactgagtgaggttagccgggactaacctcactcagatccctcctccccagttcccctccatccactttggtttggaagcctccccagagctctcccaggctgtcatcagctctaaactctctgcctccacaaaaatgccctgggcaacctgtaactcacagccctgctgtcttcagagtataaactggagacagatgtacccagaattgaggacgggtgggaaatgaggagaaatgaaggctgaggaggggtcattctcacagtccctccctttcggtcacaggagggtgttgcccatgcttttgggtgggtcccaggcccatagctgcaaatattcatattggctactcttcagtgagcaaggggtatatgccaggcactggcattgtgcttgacatacatcatcatactgagtcctcacggaagatgtattattcccatttcacagaagatgaaactgaggcttgaggttaagtgatttgtccgtgaccacaaagagttttcgggactcaaacccagatctgtcactgggcaaggtggctcacacctataatcccagccctttgggagactgaggccagcagatctcctgtggccaggagttcaagcctggccaacaatggcaaaaccccgtctctaccaaaaatacaaaaattagctgggcgtggtggcacacacccgtaatcccagctactcaggtggctgaggcaggagaatcacttgaacccaggaggtggtggttgcagtgagcctagatcgtgccactgcattccagcctgagcgacagagtaagactctgtctccaaaaaaaacccagatctgtccgactctgacacccaacctttaatcactcactttctgtcaatgtcacctccgttttgaccagccaagctagacctccctggagcctgtggagaagccaaggtagaaaagggttggaaaagaatgataaaataggccaggtgcggtggctcaagcctgtactcccagcacttttggaggccgagacaggcagattgcttgagcccaggagttcaagaccagcctgggcaacataatgagaccctgtttcaacttaaaaaaaagaaatggtaatgaacaattgtcaattctgagcagctgggtatggtatgaccctgtgtactttttctgtattttaaaatgttctcaaaataaaacttgttt

SEQ ID NO: 1036 - skipped

SEQ ID NO: 1037 - DNA, 7737 bp, Homo sapiens
gttgatgccggcccaggatggatcagacctgtgaactacccagaagaaattgtctgctgcccttttccaatccagtgaatttagatgcccctgaagacaaggacagccctttcggtaatggtcaatccaatttttctgagccacttaatgggtgtactatgcagttatcgactgtcagtggaacatcccaaaatgcttatggacaagattctccatcttgttacattccactgcggagactacaggatttggcctccatgatcaatgtagagtatttaaatgggtctgctgatggatcagaatcctttcaagaccctgaaaaaagtgattcaagagctcagacgccaattgtttgcacttccttgagtcctggtggtcctacagcacttgctatgaaacaggaaccctcttgtaataactcccctgaactccaggtaaaagtaacaaagactatcaagaatggctttctgcactttgagaattttacttgtgtggacgatgcagatgtagattctgaaatggacccagaacagccagtcacagaggatgagagtatagaggagatctttgaggaaactcagaccaatgccacctgcaattatgagactaaatcagagaatggtgtaaaagtggccatgggaagtgaacaagacagcacaccagagagtagacacggtgcagtcaaatcgccattcttgccattagctcctcagactgaaacacagaaaaataagcaaagaaatgaagtggacggcagcaatgaaaaagcagcccttctcccagcccccttttcactaggagacacaaacattacaatagaagagcaattaaactcaataaatttatcttttcaggatgatccagattccagtaccagtacattaggaaacatgctagaattacctggaacttcatcatcatctacttcacaggaattgccatttgttcctcagaaaattttgagtaaatgggaagccagtgttggacttgcagaacagtatgatgttcccaaggggtcaaagaaccgaaaatgtattcctggttcaatcaagttggacagtgaagaagatatgccatttgaagactgcacaaatgatcctgagtcagaacatgacctgttgcttaatggctgtttgaaatcactggcttttgattctgaacattctgcagatgagaaggaaaagccttgcgctaaatctcgagccagaaagagctctgataatccaaaaaggactagtgtgaaaaagggccacatacaatttgaagcacataaagatgaacggaggggaaagattccagagaaccttggcctaaactttatctctggggatatatctgatacgcaggcctctaatgaactttccaggatagcaaatagcctcacagggtccaacactgccccaggaagttttctgttttcttcctgtggaaaaaacactgcaaagaaagaatttgagacttcaaatggtgactctttattgggcttgcctgagggtgctttgatctcaaagtgttctcgagagaagaataaaccccaacgaagcctggtgtgtggttcaaaagtgaagctctgctatattggagcaggtgatgaggaaaagcgaagtgattccattagtatctgtaccacttctgatgatggaagcagtgacctggatcccatagaacacagctcagagtctgataacagtgtccttgaaattccagatgctttcgatagaacagagaacatgttatctatgcagaaaaatgaaaagataaagtattctaggtttgctgccacaaacactagggtaaaagcaaaacagaagcctctcattagtaactcacatacagaccacttaatgggttgtactaagagtgcagagcctggaaccgagacgtctcaggttaatctctctgatctgaaggcatctactcttgttcacaaaccccagtcagattttacaaatgatgctctctctccaaaattcaacctgtcatcaagcatatccagtgagaactcgttaataaagggtggggcagcaaatcaagctctattacattcgaaaagcaaacagcccaagttccgaagtataaagtgcaaacacaaagaaaatccagttatggcagaacccccagttataaatgaggagtgcagtttgaaatgctgctcttctgataccaaaggctctcctttggccagcatttctaaaagtgggaaagtggatggtctaaaactactgaacaatatgcatgagaaaaccagggattcaagtgacatagaaacagcagtggtgaaacatgttttatccgagttgaaggaactctcttacagatccttaggtgaggatgtcagtgactctggaacatcaaagccatcaaaaccattacttttctcttctgcttctagtcagaatcacatacctattgaaccagactacaaattcagtacattgctaatgatgttgaaagatatgcatgatagtaagacgaaggagcagcggttgatgactgctcaaaacctggtctcttaccggagtcctggtcgtggggactgttctactaatagtcctgtaggagtctctaaggttttggtttcaggaggctccacacacaattcagagaaaaagggagatggcactcagaactccgccaatcctagccctagtgggggtgactctgcattatctggcgagttgtctgcttccctacctggcttactgtccgacaagagagacctccctgcttctggtaaaagtcgttcagactgtgttactaggcgcaactgtggacgatcaaagccttcatccaaattgcgagatgctttttcagcccaaatggtaaagaacacagtgaaccgtaaagccttaaagaccgagcgcaaaagaaaactgaatcagcttccaagtgtgactcttgatgctgtactgcagggagaccgagaacgtggaggttcattgagaggtggggcagaagatcctagtaaagaggatccccttcagataatgggccacttaacaagtgaagatggtgaccatttttctgatgtgcatttcgatagcaaggttaagcaatctgatcctggtaaaatttctgaaaaaggactctcttttgaaaacggaaaaggcccagagctggactctgtaatgaacagtgagaatgatgaactcaatggtgtaaatcaagtggtgcctaaaaagcggtggcagcgtttaaaccaaaggcgcactaaacctcgtaagcgcatgaacagatttaaagagaaagaaaactctgagtgtgcctttagggtcttacttcctagtgaccctgtgcaggaggggcgggatgagtttccagagcatagaactccttcagcaagcatacttgaggaaccactgacagagcaaaatcatgctgactgcttagattcagctgggccacggttaaatgtttgtgataaatccagtgccagcattggtgacatggaaaaggagccaggaattcccagtttgacaccacaggctgagctccctgaaccagctgtgcggtcagagaagaaacgccttaggaagccaagcaagtggcttttggaatatacagaagaatatgatcagatatttgctcctaagaaaaaacaaaagaaggtacaggagcaggtgcacaaggtaagttcccgctgtgaagaggaaagccttctagcccgaggtcgatctagtgctcagaacaagcaggtggacgagaattctttgatttcaaccaaagaagagcctccagttcttgaaagggaggctccgtttttggagggccccttggctcagtcagaacttggaggtggacatgctgagttgccgcagctgaccttgtctgtgcctgtggctccggaagtctctccacggcctgcccttgagtctgaggaattgctagttaaaacgccaggaaattatgaaagtaaacgtcaaagaaaaccaactaagaaacttcttgaatccaatgatttagaccctggatttatgcccaagaagggggaccttggcctttctaaaaagtgctatgaagctggtcacctggagaatggcataactgaatcttgtgccacatcttattcaaaagattttggtggaggcactaccaagatatttgacaagccaaggaagcgaaaacgacagaggcatgctgcagccaagatgcagtgtaaaaaagtgaaaaatgatgactcgtcaaaagagattccaggctcagagggagaactaatgcctcacaggacggccacaagccccaaggagactgttgaggaaggtgtagaacacgatcccgggatgcctgcctctaaaaaaatgcagggtgaacgcggtggaggagctgcactcaaggagaatgtctgtcagaattgtgaaaaattgggtgagctgctgttatgtgaggctcagtgctgtggggctttccacctggagtgccttggattgactgagatgccaagaggaaaatttatctgcaatgaatgtcgcacaggaatccatacctgttttgtatgtaagcagagtggggaagatgttaaaaggtgccttctacccttgtgtggaaagttttaccatgaagagtgtgtccagaagtacccacccactgttatgcagaacaagggcttccggtgctccctccacatctgtataacctgtcatgctgctaatccagccaatgtttctgcatctaaaggtcggttgatgcgctgtgtccgctgtcctgtggcataccacgccaatgacttttgcctggctgctgggtcaaagatccttgcatctaatagtatcatctgccctaatcactttacccctaggcggggctgccgaaatcatgagcatgttaatgttagctggtgctttgtgtgctcagaaggaggcagccttctgtgctgtgattcttgccctgctgcttttcatcgtgaatgcctgaacattgatatccctgaaggaaactggtattgcaatgactgtaaagcaggcaaaaagccacactacagggagattgtctgggtaaaagttggacgatacaggtggtggccagctgagatctgccatcctcgagctgttccttccaacattgataagatgagacatgatgtgggagagttcccagtcctcttttttggatctaatgactatttgtggactcaccaggcccgagtcttcccttacatggagggtgacgtgagcagcaaggataagatgggcaaaggagtggatgggacatataaaaaagtggagcacatgatccagaagaaccaatgtctcttcaccaacacccagtgtaaggtttgctgcgccttgcttatttctgagtcccagaagctggcacattaccagagcaaaaaacatgccaacaaagtgaagagatacctagcaatccatggaatggagacattaaagggggaaacgaagaagctagactcagatcagaagagcagcagaagcaaagacaagaaccagtgctgccccatctgtaacatgaccttttcctcccctgtcgtggcccagtcgcactacctggggaagacccacgcaaagaacttaaagctgaagcagcagtccactaaggtggaagccttgcaccagaatagagagatgatagacccagacaagttctgcagcctctgccatgcaactttcaacgaccctgtcatggctcaacaacattatgtgggcaagaaacacagaaaacaggagaccaagctcaaactaatggcacgctatgggcggctggcggaccctgctgtcactgactttccagctggaaagggctacccctgcaaaacatgtaagatagtgctgaactccatagaacagtaccaagctcatgtcagcggcttcaaacacaagaaccagtcaccaaaaacagtggcatcatccctgggccagattccaatgcaaaggcaacccattcagaaagactcaaccaccttggaagactagagctaggggtggccgtgtcacagtctggccaaggaaatgaaattgggagttgctgtgtggaaactcaactctctggaacttcttccttcctcctgcctctgcacaaatgtgacggcagcagctgaagccaacatcttgcgaccatgagagaaaaacctggagaacggacgagtcctcaaccctgacttcagaccaacctacacccacctctggacgtggggctaagtgagagatggatacactgtttcatttaggccctgctcacttaggtttctgttattcacaccccaacgaaaccctccatggtccagggcaccgggcaaagtacagaagggcacgagtttacttcccgcttccctggagaccaccaaccctctcacccttccagcccagcctctgccacttcccagctgtcggtcctcctccaaacagacgtgcatgccaacacccggtgggtgtgaggcttgtaggcccaagtctagagaggctgagtctggcaaagcctgaaagcccctgtcctagcaagccaggccacaggtctagagtatccgagaccagtgaataaggggacggggggtgctactgaggctgtgagaagccccaggaccagcccagggtagttagaactgagtgaggttagccgggactaacctcactcagatccctcctccccagttcccctccatccactttggtttggaagcctccccagagctctcccaggctgtcatcagctctaaactctctgcctccacaaaaatgccctgggcaacctgtaactcacagccctgctgtcttcagagtataaactggagacagatgtacccagaattgaggacgggtgggaaatgaggagaaatgaaggctgaggaggggtcattctcacagtccctccctttcggtcacaggagggtgttgcccatgcttttgggtgggtcccaggcccatagctgcaaatattcatattggctactcttcagtgagcaaggggtatatgccaggcactggcattgtgcttgacatacatcatcatactgagtcctcacggaagatgtattattcccatttcacagaagatgaaactgaggcttgaggttaagtgatttgtccgtgaccacaaagagttttcgggactcaaacccagatctgtcactgggcaaggtggctcacacctataatcccagccctttgggagactgaggccagcagatctcctgtggccaggagttcaagcctggccaacaatggcaaaaccccgtctctaccaaaaatacaaaaattagctgggcgtggtggcacacacccgtaatcccagctactcaggtggctgaggcaggagaatcacttgaacccaggaggtggtggttgcagtgagcctagatcgtgccactgcattccagcctgagcgacagagtaagactctgtctccaaaaaaaacccagatctgtccgactctgacacccaacctttaatcactcactttctgtcaatgtcacctccgttttgaccagccaagctagacctccctggagcctgtggagaagccaaggtagaaaagggttggaaaagaatgataaaataggccaggtgcggtggctcaagcctgtactcccagcacttttggaggccgagacaggcagattgcttgagcccaggagttcaagaccagcctgggcaacataatgagaccctgtttcaacttaaaaaaaagaaatggtaatgaacaattgtcaattctgagcagctgggtatggtatgaccctgtgtactttttctgtattttaaaatgttctcaaaataaaacttgttt

SEQ ID NO: 1038 - DNA, 7423 bp, Homo sapiens
gacgcggggggaggggggtgcggcgagcggccccgctctctccccaccgctccgctcgcaccccagtgtaatgagggtcaccccctccccccagctggcccgggagggggcgcggggcacggttgatgccggcccaggatggatcagacctgtgaactacccagaagaaattgtctgctgcccttttccaatccagtgaatttagatgcccctgaagacaaggacagccctttcggtaatggtcaatccaatttttctgagccacttaatgggtgtactatgcagttatcgactgtcagtggaacatcccaaaatgcttatggacaagattctccatcttgttacattccactgcggagactacaggatttggcctccatgatcaatgtagagtatttaaatgggtctgctgatggatcagaatcctttcaagaccctgaaaaaagtgattcaagagctcagacgccaattgtttgcacttccttgagtcctggtggtcctacagcacttgctatgaaacaggaaccctcttgtaataactcccctgaactccaggtaaaagtaacaaagactatcaagaatggctttctgcactttgagaattttacttgtgtggacgatgcagatgtagattctgaaatggacccagaacagccagtcacagaggatgagagtatagaggagatctttgaggaaactcagaccaatgccacctgcaattatgagactaaatcagagaatggtgtaaaagtggccatgggaagtgaacaagacagcacaccagagagtagacacggtgcagtcaaatcgccattcttgccattagctcctcagactgaaacacagaaaaataagcaaagaaatgaagtggacggcagcaatgaaaaagcagcccttctcccagcccccttttcactaggagacacaaacattacaatagaagagcaattaaactcaataaatttatcttttcaggatgatccagattccagtaccagtacattaggaaacatgctagaattacctggaacttcatcatcatctacttcacaggaattgccattttgtcaacctaagaaaaagtctacgccactgaagtatgaagttggagatctcatctgggcaaaattcaagagacgcccatggtggccctgcaggatttgttctgatccgttgattaacacacattcaaaaatgaaagtttccaaccggaggccctatcggcagtactacgtggaggcttttggagatccttctgagagagcctgggtggctggaaaagcaatcgtcatgtttgaaggcagacatcaattcgaagagctacctgtccttaggagaagagggaaacagaaagaaaaaggatataggcataaggttcctcagaaaattttgagtaaatgggaagccagtgttggacttgcagaacagtatgatgttcccaaggggtcaaagaaccgaaaatgtattcctggttcaatcaagttggacagtgaagaagatatgccatttgaagactgcacaaatgatcctgagtcagaacatgacctgttgcttaatggctgtttgaaatcactggcttttgattctgaacattctgcagatgagaaggaaaagccttgcgctaaatctcgagccagaaagagctctgataatccaaaaaggactagtgtgaaaaagggccacatacaatttgaagcacataaagatgaacggaggggaaagattccagagaaccttggcctaaactttatctctggggatatatctgatacgcaggcctctaatgaactttccaggatagcaaatagcctcacagggtccaacactgccccaggaagttttctgttttcttcctgtggaaaaaacactgcaaagaaagaatttgagacttcaaatggtgactctttattgggcttgcctgagggtgctttgatctcaaagtgttctcgagagaagaataaaccccaacgaagcctggtgtgtggttcaaaagtgaagctctgctatattggagcaggtgatgaggaaaagcgaagtgattccattagtatctgtaccacttctgatgatggaagcagtgacctggatcccatagaacacagctcagagtctgataacagtgtccttgaaattccagatgctttcgatagaacagagaacatgttatctatgcagaaaaatgaaaagataaagtattctaggtttgctgccacaaacactagggtaaaagcaaaacagaagcctctcattagtaactcacatacagaccacttaatgggttgtactaagagtgcagagcctggaaccgagacgtctcaggttaatctctctgatctgaaggcatctactcttgttcacaaaccccagtcagattttacaaatgatgctctctctccaaaattcaacctgtcatcaagcatatccagtgagaactcgttaataaagggtggggcagcaaatcaagctctattacattcgaaaagcaaacagcccaagttccgaagtataaagtgcaaacacaaagaaaatccagttatggcagaacccccagttataaatgaggagtgcagtttgaaatgctgctcttctgataccaaaggctctcctttggccagcatttctaaaagtgggaaagtggatggtctaaaactactgaacaatatgcatgagaaaaccagggattcaagtgacatagaaacagcagtggtgaaacatgttttatccgagttgaaggaactctcttacagatccttaggtgaggatgtcagtgactctggaacatcaaagccatcaaaaccattacttttctcttctgcttctagtcagaatcacatacctattgaaccagactacaaattcagtacattgctaatgatgttgaaagatatgcatgatagtaagacgaaggagcagcggttgatgactgctcaaaacctggtctcttaccggagtcctggtcgtggggactgttctactaatagtcctgtaggagtctctaaggttttggtttcaggaggctccacacacaattcagagaaaaagggagatggcactcagaactccgccaatcctagccctagtgggggtgactctgcattatctggcgagttgtctgcttccctacctggcttactgtccgacaagagagacctccctgcttctggtaaaagtcgttcagactgtgttactaggcgcaactgtggacgatcaaagccttcatccaaattgcgagatgctttttcagcccaaatggtaaagaacacagtgaaccgtaaagccttaaagaccgagcgcaaaagaaaactgaatcagcttccaagtgtgactcttgatgctgtactgcagggagaccgagaacgtggaggttcattgagaggtggggcagaagatcctagtaaagaggatccccttcagataatgggccacttaacaagtgaagatggtgaccatttttctgatgtgcatttcgatagcaaggttaagcaatctgatcctggtaaaatttctgaaaaaggactctcttttgaaaacggaaaaggcccagagctggactctgtaatgaacagtgagaatgatgaactcaatggtgtaaatcaagtggtgcctaaaaagcggtggcagcgtttaaaccaaaggcgcactaaacctcgtaagcgcatgaacagatttaaagagaaagaaaactctgagtgtgcctttagggtcttacttcctagtgaccctgtgcaggaggggcgggatgagtttccagagcatagaactccttcagcaagcatacttgaggaaccactgacagagcaaaatcatgctgactgcttagattcagctgggccacggttaaatgtttgtgataaatccagtgccagcattggtgacatggaaaaggagccaggaattcccagtttgacaccacaggctgagctccctgaaccagctgtgcggtcagagaagaaacgccttaggaagccaagcaagtggcttttggaatatacagaagaatatgatcagatatttgctcctaagaaaaaacaaaagaaggtacaggagcaggtgcacaaggtaagttcccgctgtgaagaggaaagccttctagcccgaggtcgatctagtgctcagaacaagcaggtggacgagaattctttgatttcaaccaaagaagagcctccagttcttgaaagggaggctccgtttttggagggccccttggctcagtcagaacttggaggtggacatgctgagttgccgcagctgaccttgtctgtgcctgtggctccggaagtctctccacggcctgcccttgagtctgaggaattgctagttaaaacgccaggaaattatgaaagtaaacgtcaaagaaaaccaactaagaaacttcttgaatccaatgatttagaccctggatttatgcccaagaagggggaccttggcctttctaaaaagtgctatgaagctggtcacctggagaatggcataactgaatcttgtgccacatcttattcaaaagattttggtggaggcactaccaagatatttgacaagccaaggaagcgaaaacgacagaggcatgctgcagccaagatgcagtgtaaaaaagtgaaaaatgatgactcgtcaaaagagattccaggctcagagggagaactaatgcctcacaggacggccacaagccccaaggagactgttgaggaaggtgtagaacacgatcccgggatgcctgcctctaaaaaaatgcagggtgaacgcggtggaggagctgcactcaaggagaatgtctgtcagaattgtgaaaaattgggtgagctgctgttatgtgaggctcagtgctgtggggctttccacctggagtgccttggattgactgagatgccaagaggaaaatttatctgcaatgaatgtcgcacagtggagcacatgatccagaagaaccaatgtctcttcaccaacacccagtgtaaggtttgctgcgccttgcttatttctgagtcccagaagctggcacattaccagagcaaaaaacatgccaacaaagtgaagagatacctagcaatccatggaatggagacattaaagggggaaacgaagaagctagactcagatcagaagagcagcagaagcaaagacaagaaccagtgctgccccatctgtaacatgaccttttcctcccctgtcgtggcccagtcgcactacctggggaagacccacgcaaagaacttaaagctgaagcagcagtccactaaggtggaagccttgcaccagaatagagagatgatagacccagacaagttctgcagcctctgccatgcaactttcaacgaccctgtcatggctcaacaacattatgtgggcaagaaacacagaaaacaggagaccaagctcaaactaatggcacgctatgggcggctggcggaccctgctgtcactgactttccagctggaaagggctacccctgcaaaacatgtaagatagtgctgaactccatagaacagtaccaagctcatgtcagcggcttcaaacacaagaaccagtcaccaaaaacagtggcatcatccctgggccagattccaatgcaaaggcaacccattcagaaagactcaaccaccttggaagactagagctaggggtggccgtgtcacagtctggccaaggaaatgaaattgggagttgctgtgtggaaactcaactctctggaacttcttccttcctcctgcctctgcacaaatgtgacggcagcagctgaagccaacatcttgcgaccatgagagaaaaacctggagaacggacgagtcctcaaccctgacttcagaccaacctacacccacctctggacgtggggctaagtgagagatggatacactgtttcatttaggccctgctcacttaggtttctgttattcacaccccaacgaaaccctccatggtccagggcaccgggcaaagtacagaagggcacgagtttacttcccgcttccctggagaccaccaaccctctcacccttccagcccagcctctgccacttcccagctgtcggtcctcctccaaacagacgtgcatgccaacacccggtgggtgtgaggcttgtaggcccaagtctagagaggctgagtctggcaaagcctgaaagcccctgtcctagcaagccaggccacaggtctagagtatccgagaccagtgaataaggggacggggggtgctactgaggctgtgagaagccccaggaccagcccagggtagttagaactgagtgaggttagccgggactaacctcactcagatccctcctccccagttcccctccatccactttggtttggaagcctccccagagctctcccaggctgtcatcagctctaaactctctgcctccacaaaaatgccctgggcaacctgtaactcacagccctgctgtcttcagagtataaactggagacagatgtacccagaattgaggacgggtgggaaatgaggagaaatgaaggctgaggaggggtcattctcacagtccctccctttcggtcacaggagggtgttgcccatgcttttgggtgggtcccaggcccatagctgcaaatattcatattggctactcttcagtgagcaaggggtatatgccaggcactggcattgtgcttgacatacatcatcatactgagtcctcacggaagatgtattattcccatttcacagaagatgaaactgaggcttgaggttaagtgatttgtccgtgaccacaaagagttttcgggactcaaacccagatctgtcactgggcaaggtggctcacacctataatcccagccctttgggagactgaggccagcagatctcctgtggccaggagttcaagcctggccaacaatggcaaaaccccgtctctaccaaaaatacaaaaattagctgggcgtggtggcacacacccgtaatcccagctactcaggtggctgaggcaggagaatcacttgaacccaggaggtggtggttgcagtgagcctagatcgtgccactgcattccagcctgagcgacagagtaagactctgtctccaaaaaaaacccagatctgtccgactctgacacccaacctttaatcactcactttctgtcaatgtcacctccgttttgaccagccaagctagacctccctggagcctgtggagaagccaaggtagaaaagggttggaaaagaatgataaaataggccaggtgcggtggctcaagcctgtactcccagcacttttggaggccgagacaggcagattgcttgagcccaggagttcaagaccagcctgggcaacataatgagaccctgtttcaacttaaaaaaaagaaatggtaatgaacaattgtcaattctgagcagctgggtatggtatgaccctgtgtactttttctgtattttaaaatgttctcaaaataaaacttgttt

SEQ ID NO: 1039 - DNA, 7976 bp, Homo sapiens
gttgatgccggcccaggatggatcagacctgtgaactacccagaagaaattgtctgctgcccttttccaatccagtgaatttagatgcccctgaagacaaggacagccctttcggtaatggtcaatccaatttttctgagccacttaatgggtgtactatgcagttatcgactgtcagtggaacatcccaaaatgcttatggacaagattctccatcttgttacattccactgcggagactacaggatttggcctccatgatcaatgtagagtatttaaatgggtctgctgatggatcagaatcctttcaagaccctgaaaaaagtgattcaagagctcagacgccaattgtttgcacttccttgagtcctggtggtcctacagcacttgctatgaaacaggaaccctcttgtaataactcccctgaactccaggtaaaagtaacaaagactatcaagaatggctttctgcactttgagaattttacttgtgtggacgatgcagatgtagattctgaaatggacccagaacagccagtcacagaggatgagagtatagaggagatctttgaggaaactcagaccaatgccacctgcaattatgagactaaatcagagaatggtgtaaaagtggccatgggaagtgaacaagacagcacaccagagagtagacacggtgcagtcaaatcgccattcttgccattagctcctcagactgaaacacagaaaaataagcaaagaaatgaagtggacggcagcaatgaaaaagcagcccttctcccagcccccttttcactaggagacacaaacattacaatagaagagcaattaaactcaataaatttatcttttcaggatgatccagattccagtaccagtacattaggaaacatgctagaattacctggaacttcatcatcatctacttcacaggaattgccatttgttcctcagaaaattttgagtaaatgggaagccagtgttggacttgcagaacagtatgatgttcccaaggggtcaaagaaccgaaaatgtattcctggttcaatcaagttggacagtgaagaagatatgccatttgaagactgcacaaatgatcctgagtcagaacatgacctgttgcttaatggctgtttgaaatcactggcttttgattctgaacattctgcagatgagaaggaaaagccttgcgctaaatctcgagccagaaagagctctgataatccaaaaaggactagtgtgaaaaagggccacatacaatttgaagcacataaagatgaacggaggggaaagattccagagaaccttggcctaaactttatctctggggatatatctgatacgcaggcctctaatgaactttccaggatagcaaatagcctcacagggtccaacactgccccaggaagttttctgttttcttcctgtggaaaaaacactgcaaagaaagaatttgagacttcaaatggtgactctttattgggcttgcctgagggtgctttgatctcaaagtgttctcgagagaagaataaaccccaacgaagcctggtgtgtggttcaaaagtgaagctctgctatattggagcaggtgatgaggaaaagcgaagtgattccattagtatctgtaccacttctgatgatggaagcagtgacctggatcccatagaacacagctcagagtctgataacagtgtccttgaaattccagatgctttcgatagaacagagaacatgttatctatgcagaaaaatgaaaagataaagtattctaggtttgctgccacaaacactagggtaaaagcaaaacagaagcctctcattagtaactcacatacagaccacttaatgggttgtactaagagtgcagagcctggaaccgagacgtctcaggttaatctctctgatctgaaggcatctactcttgttcacaaaccccagtcagattttacaaatgatgctctctctccaaaattcaacctgtcatcaagcatatccagtgagaactcgttaataaagggtggggcagcaaatcaagctctattacattcgaaaagcaaacagcccaagttccgaagtataaagtgcaaacacaaagaaaatccagttatggcagaacccccagttataaatgaggagtgcagtttgaaatgctgctcttctgataccaaaggctctcctttggccagcatttctaaaagtgggaaagtggatggtctaaaactactgaacaatatgcatgagaaaaccagggattcaagtgacatagaaacagcagtggtgaaacatgttttatccgagttgaaggaactctcttacagatccttaggtgaggatgtcagtgactctggaacatcaaagccatcaaaaccattacttttctcttctgcttctagtcagaatcacatacctattgaaccagactacaaattcagtacattgctaatgatgttgaaagatatgcatgatagtaagacgaaggagcagcggttgatgactgctcaaaacctggtctcttaccggagtcctggtcgtggggactgttctactaatagtcctgtaggagtctctaaggttttggtttcaggaggctccacacacaattcagagaaaaagggagatggcactcagaactccgccaatcctagccctagtgggggtgactctgcattatctggcgagttgtctgcttccctacctggcttactgtccgacaagagagacctccctgcttctggtaaaagtcgttcagactgtgttactaggcgcaactgtggacgatcaaagccttcatccaaattgcgagatgctttttcagcccaaatggtaaagaacacagtgaaccgtaaagccttaaagaccgagcgcaaaagaaaactgaatcagcttccaagtgtgactcttgatgctgtactgcagggagaccgagaacgtggaggttcattgagaggtggggcagaagatcctagtaaagaggatccccttcagataatgggccacttaacaagtgaagatggtgaccatttttctgatgtgcatttcgatagcaaggttaagcaatctgatcctggtaaaatttctgaaaaaggactctcttttgaaaacggaaaaggcccagagctggactctgtaatgaacagtgagaatgatgaactcaatggtgtaaatcaagtggtgcctaaaaagcggtggcagcgtttaaaccaaaggcgcactaaacctcgtaagcgcatgaacagatttaaagagaaagaaaactctgagtgtgcctttagggtcttacttcctagtgaccctgtgcaggaggggcgggatgagtttccagagcatagaactccttcagcaagcatacttgaggaaccactgacagagcaaaatcatgctgactgcttagattcagctgggccacggttaaatgtttgtgataaatccagtgccagcattggtgacatggaaaaggagccaggaattcccagtttgacaccacaggctgagctccctgaaccagctgtgcggtcagagaagaaacgccttaggaagccaagcaagtggcttttggaatatacagaagaatatgatcagatatttgctcctaagaaaaaacaaaagaaggtacaggagcaggtgcacaaggtaagttcccgctgtgaagaggaaagccttctagcccgaggtcgatctagtgctcagaacaagcaggtggacgagaattctttgatttcaaccaaagaagagcctccagttcttgaaagggaggctccgtttttggagggccccttggctcagtcagaacttggaggtggacatgctgagttgccgcagctgaccttgtctgtgcctgtggctccggaagtctctccacggcctgcccttgagtctgaggaattgctagttaaaacgccaggaaattatgaaagtaaacgtcaaagaaaaccaactaagaaacttcttgaatccaatgatttagaccctggatttatgcccaagaagggggaccttggcctttctaaaaagtgctatgaagctggtcacctggagaatggcataactgaatcttgtgccacatcttattcaaaagattttggtggaggcactaccaagatatttgacaagccaaggaagcgaaaacgacagaggcatgctgcagccaagatgcagtgtaaaaaagtgaaaaatgatgactcgtcaaaagagattccaggctcagagggagaactaatgcctcacaggacggccacaagccccaaggagactgttgaggaaggtgtagaacacgatcccgggatgcctgcctctaaaaaaatgcagggtgaacgcggtggaggagctgcactcaaggagaatgtctgtcagaattgtgaaaaattgggtgagctgctgttatgtgaggctcagtgctgtggggctttccacctggagtgccttggattgactgagatgccaagaggaaaatttatctgcaatgaatgtcgcacaggaatccatacctgttttgtatgtaagcagagtggggaagatgttaaaaggtgccttctacccttgtgtggaaagttttaccatgaagagtgtgtccagaagtacccacccactgttatgcagaacaagggcttccggtgctccctccacatctgtataacctgtcatgctgctaatccagccaatgtttctgcatctaaaggtcggttgatgcgctgtgtccgctgtcctgtggcataccacgccaatgacttttgcctggctgctgggtcaaagatccttgcatctaatagtatcatctgccctaatcactttacccctaggcggggctgccgaaatcatgagcatgttaatgttagctggtgctttgtgtgctcagaaggaggcagccttctgtgctgtgattcttgccctgctgcttttcatcgtgaatgcctgaacattgatatccctgaaggaaactggtattgcaatgactgtaaagcaggcaaaaagccacactacagggagattgtctgggtaaaagttggacgatacaggtggtggccagctgagatctgccatcctcgagctgttccttccaacattgataagatgagacatgatgtgggagagttcccagtcctcttttttggatctaatgactatttgtggactcaccaggcccgagtcttcccttacatggagggtgacgtgagcagcaaggataagatgggcaaaggagtggatgggacatataaaaaagtggagcacatgatccagaagaaccaatgtctcttcaccaacacccagtgtaaggtttgctgcgccttgcttatttctgagtcccagaagctggcacattaccagagcagcagaagcaaagacaagaaccagtgctgccccatctgtaacatgaccttttcctcccctgtcgtggcccagtcgcactacctggggaagacccacgcaaagaacttaaagctgaagcagcagtccactaaggtggaagccttgcaccagaatagagagatgatagacccagacaagttctgcagcctctgccatgcaactttcaacgaccctgtcatggctcaacaacattatgtgggcaagaaacacagaaaacaggagaccaagctcaaactaatggcacgctatgggcggctggcggaccctgctgtcactgactttccagctggaaagggctacccctgcaaaacatgtaagatagtgctgaactccatagaacagtaccaagctcatgtcagcggcttcaaacacaagaaccagtcaccaaaaacagtggcatcatccctgggccagattccaatgcaaaggcaacccattcagaaagactcaaccaccttggaagactagaggtgattctgcccagcatcccatattgggccagccatgagccagcttcccgtgactgctcagcccttggctccctcttgctcgttgttctcaccaggaaagtacacgggcctgaggcaggattgggccacagacagcctctcattggtccgggctaattcactcctgctgctcccctttggcaggggtcctgtaggtcatgacaggggaggcaagggtattgagagactcggggtctcgcggggtggtagtttggagggtggctttccccatttcccaacccctctgggccttaggtgctgaggcccctgccacctgtctttcctctaaaggtcagttttgggccagttcttgcaactaaagagcagagatctctctgggccctagacatttccagcaaaacctggaactttcatgccaaacctggggcagggcaggaaacagaggaaatggctgcaacatgggagcttggagctaatacgacactctgccttcccccagaaggtgcaggctttcctgagtcttagaccagatatggccagttgcgcaggtttctgccaactgtgaagtatcctcctggagcagtgacacaatcttggcggagcattgctacccccgctgccccctccacagttcctgaatggtgctaaggatctgcagcagttggcaacgagctggggctgggggcggcctccatgtccactgagatcataggacactccaatggggatgggacctttcccctcctccatcagaggtgctctgaccctaggttacacgggaaagtgccccacatgcaagtctccctgagggttctgcccctaaaggcagactgcctcatgcccgctagctgtgaggttcattgctaccctcggccctactagccctctcttcccccttgtgcagcggaccacttgcccagtttgctgtggtgctagccttccccatcatccaccgggtgatttctgggtcccagggaaagaaagagagagctgatgcaggtttctacagtgaggaacaggcgtttcccaggccccacacccagatttctctatctttgctgtgttttatggcctgggactgagtccacacggatagatttttccttgtaaccttgagacgagaattccaaggagtgtcaccatcagaggcttctcttcattgtgtcaaagaagcccctagctgctctcgtggcctccttcccccactccctatcccttcacctgtgaaatgcctttgctttgcatattgtgtgtggatgtgtgtgtgtgtgtgtgtgtgtttgtgtgtatgtgtgtgcttctgtgtgtgcctaatgctctgtctcttggtcactgaagcatccaaataaagaatttccctcatgggccagactacaacttaacagacctagggttttgagccatattgccattggatctagtatgtctgtcttgacccctcacccccaccccattcagacctcagtagtccccagtagtcactttaggagttgggacagagtcgagcaccctgtgaaagtctcccttgagttcaggtgccctgaactcagtacagcctcatcttctcatccaccaccttctcctgcttctcctgtcacatagggcctcatgaaggtctttaaagggtttaagctggggatctgctttatgtttgagagaactgttctggctgttatgtaaaggagtgcagggaggggcaggaaaggagacaaggaggccagtatggacactgtgtccagtatggctttccaggctaatcacttagggcagagacccagccttattcatctctacttcctgatgtccatagtggtgtgtcatgaatttttattgaatgaacaaatgaggtgtatgaggagagatggttttctcctgctcagctcttacacagtgataggtttgttccatgggacttatcataggcctggtgattcttgaaagagcatttttcatgactcaaaaatgagctgagaaggagtgttatggccaggtgcggcgtcatgcacctatagtcccagctgctcaggaggctaaggcagaaagaccattcaagcccaggagttccagcctgaagtatgctgtgatcatgcctgtgaataaccactgcactccagccagggcaacataacaagactctatctaa

SEQ ID NO: 1040 - skipped

SEQ ID NO: 1041 - DNA, 3483 bp, Homo sapiens
ggccgggtagggggttcgcctgcggccgcgtctgctcggggcctgaggcctcgaagaccccagcccaagcccccaggttgatgccggcccaggatggatcagacctgtgaactacccagaagaaattgtctgctgcccttttccaatccagtgaatttagatgcccctgaagacaaggacagccctttcggtaatggtcaatccaatttttctgagccacttaatgggtgtactatgcagttatcgactgtcagtggaacatcccaaaatgcttatggacaagattctccatcttgttacattccactgcggagactacaggatttggcctccatgatcaatgtagagtatttaaatgggtctgctgatggatcagaatcctttcaagaccctgaaaaaagtgattcaagagctcagacgccaattgtttgcacttccttgagtcctggtggtcctacagcacttgctatgaaacaggaaccctcttgtaataactcccctgaactccaggtaaaagtaacaaagactatcaagaatggctttctgcactttgagaattttacttgtgtggacgatgcagatgtagattctgaaatggacccagaacagccagtcacagaggatgagagtatagaggagatctttgaggaaactcagaccaatgccacctgcaattatgagactaaatcagagaatggtgtaaaagtggccatgggaagtgaacaagacagcacaccagagagtagacacggtgcagtcaaatcgccattcttgccattagctcctcagactgaaacacagaaaaataagcaaagaaatgaagtggacggcagcaatgaaaaagcagcccttctcccagcccccttttcactaggagacacaaacattacaatagaagagcaattaaactcaataaatttatcttttcaggatgatccagattccagtaccagtacattaggaaacatgctagaattacctggaacttcatcatcatctacttcacaggaattgccattttgtcaacctaagaaaaagtctacgccactgaagtatgaagttggagatctcatctgggcaaaattcaagagacgcccatggtggccctgcaggatttgttctgatccgttgattaacacacattcaaaaatgaaagctggaaagggctacccctgcaaaacatgtaagatagtgctgaactccatagaacagtaccaagctcatgtcagcggcttcaaacacaagaaccagtcaccaaaaacagtggcatcatccctgggccagattccaatgcaaaggcaacccattcagaaagactcaaccaccttggaagactagaggtgattctgcccagcatcccatattgggccagccatgagccagcttcccgtgactgctcagcccttggctccctcttgctcgttgttctcaccaggaaagtacacgggcctgaggcaggattgggccacagacagcctctcattggtccgggctaattcactcctgctgctcccctttggcaggggtcctgtaggtcatgacaggggaggcaagggtattgagagactcggggtctcgcggggtggtagtttggagggtggctttccccatttcccaacccctctgggccttaggtgctgaggcccctgccacctgtctttcctctaaaggtcagttttgggccagttcttgcaactaaagagcagagatctctctgggccctagacatttccagcaaaacctggaactttcatgccaaacctggggcagggcaggaaacagaggaaatggctgcaacatgggagcttggagctaatacgacactctgccttcccccagaaggtgcaggctttcctgagtcttagaccagatatggccagttgcgcaggtttctgccaactgtgaagtatcctcctggagcagtgacacaatcttggcggagcattgctacccccgctgccccctccacagttcctgaatggtgctaaggatctgcagcagttggcaacgagctggggctgggggcggcctccatgtccactgagatcataggacactccaatggggatgggacctttcccctcctccatcagaggtgctctgaccctaggttacacgggaaagtgccccacatgcaagtctccctgagggttctgcccctaaaggcagactgcctcatgcccgctagctgtgaggttcattgctaccctcggccctactagccctctcttcccccttgtgcagcggaccacttgcccagtttgctgtggtgctagccttccccatcatccaccgggtgatttctgggtcccagggaaagaaagagagagctgatgcaggtttctacagtgaggaacaggcgtttcccaggccccacacccagatttctctatctttgctgtgttttatggcctgggactgagtccacacggatagatttttccttgtaaccttgagacgagaattccaaggagtgtcaccatcagaggcttctcttcattgtgtcaaagaagcccctagctgctctcgtggcctccttcccccactccctatcccttcacctgtgaaatgcctttgctttgcatattgtgtgtggatgtgtgtgtgtgtgtgtgtgtgtttgtgtgtatgtgtgtgcttctgtgtgtgcctaatgctctgtctcttggtcactgaagcatccaaataaagaatttccctcatgggccagactacaacttaacagacctagggttttgagccatattgccattggatctagtatgtctgtcttgacccctcacccccaccccattcagacctcagtagtccccagtagtcactttaggagttgggacagagtcgagcaccctgtgaaagtctcccttgagttcaggtgccctgaactcagtacagcctcatcttctcatccaccaccttctcctgcttctcctgtcacatagggcctcatgaaggtctttaaagggtttaagctggggatctgctttatgtttgagagaactgttctggctgttatgtaaaggagtgcagggaggggcaggaaaggagacaaggaggccagtatggacactgtgtccagtatggctttccaggctaatcacttagggcagagacccagccttattcatctctacttcctgatgtccatagtggtgtgtcatgaatttttattgaatgaacaaatgaggtgtatgaggagagatggttttctcctgctcagctcttacacagtgataggtttgttccatgggacttatcataggcctggtgattcttgaaagagcatttttcatgactcaaaaatgagctgagaaggagtgttatggccaggtgcggcgtcatgcacctatagtcccagctgctcaggaggctaaggcagaaagaccattcaagcccaggagttccagcctgaagtatgctgtgatcatgcctgtgaataaccactgcactccagccagggcaacataacaagactctatctaa

SEQ ID NO: 1042-1043 - skipped (2 entries)

SEQ ID NO: 1044 - DNA, 3287 bp, Homo sapiens
aggagtggaaggttgaggggggcgctaggcgcccttcgctccctccctctggaggagctgccgccgccaccgccgccactctgctgctgccgccgccgccgccgccgctcccgccgccattttgggttcgctttgcggaggggagacgatcccagtctcggttgcgggacccgcctcccctcagtttgccccctttagccttccacctttcccttctcctctctcgcatttccgccagtcagcttacccgctggccgcctcctgacaagcgggagggatccgccgtggacccagggaagcggaggagcctggcggccaccccctcttccccacttccctgcactctcatcgctctcggcctcggcctcggcctccgacacgagaaagatgctggtttcgagttttggagatccttgttttttatggaacacagttctgtaaaattttcataagattccttggcaataacatacgcttgtgatggaccctagaaatactgctatgttaggattgggttctgattccgaaggtttttcaagaaagagtccttctgccatcagtactggcacattggtcagtaagagagaagtagagctagaaaaaaacacaaaggaggaagaggaccttcgcaaacggaatcgagaaagaaacatcgaagctgggaaagatgatggtttgactgatgcacagcaacagttttcagtgaaagaaacaaacttttcagagggaaatttaaaattgaaaattggcctccaggctaagagaactaaaaaacctccaaagaacttggagaactatgtatgtcgacctgccataaaaacaactattaagcacccaaggaaagcacttaaaagtggaaagatgacggatgaaaagaatgaacactgtccttcaaaacgattccaagatgagatgggattctccaacatggaagatgatggcccagaagaggaggagcgtgtggctgagcctcaagctaactttaacacccctcaagctctacggtttgaggaactactggccaacctactaaatgaacaacatcagatagcgaaggaactatttgaacagctgaagatgaagaaaccttcagccaaacagcagaaggaggtagagaaggttaaaccccagtgtaaggaagttcatcagaccctgattctggacccagcacaaaggaagagactccagcagcagatgcagcagcatgttcagctcttgacacaaatccaccttcttgccacctgcaaccccaatctcaatccggaggccagtagcaccaggatatgtcttaaagagctgggaacctttgctcaaagctccatcgcccttcaccatcagtacaaccccaagtttcagaccctgttccaaccctgtaacttgatgggagctatgcagctgattgaagacttcagcacacatgtcagcattgactgcagccctcataaaactgtcaagaagactgccaatgaatttccctgtttgccaaagcaagtggcttggatcctggccacaagcaaggttttcatgtatccagagttacttccagtgtgttccctgaaggcaaagaatccccaggataagatcctcttcaccaaggctgaggacaacaagtaccttctaacctgcaagactgcccgccaactgacagtgagaatcaagaacctcaacatgaacagagctcctgacaacatcattaaattttataagaagaccaaacagctgccagtcctaggaaaatgctgtgaagagatccagccacatcagtggaagccacctatagagagagaagaacaccggctcccattctggttaaaggccagtctgccatccatccaggaagaactgcggcacatggctgatggtgctagagaggtaggaaatatgactggaaccactgagatcaactcagatcaaggcctagaaaaagacaactcagagttggggagtgaaactcggtacccactgctattgcctaagggtgtagtcctgaaactgaagccagttgccgaccgtttccccaagaaggcttggagacagaagcgttcatcagtcctgaaacccctccttatccaacccagcccctctctccagcccagcttcaaccctgggaaaacaccagcccaatcaactcattcagaagcccctccgagcaaaatggtgctccggattcctcacccaatacagccagccactgttttacagacagttccaggtgtccctccactgggggtcagtggaggtgagagttttgagtctcctgcagcactgcctgctatgccccctgaggccaggacaagcttccctctgtctgagtcccagactttgctctcttctgcccctgtgcccaaggtaatgatgccctcccctgcctcttccatgtttcgaaagccatatgtgagacggagaccctcaaaaagaaggggagccagggcctttcgctgtatcaaacctgcccctgttatccaccctgcatctgttatcttcactgttcctgctaccactgtgaagattgtgagccttggcggtggctgtaacatgatccagcctgtcaatgcggctgtggcccagagtccccagactattcccatcgccaccctcttggttaaccctacttccttcccctgtccattgaaccagccccttgtggcctcctctgtctcacccttaattgtttctggcaattctgtgaatcttcctataccatccacccctgaagataaggcccacatgaatgtggacattgcttgtgctgtggctgatggggaaaatgcctttcagggcctagaacccaaattagagccccaggaactatctcctctctctgctactgttttccccaaagtggaacatagcccagggcctccaccagtcgataaacagtgccaagaaggattgtcagagaacagtgcctatcgctggaccgttgtgaaaacagaggagggaaggcaagctctggagccgctccctcagggcatccaggagtctctaaacaactcttcccctggggatttagaggaagttgtcaagatggaacctgaagatgctacagaggaaatcagtggatttctttgagctaggagaataagagtctggagactgggagccttcacttcggcctccgattggtggcgcatagggtgtaaccaataggaaacccctaaagggtacttaaaccccagattttgcaactggggctcttgagcagcttgctttagcctgctcccactctgtggaatatacttttgcttcaataaatctgtgcttttattgcttcattgtttcattga

SEQ ID NO: 1045 - DNA, 4136 bp, Homo sapiens
aggagtggaaggttgaggggggcgctaggcgcccttcgctccctccctctggaggagctgccgccgccaccgccgccactctgctgctgccgccgccgccgccgccgctcccgccgccattttgggttcgctttgcggaggggagacgatcccagtctcggttgcgggacccgcctcccctcagtttgccccctttagccttccacctttcccttctcctctctcgcatttccgccagtcagcttacccgctggccgcctcctgacaagcgggagggatccgccgtggacccagggaagcggaggagcctggcggccaccccctcttccccacttccctgcactctcatcgctctcggcctcggcctcggcctccgacacgagaaagatgctggtttcgagttttggagatccttgttttttatggaacacagttctgtaaaattttcataagattccttggcaataacatacgcttgtgatggaccctagaaatactgctatgttaggattgggttctgattccgaaggtttttcaagaaagagtccttctgccatcagtactggcacattggtcagtaagagagaagtagagctagaaaaaaacacaaaggaggaagaggaccttcgcaaacggaatcgagaaagaaacatcgaagctgggaaagatgatggtttgactgatgcacagcaacagttttcagtgaaagaaacaaacttttcagagggaaatttaaaattgaaaattggcctccaggctaagagaactaaaaaacctccaaagaacttggagaactatgtatgtcgacctgccataaaaacaactattaagcacccaaggaaagcacttaaaagtggaaagatgacggatgaaaagaatgaacactgtccttcaaaacgacccatggatgacagtctcattgcatttcgaacgcgttctaagatgcccctgaaagatgttcccctgggccaattagaggcagagctccaagctccagacatcactccagatatgtatgaccccaatacggcagatgatgaggactggaagatgtggctggggggacttatgaatgatgatgtggggaatgaagatgaagcagatgatgatgatgatccagaatataatttcctggaagacctcgatgaaccagacacagaggatttccggactgaccgggcagtgagaatcaccaaaaaggaagtaaatgagctgatggaagagctgtttgaaactttccaagatgagatgggattctccaacatggaagatgatggcccagaagaggaggagtgtgtagctgagcctcgtcctaactttaacacccctcaagctctacggtttgaggaaccactggccaacctgttaaatgaacaacatcggacagtgaaggagctatttgaacagctgaagatgaagaaatcttcagccaaacagctgcaggaagtagagaaggttaaaccccagagtgagaaagttcatcagactctgattctggacccagcacagaggaagagactccagcagcagatgcagcagcacgttcagctcttgacccaaatccaccttcttgccacctgcaaccccaacctcaatccggaggccactaccaccaggatatttcttaaagagctgggaacctttgctcaaagctccatcgcccttcaccatcagtacaaccccaagtttcagaccctgttccaaccctgtaacttgatgggagctatgcagctgattgaagacttcagcacacatgtcagcattgactgcagccctcataaaactgtcaagaagactgcgaatgaatttccctgtttgccaaagcaagtggcttggattctggccacaagcaaggttttcatgtatccagagttacttccagtgtgttccctgaaggcaaagaatccccaggataagatcgtcttcaccaaggctgaggacaatttgttagctttaggactgaagcattttgaaggaactgagtttcctaatcctctaatcagcaagtaccttctaacctgcaaaactgcccaccaactgacagtgagaatcaagaacctcaacatgaacagagctcctgacaacatcattaaattttataagaagaccaaacagctgccagtcctaggaaaatgctgtgaagagatccagccacatcagtggaagccacctatagagagagaagaacaccggctcccattctggttaaaggccagtctgccatccatccaggaagaactgcggcacatggctgatggtgctagagaggtaggaaatatgactggaaccactgagatcaactcagatcgaagcctagaaaaagacaatttggagttggggagtgaatctcggtacccactgctattgcctaagggtgtagtcctgaaactgaagccagttgccacccgtttccccaggaaggcttggagacagaagcgttcatcagtcctgaagcccctccttatccaacccagcccctctctccagcccagcttcaaccctgggaaaacaccagcccgatcaactcattcagaagcccctccgagcaaaatggtgctccggattcctcacccaatacagccagccactgttttacagacagttccaggtgtccctccactgggggtcagtggaggtgagagttttgagtctcctgcagcactgcctgctgtgccccctgaggccaggacaagcttccctctgtctgagtcccagactttgctctcttctgcccctgtgcccaaggtaatgctgccctcccttgccccttctaagtttcgaaagccatatgtgagacggagaccctcaaagagaagaggagtcaaggcctctccctgtatgaaacctgcccctgttatccaccaccctgcatctgttatcttcactgttcctgctaccactgtgaagattgtgagccttggcggtggctgtaacatgatccagcctgtcaatgcggctgtggcccagagtccccagactattcccatcactaccctcttggttaaccctacttccttcccctgtccattgaaccagtcccttgtggcctcctctgtctcacccttaattgtttctggcaattctgtgaatcttcctataccatccacccctgaagataaggcccacgtgaatgtggacattgcttgtgctgtggctgatggggaaaatgcctttcagggcctagaacccaaattagagccccaggaactatctcctctctctgctactgttttcccgaaagtggaacatagcccagggcctccactagcagatgcagagtgccaagaaggattgtcagagaatagtgcctgtcgctggaccgttgtgaaaacagaggaggggaggcaagctctggagccgctccctcagggcatccaggagtctctaaacaaccctacccctggggatttagaggaaattgtcaagatggaacctgaagaagctagagaggaaatcagtggatcccctgagcgtgatatttgtgatgacatcaaagtggaacatgctgtggaattggacactggtgccccaagcgaggagttgagcagtgctggagaagtaacgaaacagacagtcttacagaaggaagaggagaggagtcagccaactaaaaccccttcatcttctcaagagccccctgatgaaggaacctcagggacagatgtgaacaaaggatcatcaaagaatgctttgtcctcaatggatcctgaagtgaggcttagtagccccccagggaagccagaagattcatccagtgttgatggtcagtcagtggggactccagttgggccagaaactggaggagagaagaatgggccagaagaagaggaagaagaggactttgatgacctcacccaagatgaggaagatgaaatgtcatcagcttctgaggaatctgtgctttctgtcccagaactccaggtgagagctggagaatattctcaagtatttcgtggactcagtaatatgtatcacttattgatatgccacctgcttgcttgctgcactatggatagtcctaaaatcatttgtatttgatttgtgaatgcattatgggacatgattgtggagttgaggtgaaatgagatggaaaggatgaaattttacttattatattaaactcgtttacacattaa

SEQ ID NO: 1046 - DNA, 1391 bp, Homo sapiens
gcttgcgccgttgaagtcagcttacccgctggccgcctcctgacaagcgggagggatccgccgtggacccagggaagcggaggagcctggcggccaccccctcttccccacttccctgcactctcatcgctctcggcctcggcctcggcctccgacacgagaaagatgctggtttcgagttttggagatccttgttttttatggaacacagttctgtaaaattttcataagattccttggcaataacatacgcttgtgatggaccctagaaatactgctatgttaggattgggttctgattccgaaggtttttcaagaaagagtccttctgccatcagtactggcacattggtcagtaagagagaagtagagctagaaaaaaacacaaaggaggaagaggaccttcgcaaacggaatcgagaaagaaacatcgaagctgggaaagatgatggtttgactgatgcacagcaacagttttcagtgaaagaaacaaacttttcagagggaaatttaaaattgaaaattggcctccaggctaagagaactaaaaaacctccaaagaacttggagaactatgtatgtcgacctgccataaaaacaactattaagcacccaaggaaagcacttaaaagtggaaagatgacggatgaaaagaatgaacactgtccttcaaaacgattccaagatgagatgggattctccaacatggaagatgatggcccagaagaggaggagcgtgtggctgagcctcaagctaactttaacacccctcaagctctacggtttgaggaactactggccaacctactaaatgaacaacatcagatagcgaaggaactatttgaacagctgaagatgaagaaaccttcagccaaacagcagaaggaggtagagaaggttaaaccccagtgtaaggaagttcatcagaccctgattctggacccagcacaaaggaagagactccagcagcagatgcagcagcatgttcagctcttgacacaaatccaccttcttgccacctgcaaccccaatctcaatccggaggccagtagcaccaggatatgtcttaaagagctgggaacctttgctcaaagctccatcgcccttcaccatcagtacaaccccaagtttcagaccctgttccaaccctgtaacttgatgggagctatgcagctgattgaagacttcagcacacatgtcagcattgactgcagccctcataaaactgtcaagaagactgtttgttagctttaggactgaagcattttgaagggactgagtttcttaaccctctaatcagcaagtaccttctaacctgcaagactgcccgccaactgacagtgagaatcaagaacctcaacatgaacagagctcctgacaacatcattaaa

SEQ ID NO: 1047 - skipped

SEQ ID NO: 1048 - DNA, 2476 bp, Homo sapiens
aggagtggaaggttgaggggggcgctaggcgcccttcgctccctccctctggaggagctgccgccgccaccgccgccactctgctgctgccgccgccgccgccgccgctcccgccgccattttgggttcgctttgcggaggggagacgatcccagtctcggttgcgggacccgcctcccctcagtttgccccctttagccttccacctttcccttctcctctctcgcatttccgccagtcagcttacccgctggccgcctcctgacaagcgggagggatccgccgtggacccagggaagcggaggagcctggcggccaccccctcttccccacttccctgcactctcatcgctctcggcctcggcctcggcctccgacacgagaaagatgctggtttcgagttttggagatccttgttttttatggaacacagttctgtaaaattttcataagattccttggcaataacatacgcttgtgatggaccctagaaatactgctatgttaggattgggttctgattccgaaggtttttcaagaaagagtccttctgccatcagtactggcacattggtcagtaagagagaagtagagctagaaaaaaacacaaaggaggaagaggaccttcgcaaacggaatcgagaaagaaacatcgaagctgggaaagatgatggtttgactgatgcacagcaacagttttcagtgaaagaaacaaacttttcagagggaaatttaaaattgaaaattggcctccaggctaagagaactaaaaaacctccaaagaacttggagaactatgtatgtcgacctgccataaaaacaactattaagcacccaaggaaagcacttaaaagtggaaagatgacggatgaaaagaatgaacactgtccttcaaaacgacccatggatgacagtctcattgcatttcgaacgcgttctaagatgcccctgaaagatgttcccctgggccaattagaggcagagctccaagctccagacatcactccagatatgtatgaccccaatacggcagatgatgaggactggaagatgtggctggggggacttatgaatgatgatgtggggaatgaagatgaagcagatgatgatgatgatccagaatataatttcctggaagacctcgatgaaccagacacagaggatttccggactgaccgggcagtgagaatcaccaaaaaggaagtaaatgagctgatggaagagctgtttgaaactttccaagatgagatgggattctccaacatggaagatgatggcccagaagaggaggagtgtgtagctgagcctcgtcctaactttaacacccctcaagctctacggtttgaggaaccactggccaacctgttaaatgaacaacatcggacagtgaaggagctatttgaacagctgaagatgaagaaatcttcagccaaacagctgcaggaagtagagaaggttaaaccccagagtgagaaagttcatcagactctgattctggacccagcacagaggaagagactccagcagcagatgcagcagcacgttcagctcttgacccaaatccaccttcttgccacctgcaaccccaacctcaatccggaggccactaccaccaggatatttcttaaagagctgggaacctttgctcaaagctccatcgcccttcaccatcagtacaaccccaagtttcagaccctgttccaaccctgtaacttgatgggagctatgcagctgattgaagacttcagcacacatgtcagcattgactgcagccctcataaaactgtcaagaagactggtaggagacagatgtgtcagctttaagtttttacttgcggtgagaggtggtgggaatcttatcccatagataactaaggatacttgcctaggaatggaggacacaggacatttgtaatttcttccttctctcttttatcctccctttgtactcattatccaagttctagaattacatgataatctctgggcctgggtaaagtgtggaggcagtggacagtataggaatatgggaggtagagatctgaggctcagtgctaagaattggactacagcaatatgaggggtaagtattaggagtcagatcgagataaactggggcctggtaaagatgaaagtcaggtggtaaagtttggtcatgtttagctttttactgtcttcattaagatcaactaaggccaggcgcggtggctcacgcctgtaatcccagtactttgggaggccgaggcacggggaacacaatgtcaggagatggagaccatcctggcgaacacagtgaaaccccgtctctactaaaaatacagaaattagccaggcatgggggcacgcgcctgtagtcccagctactcgggaggctgaggcaggagaatcgcttgaacccaggaggcagagtttgcagtgagccaagatagcatcattgcactccagcctgggcgacagagcgagactcagtctcaaa

SEQ ID NO: 1049 - DNA, 3367 bp, Homo sapiens
aggagtggaaggttgaggggggcgctaggcgcccttcgctccctccctctggaggagctgccgccgccaccgccgccactctgctgctgccgccgccgccgccgccgctcccgccgccattttgggttcgctttgcggaggggagacgatcccagtctcggttgcgggacccgcctcccctcagtttgccccctttagccttccacctttcccttctcctctctcgcatttccgccagtcagcttacccgctggccgcctcctgacaagcgggagggatccgccgtggacccagggaagcggaggagcctggcggccaccccctcttccccacttccctgcactctcatcgctctcggcctcggcctcggcctccgacacgagaaagatgctggtttcgagttttggagatccttgttttttatggaacacagttctgtaaaattttcataagattccttggcaataacatacgcttgtgatggaccctagaaatactgctatgttaggattgggttctgattccgaaggtttttcaagaaagagtccttctgccatcagtactggcacattggtcagtaagagagaagtagagctagaaaaaaacacaaaggaggaagaggaccttcgcaaacggaatcgagaaagaaacatcgaagctgggaaagatgatggtttgactgatgcacagcaacagttttcagtgaaagaaacaaacttttcagagggaaatttaaaattgaaaattggcctccaggctaagagaactaaaaaacctccaaagaacttggagaactatgtatgtcgacctgccataaaaacaactattaagcacccaaggaaagcacttaaaagtggaaagatgacggatgaaaagaatgaacactgtccttcaaaacgattccaagatgagatgggattctccaacatggaagatgatggcccagaagaggaggagcgtgtggctgagcctcaagctaactttaacacccctcaagctctacggtttgaggaactactggccaacctactaaatgaacaacatcagatagcgaaggaactatttgaacagctgaagatgaagaaaccttcagccaaacagcagaaggaggtagagaaggttaaaccccagtgtaaggaagttcatcagaccctgattctggacccagcacaaaggaagagactccagcagcagatgcagcagcatgttcagctcttgacacaaatccaccttcttgccacctgcaaccccaatctcaatccggaggccagtagcaccaggatatgtcttaaagagctgggaacctttgctcaaagctccatcgcccttcaccatcagtacaaccccaagtttcagaccctgttccaaccctgtaacttgatgggagctatgcagctgattgaagacttcagcacacatgtcagcattgactgcagccctcataaaactgtcaagaagactgccaatgaatttccctgtttgccaaagcaagtggcttggatcctggccacaagcaaggttttcatgtatccagagttacttccagtgtgttccctgaaggcaaagaatccccaggataagatcctcttcaccaaggctgaggacaatttgttagctttaggactgaagcattttgaagggactgagtttcttaaccctctaatcagcaagtaccttctaacctgcaagactgcccgccaactgacagtgagaatcaagaacctcaacatgaacagagctcctgacaacatcattaaattttataagaagaccaaacagctgccagtcctaggaaaatgctgtgaagagatccagccacatcagtggaagccacctatagagagagaagaacaccggctcccattctggttaaagagtgttctcatttccaataggccagtctgccatccatccaggaagaactgcggcacatggctgatggtgctagagaggtaggaaatatgactggaaccactgagatcaactcagatcaaggcctagaaaaagacaactcagagttggggagtgaaactcggtacccactgctattgcctaagggtgtagtcctgaaactgaagccagttgccgaccgtttccccaagaaggcttggagacagaagcgttcatcagtcctgaaacccctccttatccaacccagcccctctctccagcccagcttcaaccctgggaaaacaccagcccaatcaactcattcagaagcccctccgagcaaaatggtgctccggattcctcacccaatacagccagccactgttttacagacagttccaggtgtccctccactgggggtcagtggaggtgagagttttgagtctcctgcagcactgcctgctatgccccctgaggccaggacaagcttccctctgtctgagtcccagactttgctctcttctgcccctgtgcccaaggtaatgatgccctcccctgcctcttccatgtttcgaaagccatatgtgagacggagaccctcaaaaagaaggggagccagggcctttcgctgtatcaaacctgcccctgttatccaccctgcatctgttatcttcactgttcctgctaccactgtgaagattgtgagccttggcggtggctgtaacatgatccagcctgtcaatgcggctgtggcccagagtccccagactattcccatcgccaccctcttggttaaccctacttccttcccctgtccattgaaccagccccttgtggcctcctctgtctcacccttaattgtttctggcaattctgtgaatcttcctataccatccacccctgaagataaggcccacatgaatgtggacattgcttgtgctgtggctgatggggaaaatgcctttcagggcctagaacccaaattagagccccaggaactatctcctctctctgctactgttttccccaaagtggaacatagcccagggcctccaccagtcgataaacagtgccaagaaggattgtcagagaacagtgcctatcgctggaccgttgtgaaaacagaggagggaaggcaagctctggagccgctccctcagggcatccaggagtctctaaacaactcttcccctggggatttagaggaagttgtcaagatggaacctgaagatgctacagaggaaatcagtggatttctttgagctaggagaataagagtctggagactgggagccttcacttcggcctccgattggtggcgcatagggtgtaaccaataggaaacccctaaagggtacttaaaccccagattttgcaactggggctcttgagcagcttgctttagcctgctcccactctgtggaatatacttttgcttcaataaatctgtgcttttattgcttcattgtttcattga

SEQ ID NO: 1050 - DNA, 2489 bp, Homo sapiens
aggagtggaaggttgaggggggcgctaggcgcccttcgctccctccctctggaggagctgccgccgccaccgccgccactctgctgctgccgccgccgccgccgccgctcccgccgccattttgggttcgctttgcggaggggagacgatcccagtctcggttgcgggacccgcctcccctcagtttgccccctttagccttccacctttcccttctcctctctcgcatttccgccagtcagcttacccgctggccgcctcctgacaagcgggagggatccgccgtggacccagggaagcggaggagcctggcggccaccccctcttccccacttccctgcactctcatcgctctcggcctcggcctcggcctccgacacgagaaagatgctggtttcgagttttggagatccttgttttttatggaacacagttctgtaaaattttcataagattccttggcaataacatacgcttgtgatggaccctagaaatactgctatgttaggattgggttctgattccgaaggtttttcaagaaagagtccttctgccatcagtactggcacattggtcagtaagagagaagtagagctagaaaaaaacacaaaggaggaagaggaccttcgcaaacggaatcgagaaagaaacatcgaagctgggaaagatgatggtttgactgatgcacagcaacagttttcagtgaaagaaacaaacttttcagagggaaatttaaaattgaaaattggcctccaggctaagagaactaaaaaacctccaaagaacttggagaactatgtatgtcgacctgccataaaaacaactattaagcacccaaggaaagcacttaaaagtggaaagatgacggatgaaaagaatgaacactgtccttcaaaacgattttataagaagaccaaacagctgccagtcctaggaaaatgctgtgaagagatccagccacatcagtggaagccacctatagagagagaagaacaccggctcccattctggttaaaggccagtctgccatccatccaggaagaactgcggcacatggctgatggtgctagagaggtaggaaatatgactggaaccactgagatcaactcagatcaaggcctagaaaaagacaactcagagttggggagtgaaactcggtacccactgctattgcctaagggtgtagtcctgaaactgaagccagttgccgaccgtttccccaagaaggcttggagacagaagcgttcatcagtcctgaaacccctccttatccaacccagcccctctctccagcccagcttcaaccctgggaaaacaccagcccaatcaactcattcagaagcccctccgagcaaaatggtgctccggattcctcacccaatacagccagccactgttttacagacagttccaggtgtccctccactgggggtcagtggaggtgagagttttgagtctcctgcagcactgcctgctatgccccctgaggccaggacaagcttccctctgtctgagtcccagactttgctctcttctgcccctgtgcccaaggtaatgatgccctcccctgcctcttccatgtttcgaaagccatatgtgagacggagaccctcaaaaagaaggggagccagggcctttcgctgtatcaaacctgcccctgttatccaccctgcatctgttatcttcactgttcctgctaccactgtgaagattgtgagccttggcggtggctgtaacatgatccagcctgtcaatgcggctgtggcccagagtccccagactattcccatcgccaccctcttggttaaccctacttccttcccctgtccattgaaccagccccttgtggcctcctctgtctcacccttaattgtttctggcaattctgtgaatcttcctataccatccacccctgaagataaggcccacatgaatgtggacattgcttgtgctgtggctgatggggaaaatgcctttcagggcctagaacccaaattagagccccaggaactatctcctctctctgctactgttttccccaaagtggaacatagcccagggcctccaccagtcgataaacagtgccaagaaggattgtcagagaacagtgcctatcgctggaccgttgtgaaaacagaggagggaaggcaagctctggagccgctccctcagggcatccaggagtctctaaacaactcttcccctggggatttagaggaagttgtcaagatggaacctgaagatgctacagaggaaatcagtggatttctttgagctaggagaataagagtctggagactgggagccttcacttcggcctccgattggtggcgcatagggtgtaaccaataggaaacccctaaagggtacttaaaccccagattttgcaactggggctcttgagcagcttgctttagcctgctcccactctgtggaatatacttttgcttcaataaatctgtgcttttattgcttcattgtttcattga

SEQ ID NO: 1051 - DNA, 6814 bp, Homo sapiens
gcttgcgccgttgaagtcagcttacccgctggccgcctcctgacaagcgggagggatccgccgtggacccagggaagcggaggagcctggcggccaccccctcttccccacttccctgcactctcatcgctctcggcctcggcctcggcctccgacacgagaaagatgctggtttcgagttttggagatccttgttttttatggaacacagttctgtaaaattttcataagattccttggcaataacatacgcttgtgatggaccctagaaatactgctatgttaggattgggttctgattccgaaggtttttcaagaaagagtccttctgccatcagtactggcacattggtcagtaagagagaagtagagctagaaaaaaacacaaaggaggaagaggaccttcgcaaacggaatcgagaaagaaacatcgaagctgggaaagatgatggtttgactgatgcacagcaacagttttcagtgaaagaaacaaacttttcagagggaaatttaaaattgaaaattggcctccaggctaagagaactaaaaaacctccaaagaacttggagaactatgtatgtcgacctgccataaaaacaactattaagcacccaaggaaagcacttaaaagtggaaagatgacggatgaaaagaatgaacactgtccttcaaaacgacccatggatgacagtctcattgcatttcgaacgcgttctaagatgcccctgaaagatgttcccctgggccaattagaggcagagctccaagctccagacatcactccagatatgtatgaccccaatacggcagatgatgaggactggaagatgtggctggggggacttatgaatgatgatgtggggaatgaagatgaagcagatgatgatgatgatccagaatataatttcctggaagacctcgatgaaccagacacagaggatttccggactgaccgggcagtgagaatcaccaaaaaggaagtaaatgagctgatggaagagctgtttgaaactttccaagatgagatgggattctccaacatggaagatgatggcccagaagaggaggagtgtgtagctgagcctcgtcctaactttaacacccctcaagctctacggtttgaggaaccactggccaacctgttaaatgaacaacatcggacagtgaaggagctatttgaacagctgaagatgaagaaatcttcagccaaacagctgcaggaagtagagaaggttaaaccccagagtgagaaagttcatcagactctgattctggacccagcacagaggaagagactccagcagcagatgcagcagcacgttcagctcttgacccaaatccaccttcttgccacctgcaaccccaacctcaatccggaggccactaccaccaggatatttcttaaagagctgggaacctttgctcaaagctccatcgcccttcaccatcagtacaaccccaagtttcagaccctgttccaaccctgtaacttgatgggagctatgcagctgattgaagacttcagcacacatgtcagcattgactgcagccctcataaaactgtcaagaagactgcgaatgaatttccctgtttgccaaagcaagtggcttggattctggccacaagcaaggttttcatgtatccagagttacttccagtgtgttccctgaaggcaaagaatccccaggataagatcgtcttcaccaaggctgaggacaatttgttagctttaggactgaagcattttgaaggaactgagtttcctaatcctctaatcagcaagtaccttctaacctgcaaaactgcccaccaactgacagtgagaatcaagaacctcaacatgaacagagctcctgacaacatcattaaattttataagaagaccaaacagctgccagtcctaggaaaatgctgtgaagagatccagccacatcagtggaagccacctatagagagagaagaacaccggctcccattctggttaaaggccagtctgccatccatccaggaagaactgcggcacatggctgatggtgctagagaggtaggaaatatgactggaaccactgagatcaactcagatcgaagcctagaaaaagacaatttggagttggggagtgaatctcggtacccactgctattgcctaagggtgtagtcctgaaactgaagccagttgccacccgtttccccaggaaggcttggagacagaagcgttcatcagtcctgaagcccctccttatccaacccagcccctctctccagcccagcttcaaccctgggaaaacaccagcccgatcaactcattcagaagcccctccgagcaaaatggtgctccggattcctcacccaatacagccagccactgttttacagacagttccaggtgtccctccactgggggtcagtggaggtgagagttttgagtctcctgcagcactgcctgctgtgccccctgaggccaggacaagcttccctctgtctgagtcccagactttgctctcttctgcccctgtgcccaaggtaatgctgccctcccttgccccttctaagtttcgaaagccatatgtgagacggagaccctcaaagagaagaggagtcaaggcctctccctgtatgaaacctgcccctgttatccaccaccctgcatctgttatcttcactgttcctgctaccactgtgaagattgtgagccttggcggtggctgtaacatgatccagcctgtcaatgcggctgtggcccagagtccccagactattcccatcactaccctcttggttaaccctacttccttcccctgtccattgaaccagtcccttgtggcctcctctgtctcacccttaattgtttctggcaattctgtgaatcttcctataccatccacccctgaagataaggcccacgtgaatgtggacattgcttgtgctgtggctgatggggaaaatgcctttcagggcctagaacccaaattagagccccaggaactatctcctctctctgctactgttttcccgaaagtggaacatagcccagggcctccactagcagatgcagagtgccaagaaggattgtcagagaatagtgcctgtcgctggaccgttgtgaaaacagaggaggggaggcaagctctggagccgctccctcagggcatccaggagtctctaaacaaccctacccctggggatttagaggaaattgtcaagatggaacctgaagaagctagagaggaaatcagtggatcccctgagcgtgatatttgtgatgacatcaaagtggaacatgctgtggaattggacactggtgccccaagcgaggagttgagcagtgctggagaagtaacgaaacagacagtcttacagaaggaagaggagaggagtcagccaactaaaaccccttcatcttctcaagagccccctgatgaaggaacctcagggacagatgtgaacaaaggatcatcaaagaatgctttgtcctcaatggatcctgaagtgaggcttagtagccccccagggaagccagaagattcatccagtgttgatggtcagtcagtggggactccagttgggccagaaactggaggagagaagaatgggccagaagaagaggaagaagaggactttgatgacctcacccaagatgaggaagatgaaatgtcatcagcttctgaggaatctgtgctttctgtcccagaactccaggaaacaatggagaaactgacttggctggcatctgaaaggcgcatgagtcaggagggtgagtctgaagaagagaattctcaggaggagaactctgagccagaagaagaggaggaagaagaagcagaaggaatggaaagcctgcagaaagaggatgaaatgacggatgaagcagttggagactctgctgagaagcctcctacttttgcttcacctgagactgctccagaagtggagaccagcagaactccaccaggagagagcatcaaagctgctggaaaaggccggaacaatcatcgagctcgcaacaagcggggaagtcgggctcgggccagcaaggacacctccaagctgctgttgctgtatgatgaggacattctcgagcgagatccactcagggagcagaaggacttggcctttgcccaagcttatctgaccagggtgcgagaagccctacaacatatccctggcaagtatgaagacttccttcaagtcatctatgaatttgagtcaagtacccagagacggacggctgtagatctctacaaaagcctgcaaattctgctccaagactggcctcagctgttgaaagactttgctgctttcctgttacctgagcaagctctggcctgtggattatttgaggagcagcaggcttttgagaagagccgcaagttccttcggcagctggagatttgctttgcagagaacccctcacaccaccagaagattatcaaggtcctccaaggctgtgcagactgccttccccaggagatcaccgagctcaagacacagatgtggcagctcctcaagggccacgaccacctgcaggatgagttttctatcttctttgaccacttgcgcccagcagctagccggatgggtgactttgaagagatcaattggactgaggaaaaggagtatgagtttgatggctttgaagaagtggccctgcctgatgtggaagaagaggaggagcctcccaagatacccacagcctcaaagaacaagaggaaaaaagagatcggggtccaaaatcatgataaggagactgaatggccagatggggccaaggactgtgcctgctcctgccatgaaggaggtccagattccaagctgaagaagagcaaaaggcggagctgtagccactgtagcagcaaggtctgtgacagcaaatcctacaagagcaaggagccccatgagttggtgggcagcagcccccaccgagaggctagtcctatgcctggtgctaaggaagctgggcagggcaaggatatgatggaagaggaagccccagaggagcgggagagcactgaggccacccagagcaggactgtcaggaccaccagaaagggagagatgcctgtttcaggattggcagtggggagcactttgccatcccctcgagaagtgactgttacagaacggctcctcctggatggcccaccacctcattcaccagagactcctcaatttccccccacaactggagctgtactgtacactgttaagagaaaccaggttgggcctgaggttcgctcctgccccaaggcatcccccagacttcagaaagagagggagggccaaaaggcagtgagtgagtcagaggctttgatgctggtctgggatgcatcagaaactgagaaattgcctggtaccgtggaaccccctgcttccttcctgagtcctgtttcctcaaagaccagagatgcagggagaagacatgtgtccgggaaaccagacactcaagagagatggctgccctcaagcagagctcgggtgaagacaagagacaggacgtgccctgtccatgaatctccatcaggaattgacacctcagagacttctcccaaagcccctagagggggtttggctaaagacagtggaacacaggccaagggtccagagggggagcagcagccaaaggccgcagaagctacggtgtgtgccaacaacagcaaggtcagctccactggggaaaaggttgtcctgtggacaagggaagctgaccgtgtgatcctcaccatgtgccaggagcaaggggcacagccacagaccttcaacatcatctcccagcagctgggaaataagacccctgctgaggtttcccaccgttttcgagaactcatgcagctcttccacactgcctgtgaagccagctctgaggatgaggatgatgcaaccagtaccagcaatgcagaccagctgtctgaccatggggaccttctgtctgaagaggagctggatgaatgagactctgggaatcatctacacaggaccaaacccaacaggcgccctggcaccggggagggggtagttgtactctgcttgtacagtccttgagcccagtttacagatctggagagcaggaggccaggacaaggacaaaggctggaggatggagtaggacccaggggctctgccatcctaggcatcattcaaggtcttttatgaagactttacagatgtcctctgtaaatagcatcgagagtggagttcagctcctttctctacttttttttggtctgatggcacatatttattgttctgtggtctaatcacagtgtttctaaatgtaaaaagtgcatatgttggtgtagctagtcccgcgacattgagctcctctgcatgaagacactgggctcctgcatccagctgtttttattgcaaactagctcctttctcccacactgggaactttagtccacgaggctgtcaccaccctggtagcactgggccaggctttgtagctcctgcagcagctctgctacgtcatcgtgctccactccagcatccatgaagctggcccagcgccgcaagtcgagtttggtgaggtctctggccaaggcttccagggtctggtgcagggacgaagaggaacacagtgccccaaacactgggatgctctccactgctgtggagggagaggaaacagagacctgtagatggatgattattctgccctgggactcgccaaactgataaggaagtccaaccttagtagacttgattgtaaactcaacaaatttggtgtattgtccccttagtacaccagtactccagaggaagaatgcttttcttgggagccatagggtgaataaaggaatgtttaactgtg

SEQ ID NO: 1052 - skipped

SEQ ID NO: 1053 - DNA, 2176 bp, Homo sapiens
aggagtggaaggttgaggggggcgctaggcgcccttcgctccctccctctggaggagctgccgccgccaccgccgccactctgctgctgccgccgccgccgccgccgctcccgccgccattttgggttcgctttgcggaggggagacgatcccagtctcggttgcgggacccgcctcccctcagtttgccccctttagccttccacctttcccttctcctctctcgcatttccgccagtcagcttacccgctggccgcctcctgacaagcgggagggatccgccgtggacccagggaagcggaggagcctggcggccaccccctcttccccacttccctgcactctcatcgctctcggcctcggcctcggcctccgacacgagaaagatgctggtttcgagttttggagatccttgttttttatggaacacagttctgtaaaattttcataagattccttggcaataacatacgcttgtgatggaccctagaaatactgctatgttaggattgggttctgattccgaaggtttttcaagaaagagtccttctgccatcagtactggcacattggtcagtaagagagaagtagagctagaaaaaaacacaaaggaggaagaggaccttcgcaaacggaatcgagaaagaaacatcgaagctgggaaagatgatggtttgactgatgcacagcaacagttttcagtgaaagaaacaaacttttcagagggaaatttaaaattgaaaattggcctccaggctaagagaactaaaaaacctccaaagaacttggagaactatgtatgtcgacctgccataaaaacaactattaagcacccaaggaaagcacttaaaagtggaaagatgacggatgaaaagaatgaacactgtccttcaaaacgacccatggatgacagtctcattgcatttcgaacgcgttctaagatgcccctgaaagatgttcccctgggccaattagaggcagagctccaagctccagacatcactccagatatgtatgaccccaatacggcagatgatgaggactggaagatgtggctggggggacttatgaatgatgatgtggggaatgaagatgaagcagatgatgatgatgatccagaatataatttcctggaagacctcgatgaaccagacacagaggatttccggactgaccgggcagtgagaatcaccaaaaaggaagtaaatgagctgatggaagagctgtttgaaactgtgagtaatgatcctcgagtgagaacacgggattttaagtcagttctccagcaagatgtgtcatttggtctctgtgatgctccctctaggagagggggtctgactgaaccaattctccttttagtctacctgggaaagaatataatgacaagggaattttgctaactactagactcttgattatatacatgtatgttgttcttattaacattttccttgaaacttctttttgtttgagggggttcttgctccatcacccaagccagagtgcagtggtgaaattacagctcacagcagccttgaccttctaggctcaagcagtccttcgtctaagcctcctgagtagctgggacataccaacacacccagctaattattttatttgtagagacagggtcttaccacattgctcaggttgttctggaacttctgggctcaagcaattttcctgccttgggcctcccagtgctggaattataggtgtgagccagcatgcctggcccctggaaaacttttgatgacttcccctactgtcatttggtgtgtccttaaagattgtcaactagttttaaactactttgtgtacaaataattacctttttcataaatttgtttcaaaagatttttcattttaagagattgatcattttgaggctgggtgcagtggctcacgcttgtaatcccagcactttgggaggccacggcaggtggatcatctgaggtcaggagtttgagaccagcctggccaacatgatgaaaccctgtctctattaaaaatacaaaaattaggcatggtggcgggcacctgtagtcacggttactgcagaggctgaggcaggaaaattgcttgaacctgggaggcggaggttgcagtaagcccagattgtgccactgcactccagcctgggcaatagagcaagactgcaagactctgtctcaa

SEQ ID NO: 1054 - DNA, 3347 bp, Homo sapiens
aggagtggaaggttgaggggggcgctaggcgcccttcgctccctccctctggaggagctgccgccgccaccgccgccactctgctgctgccgccgccgccgccgccgctcccgccgccattttgggttcgctttgcggaggggagacgatcccagtctcggttgcgggacccgcctcccctcagtttgccccctttagccttccacctttcccttctcctctctcgcatttccgccagtcagcttacccgctggccgcctcctgacaagcgggagggatccgccgtggacccagggaagcggaggagcctggcggccaccccctcttccccacttccctgcactctcatcgctctcggcctcggcctcggcctccgacacgagaaagatgctggtttcgagttttggagatccttgttttttatggaacacagttctgtaaaattttcataagattccttggcaataacatacgcttgtgatggaccctagaaatactgctatgttaggattgggttctgattccgaaggtttttcaagaaagagtccttctgccatcagtactggcacattggtcagtaagagagaagtagagctagaaaaaaacacaaaggaggaagaggaccttcgcaaacggaatcgagaaagaaacatcgaagctgggaaagatgatggtttgactgatgcacagcaacagttttcagtgaaagaaacaaacttttcagagggaaatttaaaattgaaaattggcctccaggctaagagaactaaaaaacctccaaagaacttggagaactatgtatgtcgacctgccataaaaacaactattaagcacccaaggaaagcacttaaaagtggaaagatgacggatgaaaagaatgaacactgtccttcaaaacgattccaagatgagatgggattctccaacatggaagatgatggcccagaagaggaggagcgtgtggctgagcctcaagctaactttaacacccctcaagctctacggtttgaggaactactggccaacctactaaatgaacaacatcagatagcgaaggaactatttgaacagctgaagatgaagaaaccttcagccaaacagcagaaggaggtagagaaggttaaaccccagtgtaaggaagttcatcagaccctgattctggacccagcacaaaggaagagactccagcagcagatgcagcagcatgttcagctcttgacacaaatccaccttcttgccacctgcaaccccaatctcaatccggaggccagtagcaccaggatatgtcttaaagagctgggaacctttgctcaaagctccatcgcccttcaccatcagtacaaccccaagtttcagaccctgttccaaccctgtaacttgatgggagctatgcagctgattgaagacttcagcacacatgtcagcattgactgcagccctcataaaactgtcaagaagactgccaatgaatttccctgtttgccaaagcaagtggcttggatcctggccacaagcaaggttttcatgtatccagagttacttccagtgtgttccctgaaggcaaagaatccccaggataagatcctcttcaccaaggctgaggacaatttgttagctttaggactgaagcattttgaagggactgagtttcttaaccctctaatcagcaagtaccttctaacctgcaagactgcccgccaactgacagtgagaatcaagaacctcaacatgaacagagctcctgacaacatcattaaattttataagaagaccaaacagctgccagtcctaggaaaatgctgtgaagagatccagccacatcagtggaagccacctatagagagagaagaacaccggctcccattctggttaaaggccagtctgccatccatccaggaagaactgcggcacatggctgatggtgctagagaggtaggaaatatgactggaaccactgagatcaactcagatcaaggcctagaaaaagacaactcagagttggggagtgaaactcggtacccactgctattgcctaagggtgtagtcctgaaactgaagccagttgccgaccgtttccccaagaaggcttggagacagaagcgttcatcagtcctgaaacccctccttatccaacccagcccctctctccagcccagcttcaaccctgggaaaacaccagcccaatcaactcattcagaagcccctccgagcaaaatggtgctccggattcctcacccaatacagccagccactgttttacagacagttccaggtgtccctccactgggggtcagtggaggtgagagttttgagtctcctgcagcactgcctgctatgccccctgaggccaggacaagcttccctctgtctgagtcccagactttgctctcttctgcccctgtgcccaaggtaatgatgccctcccctgcctcttccatgtttcgaaagccatatgtgagacggagaccctcaaaaagaaggggagccagggcctttcgctgtatcaaacctgcccctgttatccaccctgcatctgttatcttcactgttcctgctaccactgtgaagattgtgagccttggcggtggctgtaacatgatccagcctgtcaatgcggctgtggcccagagtccccagactattcccatcgccaccctcttggttaaccctacttccttcccctgtccattgaaccagccccttgtggcctcctctgtctcacccttaattgtttctggcaattctgtgaatcttcctataccatccacccctgaagataaggcccacatgaatgtggacattgcttgtgctgtggctgatggggaaaatgcctttcagggcctagaacccaaattagagccccaggaactatctcctctctctgctactgttttccccaaagtggaacatagcccagggcctccaccagtcgataaacagtgccaagaaggattgtcagagaacagtgcctatcgctggaccgttgtgaaaacagaggagggaaggcaagctctggagccgctccctcagggcatccaggagtctctaaacaactcttcccctggggatttagaggaagttgtcaagatggaacctgaagatgctacagaggaaatcagtggatttctttgagctaggagaataagagtctggagactgggagccttcacttcggcctccgattggtggcgcatagggtgtaaccaataggaaacccctaaagggtacttaaaccccagattttgcaactggggctcttgagcagcttgctttagcctgctcccactctgtggaatatacttttgcttcaataaatctgtgcttttattgcttcattgtttcattga

SEQ ID NO: 1055 - DNA, 2509 bp, Homo sapiens
aggagtggaaggttgaggggggcgctaggcgcccttcgctccctccctctggaggagctgccgccgccaccgccgccactctgctgctgccgccgccgccgccgccgctcccgccgccattttgggttcgctttgcggaggggagacgatcccagtctcggttgcgggacccgcctcccctcagtttgccccctttagccttccacctttcccttctcctctctcgcatttccgccagtcagcttacccgctggccgcctcctgacaagcgggagggatccgccgtggacccagggaagcggaggagcctggcggccaccccctcttccccacttccctgcactctcatcgctctcggcctcggcctcggcctccgacacgagaaagatgctggtttcgagttttggagatccttgttttttatggaacacagttctgtaaaattttcataagattccttggcaataacatacgcttgtgatggaccctagaaatactgctatgttaggattgggttctgattccgaaggtttttcaagaaagagtccttctgccatcagtactggcacattggtcagtaagagagaagtagagctagaaaaaaacacaaaggaggaagaggaccttcgcaaacggaatcgagaaagaaacatcgaagctgggaaagatgatggtttgactgatgcacagcaacagttttcagtgaaagaaacaaacttttcagagggaaatttaaaattgaaaattggcctccaggctaagagaactaaaaaacctccaaagaacttggagaactatgtatgtcgacctgccataaaaacaactattaagcacccaaggaaagcacttaaaagtggaaagatgacggatgaaaagaatgaacactgtccttcaaaacgattttataagaagaccaaacagctgccagtcctaggaaaatgctgtgaagagatccagccacatcagtggaagccacctatagagagagaagaacaccggctcccattctggttaaagagtgttctcatttccaataggccagtctgccatccatccaggaagaactgcggcacatggctgatggtgctagagaggtaggaaatatgactggaaccactgagatcaactcagatcaaggcctagaaaaagacaactcagagttggggagtgaaactcggtacccactgctattgcctaagggtgtagtcctgaaactgaagccagttgccgaccgtttccccaagaaggcttggagacagaagcgttcatcagtcctgaaacccctccttatccaacccagcccctctctccagcccagcttcaaccctgggaaaacaccagcccaatcaactcattcagaagcccctccgagcaaaatggtgctccggattcctcacccaatacagccagccactgttttacagacagttccaggtgtccctccactgggggtcagtggaggtgagagttttgagtctcctgcagcactgcctgctatgccccctgaggccaggacaagcttccctctgtctgagtcccagactttgctctcttctgcccctgtgcccaaggtaatgatgccctcccctgcctcttccatgtttcgaaagccatatgtgagacggagaccctcaaaaagaaggggagccagggcctttcgctgtatcaaacctgcccctgttatccaccctgcatctgttatcttcactgttcctgctaccactgtgaagattgtgagccttggcggtggctgtaacatgatccagcctgtcaatgcggctgtggcccagagtccccagactattcccatcgccaccctcttggttaaccctacttccttcccctgtccattgaaccagccccttgtggcctcctctgtctcacccttaattgtttctggcaattctgtgaatcttcctataccatccacccctgaagataaggcccacatgaatgtggacattgcttgtgctgtggctgatggggaaaatgcctttcagggcctagaacccaaattagagccccaggaactatctcctctctctgctactgttttccccaaagtggaacatagcccagggcctccaccagtcgataaacagtgccaagaaggattgtcagagaacagtgcctatcgctggaccgttgtgaaaacagaggagggaaggcaagctctggagccgctccctcagggcatccaggagtctctaaacaactcttcccctggggatttagaggaagttgtcaagatggaacctgaagatgctacagaggaaatcagtggatttctttgagctaggagaataagagtctggagactgggagccttcacttcggcctccgattggtggcgcatagggtgtaaccaataggaaacccctaaagggtacttaaaccccagattttgcaactggggctcttgagcagcttgctttagcctgctcccactctgtggaatatacttttgcttcaataaatctgtgcttttattgcttcattgtttcattga

SEQ ID NO: 1056-1057 - skipped (2 entries)

SEQ ID NO: 1058 - DNA, 1965 bp, Homo sapiens
gcttgcgccgttgaagtcagcttacccgctggccgcctcctgacaagcgggagggatccgccgtggacccagggaagcggaggagcctggcggccaccccctcttccccacttccctgcactctcatcgctctcggcctcggcctcggcctccgacacgagaaagatgctggtttcgagttttggagatccttgttttttatggaacacagttctgtaaaattttcataagattccttggcaataacatacgcttgtgatggaccctagaaatactgctatgttaggattgggttctgattccgaaggtttttcaagaaagagtccttctgccatcagtactggcacattggtcagtaagagagaagtagagctagaaaaaaacacaaaggaggaagaggaccttcgcaaacggaatcgagaaagaaacatcgaagctgggaaagatgatggtttgactgatgcacagcaacagttttcagtgaaagaaacaaacttttcagagggaaatttaaaattgaaaattggcctccaggctaagagaactaaaaaacctccaaagaacttggagaactatgtatgtcgacctgccataaaaacaactattaagcacccaaggaaagcacttaaaagtggaaagatgacggatgaaaagaatgaacactgtccttcaaaacgattccaagatgagatgggattctccaacatggaagatgatggcccagaagaggaggagcgtgtggctgagcctcaagctaactttaacacccctcaagctctacggtttgaggaactactggccaacctactaaatgaacaacatcagatagcgaaggaactatttgaacagctgaagatgaagaaaccttcagccaaacagcagaaggaggtagagaaggttaaaccccagtgtaaggaagttcatcagaccctgattctggacccagcacaaaggaagagactccagcagcagatgcagcagcatgttcagctcttgacacaaatccaccttcttgccacctgcaaccccaatctcaatccggaggccagtagcaccaggatatgtcttaaagagctgggaacctttgctcaaagctccatcgcccttcaccatcagtacaaccccaagtttcagaccctgttccaaccctgtaacttgatgggagctatgcagctgattgaagacttcagcacacatgtcagcattgactgcagccctcataaaactgtcaagaagactgccaatgaatttccctgtttgccaaagcaagtggcttggatcctggccacaagcaaggttttcatgtatccagagttacttccagtgtgttccctgaaggcaaagaatccccaggataagatcctcttcaccaaggctgaggacaatttgttagctttaggactgaagcattttgaagggactgagtttcttaaccctctaatcagcaagtaccttctaacctgcaagactgcccgccaactgacagtgagaatcaagaacctcaacatgaacagagctcctgacaacatcattaaattttataagaagaccaaacagctgccagtcctaggaaaatgctgtgaagagatccagccacatcagtggaagccacctatagagagagaagaacaccggctcccattctggttaaaggtacagccctcttcctcgaagtctgtaggaggcagaaggtcactgaaagttctgagagaatatcaaggacttccttaatcgtctaatgctttagttgtagaactaggacttcaggaatcttcctgattcacctttcttcccttacttttctgcccttctccgggtgattctacaacattttcaaaataatgggtaaaatggtaatttgctaaaggaaattcagagaagagtttctaaagtgtataattggactgtggtctttgtagaaatttcatatgcagagtcccttggaaagatgccttgagcttgtct

SEQ ID NO: 1059 - skipped

SEQ ID NO: 1060 - DNA, 7039 bp, Homo sapiens
aggagtggaaggttgaggggggcgctaggcgcccttcgctccctccctctggaggagctgccgccgccaccgccgccactctgctgctgccgccgccgccgccgccgctcccgccgccattttgggttcgctttgcggaggggagacgatcccagtctcggttgcgggacccgcctcccctcagtttgccccctttagccttccacctttcccttctcctctctcgcatttccgccagtcagcttacccgctggccgcctcctgacaagcgggagggatccgccgtggacccagggaagcggaggagcctggcggccaccccctcttccccacttccctgcactctcatcgctctcggcctcggcctcggcctccgacacgagaaagatgctggtttcgagttttggagatccttgttttttatggaacacagttctgtaaaattttcataagattccttggcaataacatacgcttgtgatggaccctagaaatactgctatgttaggattgggttctgattccgaaggtttttcaagaaagagtccttctgccatcagtactggcacattggtcagtaagagagaagtagagctagaaaaaaacacaaaggaggaagaggaccttcgcaaacggaatcgagaaagaaacatcgaagctgggaaagatgatggtttgactgatgcacagcaacagttttcagtgaaagaaacaaacttttcagagggaaatttaaaattgaaaattggcctccaggctaagagaactaaaaaacctccaaagaacttggagaactatgtatgtcgacctgccataaaaacaactattaagcacccaaggaaagcacttaaaagtggaaagatgacggatgaaaagaatgaacactgtccttcaaaacgacccatggatgacagtctcattgcatttcgaacgcgttctaagatgcccctgaaagatgttcccctgggccaattagaggcagagctccaagctccagacatcactccagatatgtatgaccccaatacggcagatgatgaggactggaagatgtggctggggggacttatgaatgatgatgtggggaatgaagatgaagcagatgatgatgatgatccagaatataatttcctggaagacctcgatgaaccagacacagaggatttccggactgaccgggcagtgagaatcaccaaaaaggaagtaaatgagctgatggaagagctgtttgaaactttccaagatgagatgggattctccaacatggaagatgatggcccagaagaggaggagtgtgtagctgagcctcgtcctaactttaacacccctcaagctctacggtttgaggaaccactggccaacctgttaaatgaacaacatcggacagtgaaggagctatttgaacagctgaagatgaagaaatcttcagccaaacagctgcaggaagtagagaaggttaaaccccagagtgagaaagttcatcagactctgattctggacccagcacagaggaagagactccagcagcagatgcagcagcacgttcagctcttgacccaaatccaccttcttgccacctgcaaccccaacctcaatccggaggccactaccaccaggatatttcttaaagagctgggaacctttgctcaaagctccatcgcccttcaccatcagtacaaccccaagtttcagaccctgttccaaccctgtaacttgatgggagctatgcagctgattgaagacttcagcacacatgtcagcattgactgcagccctcataaaactgtcaagaagactgcgaatgaatttccctgtttgccaaagcaagtggcttggattctggccacaagcaaggttttcatgtatccagagttacttccagtgtgttccctgaaggcaaagaatccccaggataagatcgtcttcaccaaggctgaggacaatttgttagctttaggactgaagcattttgaaggaactgagtttcctaatcctctaatcagcaagtaccttctaacctgcaaaactgcccaccaactgacagtgagaatcaagaacctcaacatgaacagagctcctgacaacatcattaaattttataagaagaccaaacagctgccagtcctaggaaaatgctgtgaagagatccagccacatcagtggaagccacctatagagagagaagaacaccggctcccattctggttaaaggccagtctgccatccatccaggaagaactgcggcacatggctgatggtgctagagaggtaggaaatatgactggaaccactgagatcaactcagatcgaagcctagaaaaagacaatttggagttggggagtgaatctcggtacccactgctattgcctaagggtgtagtcctgaaactgaagccagttgccacccgtttccccaggaaggcttggagacagaagcgttcatcagtcctgaagcccctccttatccaacccagcccctctctccagcccagcttcaaccctgggaaaacaccagcccgatcaactcattcagaagcccctccgagcaaaatggtgctccggattcctcacccaatacagccagccactgttttacagacagttccaggtgtccctccactgggggtcagtggaggtgagagttttgagtctcctgcagcactgcctgctgtgccccctgaggccaggacaagcttccctctgtctgagtcccagactttgctctcttctgcccctgtgcccaaggtaatgctgccctcccttgccccttctaagtttcgaaagccatatgtgagacggagaccctcaaagagaagaggagtcaaggcctctccctgtatgaaacctgcccctgttatccaccaccctgcatctgttatcttcactgttcctgctaccactgtgaagattgtgagccttggcggtggctgtaacatgatccagcctgtcaatgcggctgtggcccagagtccccagactattcccatcactaccctcttggttaaccctacttccttcccctgtccattgaaccagtcccttgtggcctcctctgtctcacccttaattgtttctggcaattctgtgaatcttcctataccatccacccctgaagataaggcccacgtgaatgtggacattgcttgtgctgtggctgatggggaaaatgcctttcagggcctagaacccaaattagagccccaggaactatctcctctctctgctactgttttcccgaaagtggaacatagcccagggcctccactagcagatgcagagtgccaagaaggattgtcagagaatagtgcctgtcgctggaccgttgtgaaaacagaggaggggaggcaagctctggagccgctccctcagggcatccaggagtctctaaacaaccctacccctggggatttagaggaaattgtcaagatggaacctgaagaagctagagaggaaatcagtggatcccctgagcgtgatatttgtgatgacatcaaagtggaacatgctgtggaattggacactggtgccccaagcgaggagttgagcagtgctggagaagtaacgaaacagacagtcttacagaaggaagaggagaggagtcagccaactaaaaccccttcatcttctcaagagccccctgatgaaggaacctcagggacagatgtgaacaaaggatcatcaaagaatgctttgtcctcaatggatcctgaagtgaggcttagtagccccccagggaagccagaagattcatccagtgttgatggtcagtcagtggggactccagttgggccagaaactggaggagagaagaatgggccagaagaagaggaagaagaggactttgatgacctcacccaagatgaggaagatgaaatgtcatcagcttctgaggaatctgtgctttctgtcccagaactccaggaaacaatggagaaactgacttggctggcatctgaaaggcgcatgagtcaggagggtgagtctgaagaagagaattctcaggaggagaactctgagccagaagaagaggaggaagaagaagcagaaggaatggaaagcctgcagaaagaggatgaaatgacggatgaagcagttggagactctgctgagaagcctcctacttttgcttcacctgagactgctccagaagtggagaccagcagaactccaccaggagagagcatcaaagctgctggaaaaggccggaacaatcatcgagctcgcaacaagcggggaagtcgggctcgggccagcaaggacacctccaagctgctgttgctgtatgatgaggacattctcgagcgagatccactcagggagcagaaggacttggcctttgcccaagcttatctgaccagggtgcgagaagccctacaacatatccctggcaagtatgaagacttccttcaagtcatctatgaatttgagtcaagtacccagagacggacggctgtagatctctacaaaagcctgcaaattctgctccaagactggcctcagctgttgaaagactttgctgctttcctgttacctgagcaagctctggcctgtggattatttgaggagcagcaggcttttgagaagagccgcaagttccttcggcagctggagatttgctttgcagagaacccctcacaccaccagaagattatcaaggtcctccaaggctgtgcagactgccttccccaggagatcaccgagctcaagacacagatgtggcagctcctcaagggccacgaccacctgcaggatgagttttctatcttctttgaccacttgcgcccagcagctagccggatgggtgactttgaagagatcaattggactgaggaaaaggagtatgagtttgatggctttgaagaagtggccctgcctgatgtggaagaagaggaggagcctcccaagatacccacagcctcaaagaacaagaggaaaaaagagatcggggtccaaaatcatgataaggagactgaatggccagatggggccaaggactgtgcctgctcctgccatgaaggaggtccagattccaagctgaagaagagcaaaaggcggagctgtagccactgtagcagcaaggtctgtgacagcaaatcctacaagagcaaggagccccatgagttggtgggcagcagcccccaccgagaggctagtcctatgcctggtgctaaggaagctgggcagggcaaggatatgatggaagaggaagccccagaggagcgggagagcactgaggccacccagagcaggactgtcaggaccaccagaaagggagagatgcctgtttcagcaggattggcagtggggagcactttgccatcccctcgagaagtgactgttacagaacggctcctcctggatggcccaccacctcattcaccagagactcctcaatttccccccacaactggagctgtactgtacactgttaagagaaaccaggttgggcctgaggttcgctcctgccccaaggcatcccccagacttcagaaagagagggagggccaaaaggcagtgagtgagtcagaggctttgatgctggtctgggatgcatcagaaactgagaaattgcctggtaccgtggaaccccctgcttccttcctgagtcctgtttcctcaaagaccagagatgcagggagaagacatgtgtccgggaaaccagacactcaagagagatggctgccctcaagcagagctcgggtgaagacaagagacaggacgtgccctgtccatgaatctccatcaggaattgacacctcagagacttctcccaaagcccctagagggggtttggctaaagacagtggaacacaggccaagggtccagagggggagcagcagccaaaggccgcagaagctacggtgtgtgccaacaacagcaaggtcagctccactggggaaaaggttgtcctgtggacaagggaagctgaccgtgtgatcctcaccatgtgccaggagcaaggggcacagccacagaccttcaacatcatctcccagcagctgggaaataagacccctgctgaggtttcccaccgttttcgagaactcatgcagctcttccacactgcctgtgaagccagctctgaggatgaggatgatgcaaccagtaccagcaatgcagaccagctgtctgaccatggggaccttctgtctgaagaggagctggatgaatgagactctgggaatcatctacacaggaccaaacccaacaggcgccctggcaccggggagggggtagttgtactctgcttgtacagtccttgagcccagtttacagatctggagagcaggaggccaggacaaggacaaaggctggaggatggagtaggacccaggggctctgccatcctaggcatcattcaaggtcttttatgaagactttacagatgtcctctgtaaatagcatcgagagtggagttcagctcctttctctacttttttttggtctgatggcacatatttattgttctgtggtctaatcacagtgtttctaaatgtaaaaagtgcatatgttggtgtagctagtcccgcgacattgagctcctctgcatgaagacactgggctcctgcatccagctgtttttattgcaaactagctcctttctcccacactgggaactttagtccacgaggctgtcaccaccctggtagcactgggccaggctttgtagctcctgcagcagctctgctacgtcatcgtgctccactccagcatccatgaagctggcccagcgccgcaagtcgagtttggtgaggtctctggccaaggcttccagggtctggtgcagggacgaagaggaacacagtgccccaaacactgggatgctctccactgctgtggagggagaggaaacagagacctgtagatggatgattattctgccctgggactcgccaaactgataaggaagtccaaccttagtagacttgattgtaaactcaacaaatttggtgtattgtccccttagtacaccagtactccagaggaagaatgcttttcttgggagccatagggtgaataaaggaatgtttaactgtg

SEQ ID NO: 1061 - DNA, 1601 bp, Homo sapiens
actgcaaacgtcaagtggtctccgccttccctgggttcggagcttcacttgctcttgagctctgcggtccggcggatttcgcggggcccaggggatggcggggagtgagatttggccagggtcatttcacactgccgggcctgcagccacgcacgcagctgctggcccggctgaggctggcggctagggagaggcgccagggggtcgcgcacaggaaggtgcaagttctctcctgttgccctgagtgcccactcccaggccctctgtatgagtgacacttcagtctgccatggaacctggccctgctctggcctggctcctgctcctgagcctgctggcggattgtctgaaagctgctcagtcccgagacttcacagtgaaagacattatctacctccatccttcaaccacaccatatcctggtggatttaaatgtttcacctgtgaaaaggcagcagacaattatgagtgcaaccgatgggctccagacatctactgccctcgagatataagagttcggaccgcccagcacacaaggtcagcatgctgctcctctgtcacgctctcgctatagctgttgtccagatcgttatcttctcagaaagctgggcatttgccaagaacatcaacttctataatgtgaggcctcctctcgaccctacaccatttccaaatagcttcaagtgctttacttgtgaaaacgcaggggataattataactgcaatcgatgggcagaagacaaatggtgtccacaaaatacacagtactgtttgacagttcatcacttcaccagccacggaagaagcacatccatcaccaaaaagtgtgcctccagaagtgaatgtcattttgtcggttgccaccacagccgagattctgaacatacggagtgtaggtcttgctgtgaaggaatgatctgcaatgtagaattacccaccaatcacactaatgcagtgtttgccgtaatgcacgctcagagaacatctggcagcagtgcccccacactctacctaccagtgcttgcctgggtctttgtgcttccattgctgtgatgccaccattcctaggagaggcagagaccagcctctaaagcacaagccaaaaactgtgtgaacggtgaactttggagtgaagatcaatcttgcacttggtgaagagtgcacattggacctcaaggcgaaagccagtggtttgcttggataaaatgttcccgcatgaggccacaggactgaggatgggaatttggcagggcctgagaagatggtctgacttccaggcttcctggtcaaagagagctacgtttgggcagttctgcagagaggatcctggcaactagtcccacctgactaggcctttagctgaaaggatttcttgacctccttgactgcctcagaggctgccaggtcaaaccctcttgtttatgtgattagctcagagcatctctatgaaatctaacccttcccctcatgagaaagcagttttccccaccaacagcatagtcaatgagaaaggcaactgtacgaagaaaacttccagtggaactaatatgaaatctatttgcaaattatggggggaaataaagcttttaaattatacaatg

SEQ ID NO: 1062 - DNA, 1848 bp, Homo sapiens
gggcatgaaagaccaaccactctgtaaatgcacataaagaacaacctccttgagcaatctcaagcaagagaaagaagaggcttccgagctccagcaaaacaatgggaaaaaacatacccttatcttttccttctcattttcaaaggtaccgtgaatataagtagaagaaagacaccgtctcttcctttaaggaacttacagtcttatggaagagacacagatggaagtgcacaattaccgaatatcatcaaaaagcctgagaaaaagttatgcaaaagctactgtgtgagcacagaggctgtaaacctaatcctaagttgcagggtgagcaacaaggcactattttggaagcagagaacagccctcaccagacacggaatctgctggtgccctgatcttggaattcccaccgtctagaactgtgcaagttctctcctgttgccctgagtgcccactcccaggccctctgtatgagtgacacttcagtctgccatggaacctggccctgctctggcctggctcctgctcctgagcctgctggcggattgtctgaaagctgctcagtcccgagacttcacagtgaaagacattatctacctccatccttcaaatatgccacacttctgcctgctgttggcaaccctcctggactaggctgctcttgttaatcacatggatgttgctgattactctgagtgcaaaccttttcactgttccagagaggagcctgacaaccacattctccttctcaagatataagagttcggaccgcccagcacacaaggtcagcatgctgctcctctgtcacgctctcgctatagctgttgtccagatcgttatcttctcagaaagctgggcatttgccaagaacatcaacttctataatgtgaggcctcctctcgaccctacaccatttccaaatagcttcaagtgctttacttgtgaaaacgcaggggataattataactgcaatcgatgggcagaagacaaatggtgtccacaaaatacacagtactgtttgacagttcatcacttcaccagccacggaagaagcacatccatcaccaaaaagtgtgcctccagaagtgaatgtcattttgtcggttgccaccacagccgagattctgaacatacggagtgtaggtcttgctgtgaaggaatgatctgcaatgtagaattacccaccaatcacactaatgcagtgtttgccgtaatgcacgctcagagaacatctggcagcagtgcccccacactctacctaccagtgcttgcctgggtctttgtgcttccattgctgtgatgccaccattcctaggagaggcagagaccagcctctaaagcacaagccaaaaactgtgtgaacggtgaactttggagtgaagatcaatcttgcacttggtgaagagtgcacattggacctcaaggcgaaagccagtggtttgcttggataaaatgttcccgcatgaggccacaggactgaggatgggaatttggcagggcctgagaagatggtctgacttccaggcttcctggtcaaagagagctacgtttgggcagttctgcagagaggatcctggcaactagtcccacctgactaggcctttagctgaaaggatttcttgacctccttgactgcctcagaggctgccaggtcaaaccctcttgtttatgtgattagctcagagcatctctatgaaatctaacccttcccctcatgagaaagcagttttccccaccaacagcatagtcaatgagaaaggcaactgtacgaagaaaacttccagtggaactaatatgaaatctatttgcaaattatggggggaaataaagcttttaaattatacaatg

SEQ ID NO: 1063 - skipped

SEQ ID NO: 1064 - DNA, 5381 bp, Homo sapiens
ctgggcggggccgggaagcggcagtggcggctacgcgcgcgggggtgcgcgcgggaacgaccgggaaacaccgcgagggccggggtgggccaggctgtggggacgacgggctgcgacgatggccgcagcggcgggcggcggcgggccggggacagcggtaggcgccacgggctcggggattgcggcggcagccgcaggcctagctgtttatcgacggaaggatgggggcccggccaccaagttttgggagagcccggagacggtgtcccagctggattcggtgcgggtctggctgggcaagcactacaagaagtatgttcatgcggatgctcctaccaataaaacactggctgggctggtggtgcagcttcttcagttccaggaagatgcctttgggaagcatgtcaccaacccggccttcaccaaactccctgcaaagtgtttcatggatttcaaagctggaggcgccttatgtcacattcttggggctgcttacaagtataaaaatgaacagggatggcggaggtttgacctacagaacccatctcgaatggatcgtaatgtggaaatgtttatgaacattgaaaaaacattggtgcagaacaattgtttgaccagacccaacatctacctcattccagacattgatctgaagttggctaacaaattgaaagatatcatcaaacgacatcagggaacatttacggatgagaagtcaaaagcttcccaccacatttacccatattcttcctcacaagacgatgaagaatggttgagaccggtgatgagaaaagagaagcaagtgttagtgcattggggcttttacccagacagctatgatacttgggtccatagtaatgatgttgatgctgaaattgaagatccaccaattccagaaaaaccatggaaggttcatgtgaaatggattttggacactgatattttcaatgaatggatgaatgaggaggattatgaggtggatgaaaataggaagcctgtgagttttcgtcagcggatttcaaccaagaatgaagagccagtcagaagtccagaaagaagagatagaaaagcatcagctaatgctcgaaagaggaaacattcgccttcgcctccccctccgacaccaacagaatcacggaagaagagtgggaagaaaggccaagctagcctttatgggaagcgcagaagtcagaaagaggaagatgagcaagaagatctaaccaaggatatggaagacccaacacctgtacccaatatagaagaagtagtacttcccaaaaatgtgaacctaaagaaagatagtgaaaatacacctgttaaaggaggaactgtagcggatctagatgagcaggatgaagaaacagtcacagcaggaggaaaggaagatgaagatcctgccaaaggtgatcagagtcgatcagttgaccttggggaagataatgtgacagagcagaccaatcacattattattcctagttatgcatcatggtttgattataactgtattcatgtgattgaacggcgtgctcttcctgagttcttcaatggaaaaaacaaatccaagactccagaaatatacttggcatatcgaaattttatgattgacacgtatcgtctaaacccccaagagtatttaactagcactgcttgtcggaggaacttgactggagatgtgtgtgctgtgatgagggtccatgcctttttagagcagtggggactcgttaattaccaagttgacccggaaagtagacccatggcaatgggacctcctcctactcctcattttaatgtattagctgataccccctctgggcttgtgcctctgcatcttcgatcacctcaggttcctgctgctcaacagatgctaaattttcctgagaaaaacaaggaaaaaccagttgatttgcagaactttggtctccgtactgacatttactccaagaaaacattagcaaagagtaaaggtgctagtgctggaagagaatggactgaacaggagacccttctactcctggaggccctggagatgtacaaggatgattggaacaaagtgtcggaacatgttggaagtcgtactcaggatgaatgcatcctccactttttgagacttcccattgaggacccataccttgagaattcagatgcttcccttgggcctttggcctaccagcctgtccccttcagtcagtcaggaaatccagttatgagtactgttgcttttttggcatctgtggtggaccctcgcgtggcatctgctgcagcaaaagcggctttggaggagttttctcgggtccgggaggaggtaccactggaattggttgaagctcatgtcaagaaagtacaagaagcagcacgagcctctgggaaagtggatcccacctacggtctggagagcagctgcattgcaggcacagggcccgatgagccagagaagcttgatccctttaagatgtaccatgatgatgacctggcagatttggtctttccctccagtgcgacagctgatacttcaatatttgcaggacaaaatgatcccttgaaagacagttacggtatgtctccctgcaacacagctgttgtacctcaggggtggtctgtggaagccttaaactctccacactcagagtcctttgtttccccagaggctgttgcagaacctcctcagccaacggcagttcccttagagctagccaaggagatagaaatggcatcagaagagaggccaccagcacaagcattggaaataatgatgggactgaagactactgacatggcaccatctaaagaaacagagatggccctcgccaaggacatggcactagctacaaaaaccgaggtggcattggctaaagatatggaatcacccaccaaattagatgtgacactggccaaggacatgcagccatccatggaatcagatatggccctagtcaaggacatggaactacccacagaaaaagaagtggccctggttaaggatgtcagatggcccacagaaacagatgtatcttcagccaagaatgtggtactgcccacagaaacagaggtagccccagccaaggatgtgacactgttgaaagaaacagagagggcatctcctataaaaatggacttagccccttccaaggacatgggaccacccaaagaaaacaagaaagaaacagagagggcatctcctataaaaatggacttggctccttccaaggacatgggaccacccaaagaaaacaagatagtcccagccaaggatttggtattactctcagaaatagaggtggcacaggctaatgacattatatcatccacagaaatatcctctgctgagaaggtggctttgtcctcagaaacagaggtagccctggccagggacatgacactgcccccggaaaccaacgtgatcttgaccaaggataaagcactacctttagaagcagaggtggccccagtcaaggacatggctcaactcccagaaacagaaatagccccggccaaggatgtggctccgtccacagtaaaagaagtgggcttgttgaaggacatgtctccactatcagaaacagaaatggctctgggcaaggatgtgactccacctccagaaacagaagtagttctcatcaagaacgtatgtctgcctccagaaatggaggtggccctgactgaggatcaggtcccagccctcaaaacagaagcacccctggctaaggatggggttctgaccctggccaacaatgtgactccagccaaagatgttccaccactctcagaaacagaggcaacaccagttccaattaaagacatggaaattgcacaaacacaaaaaggaataagtgaggattcccatttagaatctctgcaggatgtggggcagtcagctgcacctactttcatgatttcaccagaaaccgtcacaggaacggggaaaaagtgcagcttgccggccgaggaggattctgtgttagaaaaactaggggaaaggaaaccatgcaacagtcaaccttctgagctttcttcagagacctcagccaacttcatgtattgcggtacccctcccacacaagccaaacaagtttgcagacccagtgaccgcaggtcaacccggcccaagcctgccagggtccctcctgagctgctgggaggctctcctccatggaagactcttgatcacaggctgggccactgctctttgtctgagtcaggttgggtctctggttcatcctcctgtggtgggcctgggaaccaaagaaaaagtattcatgttgactcacttgaaccccagagggatcttggcagggaggcctgggatatagaaagcacaccaataatgatgaagaaaaagaagaagaaaccaaagcaaaagagatattctcaaccacgggctggaggaccttcggatgatgacaatgcagataagcctaaaggtcatccatttgcagctgacacacaaaaatcaggtgttctccccagccagcctaccactatgggtacagaatatggacttgtatctggagaaaacttgaaaagggaatgtttagttaactccagtgcagccagactggtagctgagaactttgtctcagagagtctcagaattcctttatatccttctgaagaagcccccaaaactgcaataagttctcagtctaagctgagagtagaggaagagagcaaaagtaacaagtcagtactacaaaaccaagacaagaaattgctgaagcaacatgaatacaaaccacagcctgcaccccacctgaagactcctgtagataaaagccagtcagtaggccctctcaatctgaaaggacccctagcagaagtttctgcatacaatgtagaaacccctttggatatcagacttaaagagggttgctctcctttcttggaccaagaggttatgggtgtagtttcaaaacccacagcagcaaaagaaataccaaatttggtacccactttgatagcaagtaatccattagaatgtaatctaaaagaagggaataatgaaagtaaaatgactaaactgcagaatgtcaaactgaaggagtttcctgaaggagctgaagaggataaagaactaaaaaaggaagcttttcccaacgaaagacaagagatcagcatctttacttctgagcagctgcagggccaagtgttggtacaggtccctggggtagagaatgaaccatttaagagaatggcaggtgatggcaaaagcaggaagggaaggggaagttctgggaaaatgagaacagattctgggaaggtaaaagcaaaatctgagctgccatttcttctggacagccagaaggacggaagggctgttctcataccgagtgagccagtctctaaaactgaaggaatgactactcaggataagagtgaggagctgg

SEQ ID NO: 1065 - DNA, 3232 bp, Homo sapiens
aaaaaccggcgctcactagggcagaatgcagcctacggaggatggcggaagaggcggctgaggccgcaggacgtgctattccaagtatgttcatgcggatgctcctaccaataaaacactggctgggctggtggtgcagcttcttcagttccaggaagatgcctttgggaagcatgtcaccaacccggccttcaccaaactccctgcaaagtgtttcatggatttcaaagctggaggcgccttatgtcacattcttggggctgcttacaagtataaaaatgaacagggatggcggaggtttgacctacagaacccatctcgaatggatcgtaatgtggaaatgtttatgaacattgaaaaaacattggtgcagaacaattgtttgaccagacccaacatctacctcattccagacattgatctgaagttggctaacaaattgaaagatatcatcaaacgacatcagggaacatttacggatgagaagtcaaaagcttcccaccacatttacccatattcttcctcacaagacgatgaagaatggttgagaccggtgatgagaaaagagaagcaagtgttagtgcattggggcttttacccagacagctatgatacttgggtccatagtaatgatgttgatgctgaaattgaagatccaccaattccagaaaaaccatggaaggttcatgtgaaatggattttggacactgatattttcaatgaatggatgaatgaggaggattatgaggtggatgaaaataggaagcctgtgagttttcgtcagcggatttcaaccaagaatgaagagccagtcagaagtccagaaagaagagatagaaaagcatcagctaatgctcgaaagaggaaacattcgccttcgcctccccctccgacaccaacagaatcacggaagaagagtgggaagaaaggccaagctagcctttatgggaagcgcagaagtcagaaagaggaagatgagcaagaagatctaaccaaggatatggaagacccaacacctgtacccaatatagaagaagtagtacttcccaaaaatgtgaacctaaagaaagatagtgaaaatacacctgttaaaggaggaactgtagcggatctagatgagcaggatgaagaaacagtcacagcaggaggaaaggaagatgaagatcctgccaaaggtgatcagagtcgatcagttgaccttggggaagataatgtgacagagcagaccaatcacattattattcctagttatgcatcatggtttgattataactgtattcatgtgattgaacggcgtgctcttcctgagttcttcaatggaaaaaacaaatccaagactccagaaatatacttggcatatcgaaattttatgattgacacgtatcgtctaaacccccaagagtatttaactagcactgcttgtcggaggaacttgactggagatgtgtgtgctgtgatgagggtccatgcctttttagagcagtggggactcgttaattaccaagttgacccggaaagtagacccatggcaatgggacctcctcctactcctcattttaatgtattagctgataccccctctgggcttgtgcctctgcatcttcgatcacctcaggttcctgctgctcaacagatgctaaattttcctgagaaaaacaaggaaaaaccagttgatttgcagaactttggtctccgtactgacatttactccaagaaaacattagcaaagagtaaaggtgctagtgctggaagagaatggactgaacaggagacccttctactcctggaggccctggagatgtacaaggatgattggaacaaagtgtcggaacatgttggaagtcgtactcaggatgaatgcatcctccactttttgagacttcccattgaggacccataccttgagaattcagatgcttcccttgggcctttggcctaccagcctgtccccttcagtcagtcaggaaatccagttatgagtactgttgcttttttggcatctgtggtggaccctcgcgtggcatctgctgcagcaaaagcggctttggaggagttttctcgggtccgggaggaggtaccactggaattggttgaagctcatgtcaagaaagtacaagaagcagcacgagcctctgggaaagtggatcccacctacggtctggagagcagctgcattgcaggcacagggcccgatgagccagagaagcttggaatagccaggccagaagaaggaaggcctgtggtgagtgggacaggaaatgacatcaccaccccaccgaacaaggagctcccaccaagcccagagaagaaaacaaagcctttggccaccactcaacctgcaaagacttcaacatcgaaagccaaaacacagcccacttctctccctaagcagccagctcccaccaccattggtgggttgaataaaaaacccatgagccttgcttcaggcttagtgccagctgccccacccaaacgccctgccgtcgcctctgccaggccttccatcttaccttcaaaagacgtgaagccaaagcccattgcagatgcaaaggctcctgagaagcgggcctcaccatccaagccagcttctgccccagcctccagatctgggtccaagagcactcagactgttgcaaaaaccacaacagctgctgctgttgcctcaactggcccaagcagtaggagcccctccacgctcctgcccaagaagcccactgccattaagactgagggaaaacctgcagaagtcaagaagatgactgcaaagtctgtaccagctgacttgagtcgcccaaagagcacctccaccagttccatgaagaaaaccaccactctcagtgggacagcccccgctgcaggggtggttcccagccgagtcaaggccacacccatgccctcccggccctccacaactcctttcatagacaagaagcccacctcggccaaacccagctccaccaccccccggctcagccgcctggccaccaatacttctgctcctgatctgaagaatgtccgctccaaggccaaagtagagaaaaaaacagaggcagctgctacaacccgaaagcctgaatctaatgcagtcactaaaacagccggcccaattgcaagtgcacagaaacaacctgcggggaaagtccagatagtctccaaaaaagtgagctacagccatattcagtccaagtgtggttccaaggacaatattaagcatgtccctggaggtggtaat

SEQ ID NO: 1066 - DNA, 7533 bp, Homo sapiens
ctgggcggggccgggaagcggcagtggcggctacgcgcgcgggggtgcgcgcgggaacgaccgggaaacaccgcgagggccggggtgggccaggctgtggggacgacgggctgcgacgatggccgcagcggcgggcggcggcgggccggggacagcggtaggcgccacgggctcggggattgcggcggcagccgcaggcctagctgtttatcgacggaaggatgggggcccggccaccaagttttgggagagcccggagacggtgtcccagctggattcggtgcgggtctggctgggcaagcactacaagaagtatgttcatgcggatgctcctaccaataaaacactggctgggctggtggtgcagcttcttcagttccaggaagatgcctttgggaagcatgtcaccaacccggccttcaccaaactccctgcaaagtgtttcatggatttcaaagctggaggcgccttatgtcacattcttggggctgcttacaagtataaaaatgaacagggatggcggaggtttgacctacagaacccatctcgaatggatcgtaatgtggaaatgtttatgaacattgaaaaaacattggtgcagaacaattgtttgaccagacccaacatctacctcattccagacattgatctgaagttggctaacaaattgaaagatatcatcaaacgacatcagggaacatttacggatgagaagtcaaaagcttcccaccacatttacccatattcttcctcacaagacgatgaagaatggttgagaccggtgatgagaaaagagaagcaagtgttagtgcattggggcttttacccagacagctatgatacttgggtccatagtaatgatgttgatgctgaaattgaagatccaccaattccagaaaaaccatggaaggttcatgtgaaatggattttggacactgatattttcaatgaatggatgaatgaggaggattatgaggtggatgaaaataggaagcctgtgagttttcgtcagcggatttcaaccaagaatgaagagccagtcagaagtccagaaagaagagatagaaaagcatcagctaatgctcgaaagaggaaacattcgccttcgcctccccctccgacaccaacagaatcacggaagaagagtgggaagaaaggccaagctagcctttatgggaagcgcagaagtcagaaagaggaagatgagcaagaagatctaaccaaggatatggaagacccaacacctgtacccaatatagaagaagtagtacttcccaaaaatgtgaacctaaagaaagatagtgaaaatacacctgttaaaggaggaactgtagcggatctagatgagcaggatgaagaaacagtcacagcaggaggaaaggaagatgaagatcctgccaaaggtgatcagagtcgatcagttgaccttggggaagataatgtgacagagcagaccaatcacattattattcctagttatgcatcatggtttgattataactgtattcatgtgattgaacggcgtgctcttcctgagttcttcaatggaaaaaacaaatccaagactccagaaatatacttggcatatcgaaattttatgattgacacgtatcgtctaaacccccaagagtatttaactagcactgcttgtcggaggaacttgactggagatgtgtgtgctgtgatgagggtccatgcctttttagagcagtggggactcgttaattaccaagttgacccggaaagtagacccatggcaatgggacctcctcctactcctcattttaatgtattagctgataccccctctgggcttgtgcctctgcatcttcgatcacctcaggttcctgctgctcaacagatgctaaattttcctgagaaaaacaaggaaaaaccagttgatttgcagaactttggtctccgtactgacatttactccaagaaaacattagcaaagagtaaaggtgctagtgctggaagagaatggactgaacaggagacccttctactcctggaggccctggagatgtacaaggatgattggaacaaagtgtcggaacatgttggaagtcgtactcaggatgaatgcatcctccactttttgagacttcccattgaggacccataccttgagaattcagatgcttcccttgggcctttggcctaccagcctgtccccttcagtcagtcaggaaatccagttatgagtactgttgcttttttggcatctgtggtggaccctcgcgtggcatctgctgcagcaaaagcggctttggaggagttttctcgggtccgggaggaggtaccactggaattggttgaagctcatgtcaagaaagtacaagaagcagcacgagcctctgggaaagtggatcccacctacggtctggagagcagctgcattgcaggcacagggcccgatgagccagagaagcttgatccctttaagatgtaccatgatgatgacctggcagatttggtctttccctccagtgcgacagctgatacttcaatatttgcaggacaaaatgatcccttgaaagacagttacggtatgtctccctgcaacacagctgttgtacctcaggggtggtctgtggaagccttaaactctccacactcagagtcctttgtttccccagaggctgttgcagaacctcctcagccaacggcagttcccttagagctagccaaggagatagaaatggcatcagaagagaggccaccagcacaagcattggaaataatgatgggactgaagactactgacatggcaccatctaaagaaacagagatggccctcgccaaggacatggcactagctacaaaaaccgaggtggcattggctaaagatatggaatcacccaccaaattagatgtgacactggccaaggacatgcagccatccatggaatcagatatggccctagtcaaggacatggaactacccacagaaaaagaagtggccctggttaaggatgtcagatggcccacagaaacagatgtatcttcagccaagaatgtggtactgcccacagaaacagaggtagccccagccaaggatgtgacactgttgaaagaaacagagagggcatctcctataaaaatggacttagccccttccaaggacatgggaccacccaaagaaaacaagaaagaaacagagagggcatctcctataaaaatggacttggctccttccaaggacatgggaccacccaaagaaaacaagatagtcccagccaaggatttggtattactctcagaaatagaggtggcacaggctaatgacattatatcatccacagaaatatcctctgctgagaaggtggctttgtcctcagaaacagaggtagccctggccagggacatgacactgcccccggaaaccaacgtgatcttgaccaaggataaagcactacctttagaagcagaggtggccccagtcaaggacatggctcaactcccagaaacagaaatagccccggccaaggatgtggctccgtccacagtaaaagaagtgggcttgttgaaggacatgtctccactatcagaaacagaaatggctctgggcaaggatgtgactccacctccagaaacagaagtagttctcatcaagaacgtatgtctgcctccagaaatggaggtggccctgactgaggatcaggtcccagccctcaaaacagaagcacccctggctaaggatggggttctgaccctggccaacaatgtgactccagccaaagatgttccaccactctcagaaacagaggcaacaccagttccaattaaagacatggaaattgcacaaacacaaaaaggaataagtgaggattcccatttagaatctctgcaggatgtggggcagtcagctgcacctactttcatgatttcaccagaaaccgtcacaggaacggggaaaaagtgcagcttgccggccgaggaggattctgtgttagaaaaactaggggaaaggaaaccatgcaacagtcaaccttctgagctttcttcagagacctcaggaatagccaggccagaagaaggaaggcctgtggtgagtgggacaggaaatgacatcaccaccccaccgaacaaggagctcccaccaagcccagagaagaaaacaaagcctttggccaccactcaacctgcaaagacttcaacatcgaaagccaaaacacagcccacttctctccctaagcagccagctcccaccaccattggtgggttgaataaaaaacccatgagccttgcttcaggcttagtgccagctgccccacccaaacgccctgccgtcgcctctgccaggccttccatcttaccttcaaaagacgtgaagccaaagcccattgcagatgcaaaggctcctgagaagcgggcctcaccatccaagccagcttctgccccagcctccagatctgggtccaagagcactcagactgttgcaaaaaccacaacagctgctgctgttgcctcaactggcccaagcagtaggagcccctccacgctcctgcccaagaagcccactgccattaagactgagggaaaacctgcagaagtcaagaagatgactgcaaagtctgtaccagctgacttgagtcgcccaaagagcacctccaccagttccatgaagaaaaccaccactctcagtgggacagcccccgctgcaggggtggttcccagccgagtcaaggccacacccatgccctcccggccctccacaactcctttcatagacaagaagcccacctcggccaaacccagctccaccaccccccggctcagccgcctggccaccaatacttctgctcctgatctgaagaatgtccgctccaaggttggctccacggaaaacatcaagcatcagcctggaggaggccgggccaaagtagagaaaaaaacagaggcagctgctacaacccgaaagcctgaatctaatgcagtcactaaaacagccggcccaattgcaagtgcacagaaacaacctgcggggaaagtccagatagtctccaaaaaagtgagctacagccatattcagtccaagtgtggttccaaggacaatattaagcatgtccctggaggtggtaatgttcagattcagaacaagaaagtggacatctctaaggtctcctccaagtgtgggtctaaggctaacatcaagcacaagcctggtggaggagatgtcaagattgaaagtcagaagttgaacttcaaggagaaggcccaggccaaggtgggatccctcgataatgtgggccacctacctgcaggaggtgctgtgaagattgagacctacaggctgacgttccgggcaaatgccagggcccgcaccgaccacggggccgacattgtctcccgccccccacacttccctggcggccccaactcgggctcccgggtccttggccccctttcccgggctgtccactagaccagtgagcgcttgggcgccgtgctgggcagcccgctaggctcgccttccctcctgctttgcgtgcccggggcagcagcagccctgccccacacctcctctcactccccagcctgggcccatctccctgctttggtcttgccccatcactgcgccactgctccgtggaggaggttgggagggggttggggtggttgaggctaagttgggatctaggagaggagaaccagattctatcctcatctttttttggttctttggtccaaacccaaaagaaactgacatgccctcccttctccctggatctacctggagggaagagtggaggtggattccgagtggtgacaggacgctgaccgtggagcttaagccactgcctctccctctggtcccacaaatgggcgcccccccctccccatgcaggtggtgtcgggcccttcttgctgccctgccccaagttgggggtcagtgctgcctgtccccatgcttaacatacccgcctagctgctgtcacatttttcttgttttgtccttttatttttttctaataacctaaaaactggcaaaatagttctgcaggttgaagccatgtctacatgaaagtcctcagtaagtgttagagggaacagggcggagatatccttatgccacccccgctggaggatgtgggcagcttagggccctggaggcggtgcggcagggaagaggggtgcagaggctgtggctggtgagccggtcaggcacacaaggggcccttggagcgtggactggttggttttgccattttgttgtgtgtatgctgcttttcttttctaaccaagaggctggttttggcatctctgtcccattccctgggatctggtggtcagccctaggataaaaagccagggctggagaacaagaaagggccaggagatggaattccttcaggccggcacccacaccctaggacatgtaagccctcatgtccaagggagcctcatgcagatagtaggaaatcaggtctggaaatttaaaaataaaaggcatgagactaaggctatctgcttcccttatgccctgactggagaggggagggaggagaggcaaggcccacagagggcatcccagctaggccttgggatggctgcagtgaggagaaatcccgggaactgtattgacacaaagattcttattgcacttgtattttttgtattaaagtttgcatggtttctaataaaggattcaaacataagtttgtagtgaaatggcctgggagattccaagggcttctctggagggggattggctgcagtgtagatttgcctctgaggaggctgccccagacttggcctcctcatgccccctcctgacctctgcccttctctggtcctggcatccctggagaaggtaggggtcttgacctaagtttagatttgatctccatgtgcagggaggctgtcctgggcctgacaggtcctccccctttctgaggtagcagtgccttgtggaggtttgacaccatgtccctagctccccaagcacacaccaggaaactgcaggggctcacggaggaagtgctgcctgggccagggggaccagctttcctccgtagagaccatgtgcagaacacttctgctgtgccaagaacatgagggagccagtgttttgtcagcaggaagaaagggcctgctgggatgaaagtgggaaggaaacagggttgcgtagtcaggagacacctcaggggcaacagcacaggcccagagtacctgctgcctccactgcgtctgtcctggggtcatgaggatgctgaggttgacgacaggttccaggtcctttcactcctttggccaaaggttgggggtaggtggcccaagtggcgtgctctctaggtagacaacaggagtggtcagagttccctcaaaggatcctccactccagagcacctgagaaggccgggaccagaggccctgtgtgatgtgtactccgcagctgtttggggtgggacatttctgtacttctcgatttgcttatggctcagccattacctgtgtcagtccatgattctgttgtaacagttttaagagtaaataaataaagctgcctgatgtcccatcacgcag

SEQ ID NO: 1067 - DNA, 7428 bp, Homo sapiens
aaaaaccggcgctcactagggcagaatgcagcctacggaggatggcggaagaggcggctgaggccgcaggacgtgctattccaagtatgttcatgcggatgctcctaccaataaaacactggctgggctggtggtgcagcttcttcagttccaggaagatgcctttgggaagcatgtcaccaacccggccttcaccaaactccctgcaaagtgtttcatggatttcaaagctggaggcgccttatgtcacattcttggggctgcttacaagtataaaaatgaacagggatggcggaggtttgacctacagaacccatctcgaatggatcgtaatgtggaaatgtttatgaacattgaaaaaacattggtgcagaacaattgtttgaccagacccaacatctacctcattccagacattgatctgaagttggctaacaaattgaaagatatcatcaaacgacatcagggaacatttacggatgagaagtcaaaagcttcccaccacatttacccatattcttcctcacaagacgatgaagaatggttgagaccggtgatgagaaaagagaagcaagtgttagtgcattggggcttttacccagacagctatgatacttgggtccatagtaatgatgttgatgctgaaattgaagatccaccaattccagaaaaaccatggaaggttcatgtgaaatggattttggacactgatattttcaatgaatggatgaatgaggaggattatgaggtggatgaaaataggaagcctgtgagttttcgtcagcggatttcaaccaagaatgaagagccagtcagaagtccagaaagaagagatagaaaagcatcagctaatgctcgaaagaggaaacattcgccttcgcctccccctccgacaccaacagaatcacggaagaagagtgggaagaaaggccaagctagcctttatgggaagcgcagaagtcagaaagaggaagatgagcaagaagatctaaccaaggatatggaagacccaacacctgtacccaatatagaagaagtagtacttcccaaaaatgtgaacctaaagaaagatagtgaaaatacacctgttaaaggaggaactgtagcggatctagatgagcaggatgaagaaacagtcacagcaggaggaaaggaagatgaagatcctgccaaaggtgatcagagtcgatcagttgaccttggggaagataatgtgacagagcagaccaatcacattattattcctagttatgcatcatggtttgattataactgtattcatgtgattgaacggcgtgctcttcctgagttcttcaatggaaaaaacaaatccaagactccagaaatatacttggcatatcgaaattttatgattgacacgtatcgtctaaacccccaagagtatttaactagcactgcttgtcggaggaacttgactggagatgtgtgtgctgtgatgagggtccatgcctttttagagcagtggggactcgttaattaccaagttgacccggaaagtagacccatggcaatgggacctcctcctactcctcattttaatgtattagctgataccccctctgggcttgtgcctctgcatcttcgatcacctcaggttcctgctgctcaacagatgctaaattttcctgagaaaaacaaggaaaaaccagttgatttgcagaactttggtctccgtactgacatttactccaagaaaacattagcaaagagtaaaggtgctagtgctggaagagaatggactgaacaggagacccttctactcctggaggccctggagatgtacaaggatgattggaacaaagtgtcggaacatgttggaagtcgtactcaggatgaatgcatcctccactttttgagacttcccattgaggacccataccttgagaattcagatgcttcccttgggcctttggcctaccagcctgtccccttcagtcagtcaggaaatccagttatgagtactgttgcttttttggcatctgtggtggaccctcgcgtggcatctgctgcagcaaaagcggctttggaggagttttctcgggtccgggaggaggtaccactggaattggttgaagctcatgtcaagaaagtacaagaagcagcacgagcctctgggaaagtggatcccacctacggtctggagagcagctgcattgcaggcacagggcccgatgagccagagaagcttgggtctccaactgaattccttgaagagaaaatggcctaccaggaatacccaaatagccagaactggccagaagataccaacttttgtttccaacctgagcaagtggtcgatcctatccagactgatccctttaagatgtaccatgatgatgacctggcagatttggtctttccctccagtgcgacagctgatacttcaatatttgcaggacaaaatgatcccttgaaagacagttacggtatgtctccctgcaacacagctgttgtacctcaggggtggtctgtggaagccttaaactctccacactcagagtcctttgtttccccagaggctgttgcagaacctcctcagccaacggcagttcccttagagctagccaaggagatagaaatggcatcagaagagaggccaccagcacaagcattggaaataatgatgggactgaagactactgacatggcaccatctaaagaaacagagatggccctcgccaaggacatggcactagctacaaaaaccgaggtggcattggctaaagatatggaatcacccaccaaattagatgtgacactggccaaggacatgcagccatccatggaatcagatatggccctagtcaaggacatggaactacccacagaaaaagaagtggccctggttaaggatgtcagatggcccacagaaacagatgtatcttcagccaagaatgtggtactgcccacagaaacagaggtagccccagccaaggatgtgacactgttgaaagaaacagagagggcatctcctataaaaatggacttagccccttccaaggacatgggaccacccaaagaaaacaagaaagaaacagagagggcatctcctataaaaatggacttggctccttccaaggacatgggaccacccaaagaaaacaagatagtcccagccaaggatttggtattactctcagaaatagaggtggcacaggctaatgacattatatcatccacagaaatatcctctgctgagaaggtggctttgtcctcagaaacagaggtagccctggccagggacatgacactgcccccggaaaccaacgtgatcttgaccaaggataaagcactacctttagaagcagaggtggccccagtcaaggacatggctcaactcccagaaacagaaatagccccggccaaggatgtggctccgtccacagtaaaagaagtgggcttgttgaaggacatgtctccactatcagaaacagaaatggctctgggcaaggatgtgactccacctccagaaacagaagtagttctcatcaagaacgtatgtctgcctccagaaatggaggtggccctgactgaggatcaggtcccagccctcaaaacagaagcacccctggctaaggatggggttctgaccctggccaacaatgtgactccagccaaagatgttccaccactctcagaaacagaggcaacaccagttccaattaaagacatggaaattgcacaaacacaaaaaggaataagtgaggattcccatttagaatctctgcaggatgtggggcagtcagctgcacctactttcatgatttcaccagaaaccgtcacaggaacggggaaaaagtgcagcttgccggccgaggaggattctgtgttagaaaaactaggggaaaggaaaccatgcaacagtcaaccttctgagctttcttcagagacctcaggaatagccaggccagaagaaggaaggcctgtggtgagtgggacaggaaatgacatcaccaccccaccgaacaaggagctcccaccaagcccagagaagaaaacaaagcctttggccaccactcaacctgcaaagacttcaacatcgaaagccaaaacacagcccacttctctccctaagcagccagctcccaccaccattggtgggttgaataaaaaacccatgagccttgcttcaggcttagtgccagctgccccacccaaacgccctgccgtcgcctctgccaggccttccatcttaccttcaaaagacgtgaagccaaagcccattgcagatgcaaaggctcctgagaagcgggcctcaccatccaagccagcttctgccccagcctccagatctgggtccaagagcactcagactgttgcaaaaaccacaacagctgctgctgttgcctcaactggcccaagcagtaggagcccctccacgctcctgcccaagaagcccactgccattaagactgagggaaaacctgcagaagtcaagaagatgactgcaaagtctgtaccagctgacttgagtcgcccaaagagcacctccaccagttccatgaagaaaaccaccactctcagtgggacagcccccgctgcaggggtggttcccagccgagtcaaggccacacccatgccctcccggccctccacaactcctttcatagacaagaagcccacctcggccaaacccagctccaccaccccccggctcagccgcctggccaccaatacttctgctcctgatctgaagaatgtccgctccaaggttggctccacggaaaacatcaagcatcagcctggaggaggccgggccaaagtagagaaaaaaacagaggcagctgctacaacccgaaagcctgaatctaatgcagtcactaaaacagccggcccaattgcaagtgcacagaaacaacctgcggggaaagtccagatagtctccaaaaaagtgagctacagccatattcagtccaagtgtggttccaaggacaatattaagcatgtccctggaggtggtaatgttcagattcagaacaagaaagtggacatctctaaggtctcctccaagtgtgggtctaaggctaacatcaagcacaagcctggtggaggagatgtcaagattgaaagtcagaagttgaacttcaaggagaaggcccaggccaaggtgggatccctcgataatgtgggccacctacctgcaggaggtgctgtgaagattgagacctacaggctgacgttccgggcaaatgccagggcccgcaccgaccacggggccgacattgtctcccgccccccacacttccctggcggccccaactcgggctcccgggtccttggccccctttcccgggctgtccactagaccagtgagcgcttgggcgccgtgctgggcagcccgctaggctcgccttccctcctgctttgcgtgcccggggcagcagcagccctgccccacacctcctctcactccccagcctgggcccatctccctgctttggtcttgccccatcactgcgccactgctccgtggaggaggttgggagggggttggggtggttgaggctaagttgggatctaggagaggagaaccagattctatcctcatctttttttggttctttggtccaaacccaaaagaaactgacatgccctcccttctccctggatctacctggagggaagagtggaggtggattccgagtggtgacaggacgctgaccgtggagcttaagccactgcctctccctctggtcccacaaatgggcgcccccccctccccatgcaggtggtgtcgggcccttcttgctgccctgccccaagttgggggtcagtgctgcctgtccccatgcttaacatacccgcctagctgctgtcacatttttcttgttttgtccttttatttttttctaataacctaaaaactggcaaaatagttctgcaggttgaagccatgtctacatgaaagtcctcagtaagtgttagagggaacagggcggagatatccttatgccacccccgctggaggatgtgggcagcttagggccctggaggcggtgcggcagggaagaggggtgcagaggctgtggctggtgagccggtcaggcacacaaggggcccttggagcgtggactggttggttttgccattttgttgtgtgtatgctgcttttcttttctaaccaagaggctggttttggcatctctgtcccattccctgggatctggtggtcagccctaggataaaaagccagggctggagaacaagaaagggccaggagatggaattccttcaggccggcacccacaccctaggacatgtaagccctcatgtccaagggagcctcatgcagatagtaggaaatcaggtctggaaatttaaaaataaaaggcatgagactaaggctatctgcttcccttatgccctgactggagaggggagggaggagaggcaaggcccacagagggcatcccagctaggccttgggatggctgcagtgaggagaaatcccgggaactgtattgacacaaagattcttattgcacttgtattttttgtattaaagtttgcatggtttctaataaaggattcaaacataagtttgtagtgaaatggcctgggagattccaagggcttctctggagggggattggctgcagtgtagatttgcctctgaggaggctgccccagacttggcctcctcatgccccctcctgacctctgcccttctctggtcctggcatccctggagaaggtaggggtcttgacctaagtttagatttgatctccatgtgcagggaggctgtcctgggcctgacaggtcctccccctttctgaggtagcagtgccttgtggaggtttgacaccatgtccctagctccccaagcacacaccaggaaactgcaggggctcacggaggaagtgctgcctgggccagggggaccagctttcctccgtagagaccatgtgcagaacacttctgctgtgccaagaacatgagggagccagtgttttgtcagcaggaagaaagggcctgctgggatgaaagtgggaaggaaacagggttgcgtagtcaggagacacctcaggggcaacagcacaggcccagagtacctgctgcctccactgcgtctgtcctggggtcatgaggatgctgaggttgacgacaggttccaggtcctttcactcctttggccaaaggttgggggtaggtggcccaagtggcgtgctctctaggtagacaacaggagtggtcagagttccctcaaaggatcctccactccagagcacctgagaaggccgggaccagaggccctgtgtgatgtgtactccgcagctgtttggggtgggacatttctgtacttctcgatttgcttatggctcagccattacctgtgtcagtccatgattctgttgtaacagttttaagagtaaataaataaagctgcctgatgtcccatcacgcag

SEQ ID NO: 1068 - DNA, 2947 bp, Homo sapiens
ctgggcggggccgggaagcggcagtggcggctacgcgcgcgggggtgcgcgcgggaacgaccgggaaacaccgcgagggccggggtgggccaggctgtggggacgacgggctgcgacgatggccgcagcggcgggcggcggcgggccggggacagcggtaggcgccacgggctcggggattgcggcggcagccgcaggcctagctgtttatcgacggaaggatgggggcccggccaccaagttttgggagagcccggagacggtgtcccagctggattcggtgcgggtctggctgggcaagcactacaagaaggttcagattcagaacaagaaagtggacatctctaaggtctcctccaagtgtgggtctaaggctaacatcaagcacaagcctggtggaggagatgtcaagattgaaagtcagaagttgaacttcaaggagaaggcccaggccaaggtgggatccctcgataatgtgggccacctacctgcaggaggtgctgtgaagactgagggcggtggcagcgaggctcctctgtgtccgggtccccctgctggggaggagccggccatctctgaggcagcgcctgaagctggcgcccccacttcagccagtggcctcaatggccaccccaccctgtcagggggtggtgaccaaagggaggcccagaccttggacagccagatccaggagacaaattgagacctacaggctgacgttccgggcaaatgccagggcccgcaccgaccacggggccgacattgtctcccgccccccacacttccctggcggccccaactcgggctcccgggtccttggccccctttcccgggctgtccactagaccagtgagcgcttgggcgccgtgctgggcagcccgctaggctcgccttccctcctgctttgcgtgcccggggcagcagcagccctgccccacacctcctctcactccccagcctgggcccatctccctgctttggtcttgccccatcactgcgccactgctccgtggaggaggttgggagggggttggggtggttgaggctaagttgggatctaggagaggagaaccagattctatcctcatctttttttggttctttggtccaaacccaaaagaaactgacatgccctcccttctccctggatctacctggagggaagagtggaggtggattccgagtggtgacaggacgctgaccgtggagcttaagccactgcctctccctctggtcccacaaatgggcgcccccccctccccatgcaggtggtgtcgggcccttcttgctgccctgccccaagttgggggtcagtgctgcctgtccccatgcttaacatacccgcctagctgctgtcacatttttcttgttttgtccttttatttttttctaataacctaaaaactggcaaaatagttctgcaggttgaagccatgtctacatgaaagtcctcagtaagtgttagagggaacagggcggagatatccttatgccacccccgctggaggatgtgggcagcttagggccctggaggcggtgcggcagggaagaggggtgcagaggctgtggctggtgagccggtcaggcacacaaggggcccttggagcgtggactggttggttttgccattttgttgtgtgtatgctgcttttcttttctaaccaagaggctggttttggcatctctgtcccattccctgggatctggtggtcagccctaggataaaaagccagggctggagaacaagaaagggccaggagatggaattccttcaggccggcacccacaccctaggacatgtaagccctcatgtccaagggagcctcatgcagatagtaggaaatcaggtctggaaatttaaaaataaaaggcatgagactaaggctatctgcttcccttatgccctgactggagaggggagggaggagaggcaaggcccacagagggcatcccagctaggccttgggatggctgcagtgaggagaaatcccgggaactgtattgacacaaagattcttattgcacttgtattttttgtattaaagtttgcatggtttctaataaaggattcaaacataagtttgtagtgaaatggcctgggagattccaagggcttctctggagggggattggctgcagtgtagatttgcctctgaggaggctgccccagacttggcctcctcatgccccctcctgacctctgcccttctctggtcctggcatccctggagaaggtaggggtcttgacctaagtttagatttgatctccatgtgcagggaggctgtcctgggcctgacaggtcctccccctttctgaggtagcagtgccttgtggaggtttgacaccatgtccctagctccccaagcacacaccaggaaactgcaggggctcacggaggaagtgctgcctgggccagggggaccagctttcctccgtagagaccatgtgcagaacacttctgctgtgccaagaacatgagggagccagtgttttgtcagcaggaagaaagggcctgctgggatgaaagtgggaaggaaacagggttgcgtagtcaggagacacctcaggggcaacagcacaggcccagagtacctgctgcctccactgcgtctgtcctggggtcatgaggatgctgaggttgacgacaggttccaggtcctttcactcctttggccaaaggttgggggtaggtggcccaagtggcgtgctctctaggtagacaacaggagtggtcagagttccctcaaaggatcctccactccagagcacctgagaaggccgggaccagaggccctgtgtgatgtgtactccgcagctgtttggggtgggacatttctgtacttctcgatttgcttatggctcagccattacctgtgtcagtccatgattctgttgtaacagttttaagagtaaataaataaagctgcctgatgtcccatcacgcag

SEQ ID NO: 1069 - DNA, 7596 bp, Homo sapiens
aaaaaccggcgctcactagggcagaatgcagcctacggaggatggcggaagaggcggctgaggccgcaggacgtgctattccaagtatgttcatgcggatgctcctaccaataaaacactggctgggctggtggtgcagcttcttcagttccaggaagatgcctttgggaagcatgtcaccaacccggccttcaccaaactccctgcaaagtgtttcatggatttcaaagctggaggcgccttatgtcacattcttggggctgcttacaagtataaaaatgaacagggatggcggaggtttgacctacagaacccatctcgaatggatcgtaatgtggaaatgtttatgaacattgaaaaaacattggtgcagaacaattgtttgaccagacccaacatctacctcattccagacattgatctgaagttggctaacaaattgaaagatatcatcaaacgacatcagggaacatttacggatgagaagtcaaaagcttcccaccacatttacccatattcttcctcacaagacgatgaagaatggttgagaccggtgatgagaaaagagaagcaagtgttagtgcattggggcttttacccagacagctatgatacttgggtccatagtaatgatgttgatgctgaaattgaagatccaccaattccagaaaaaccatggaaggttcatgtgaaatggattttggacactgatattttcaatgaatggatgaatgaggaggattatgaggtggatgaaaataggaagcctgtgagttttcgtcagcggatttcaaccaagaatgaagagccagtcagaagtccagaaagaagagatagaaaagcatcagctaatgctcgaaagaggaaacattcgccttcgcctccccctccgacaccaacagaatcacggaagaagagtgggaagaaaggccaagctagcctttatgggaagcgcagaagtcagaaagaggaagatgagcaagaagatctaaccaaggatatggaagacccaacacctgtacccaatatagaagaagtagtacttcccaaaaatgtgaacctaaagaaagatagtgaaaatacacctgttaaaggaggaactgtagcggatctagatgagcaggatgaagaaacagtcacagcaggaggaaaggaagatgaagatcctgccaaaggtgatcagagtcgatcagttgaccttggggaagataatgtgacagagcagaccaatcacattattattcctagttatgcatcatggtttgattataactgtattcatgtgattgaacggcgtgctcttcctgagttcttcaatggaaaaaacaaatccaagactccagaaatatacttggcatatcgaaattttatgattgacacgtatcgtctaaacccccaagagtatttaactagcactgcttgtcggaggaacttgactggagatgtgtgtgctgtgatgagggtccatgcctttttagagcagtggggactcgttaattaccaagttgacccggaaagtagacccatggcaatgggacctcctcctactcctcattttaatgtattagctgataccccctctgggcttgtgcctctgcatcttcgatcacctcaggttcctgctgctcaacagatgctaaattttcctgagaaaaacaaggaaaaaccagttgatttgcagaactttggtctccgtactgacatttactccaagaaaacattagcaaagagtaaaggtgctagtgctggaagagaatggactgaacaggagacccttctactcctggaggccctggagatgtacaaggatgattggaacaaagtgtcggaacatgttggaagtcgtactcaggatgaatgcatcctccactttttgagacttcccattgaggacccataccttgagaattcagatgcttcccttgggcctttggcctaccagcctgtccccttcagtcagtcaggaaatccagttatgagtactgttgcttttttggcatctgtggtggaccctcgcgtggcatctgctgcagcaaaagcggctttggaggagttttctcgggtccgggaggaggtaccactggaattggttgaagctcatgtcaagaaagtacaagaagcagcacgagcctctgggaaagtggatcccacctacggtctggagagcagctgcattgcaggcacagggcccgatgagccagagaagcttgatccctttaagatgtaccatgatgatgacctggcagatttggtctttccctccagtgcgacagctgatacttcaatatttgcaggacaaaatgatcccttgaaagacagttacggtatgtctccctgcaacacagctgttgtacctcaggggtggtctgtggaagccttaaactctccacactcagagtcctttgtttccccagaggctgttgcagaacctcctcagccaacggcagttcccttagagctagccaaggagatagaaatggcatcagaagagaggccaccagcacaagcattggaaataatgatgggactgaagactactgacatggcaccatctaaagaaacagagatggccctcgccaaggacatggcactagctacaaaaaccgaggtggcattggctaaagatatggaatcacccaccaaattagatgtgacactggccaaggacatgcagccatccatggaatcagatatggccctagtcaaggacatggaactacccacagaaaaagaagtggccctggttaaggatgtcagatggcccacagaaacagatgtatcttcagccaagaatgtggtactgcccacagaaacagaggtagccccagccaaggatgtgacactgttgaaagaaacagagagggcatctcctataaaaatggacttagccccttccaaggacatgggaccacccaaagaaaacaagaaagaaacagagagggcatctcctataaaaatggacttggctccttccaaggacatgggaccacccaaagaaaacaagatagtcccagccaaggatttggtattactctcagaaatagaggtggcacaggctaatgacattatatcatccacagaaatatcctctgctgagaaggtggctttgtcctcagaaacagaggtagccctggccagggacatgacactgcccccggaaaccaacgtgatcttgaccaaggataaagcactacctttagaagcagaggtggccccagtcaaggacatggctcaactcccagaaacagaaatagccccggccaaggatgtggctccgtccacagtaaaagaagtgggcttgttgaaggacatgtctccactatcagaaacagaaatggctctgggcaaggatgtgactccacctccagaaacagaagtagttctcatcaagaacgtatgtctgcctccagaaatggaggtggccctgactgaggatcaggtcccagccctcaaaacagaagcacccctggctaaggatggggttctgaccctggccaacaatgtgactccagccaaagatgttccaccactctcagaaacagaggcaacaccagttccaattaaagacatggaaattgcacaaacacaaaaaggaataagtgaggattcccatttagaatctctgcaggatgtggggcagtcagctgcacctactttcatgatttcaccagaaaccgtcacaggaacggggaaaaagtgcagcttgccggccgaggaggattctgtgttagaaaaactaggggaaaggaaaccatgcaacagtcaaccttctgagctttcttcagagacctcaggaatagccaggccagaagaaggaaggcctgtggtgagtgggacaggaaatgacatcaccaccccaccgaacaaggagctcccaccaagcccagagaagaaaacaaagcctttggccaccactcaacctgcaaagacttcaacatcgaaagccaaaacacagcccacttctctccctaagcagccagctcccaccaccattggtgggttgaataaaaaacccatgagccttgcttcaggcttagtgccagctgccccacccaaacgccctgccgtcgcctctgccaggccttccatcttaccttcaaaagacgtgaagccaaagcccattgcagatgcaaaggctcctgagaagcgggcctcaccatccaagccagcttctgccccagcctccagatctgggtccaagagcactcagactgttgcaaaaaccacaacagctgctgctgttgcctcaactggcccaagcagtaggagcccctccacgctcctgcccaagaagcccactgccattaagactgagggaaaacctgcagaagtcaagaagatgactgcaaagtctgtaccagctgacttgagtcgcccaaagagcacctccaccagttccatgaagaaaaccaccactctcagtgggacagcccccgctgcaggggtggttcccagccgagtcaaggccacacccatgccctcccggccctccacaactcctttcatagacaagaagcccacctcggccaaacccagctccaccaccccccggctcagccgcctggccaccaatacttctgctcctgatctgaagaatgtccgctccaaggttggctccacggaaaacatcaagcatcagcctggaggaggccgggccaaagtagagaaaaaaacagaggcagctgctacaacccgaaagcctgaatctaatgcagtcactaaaacagccggcccaattgcaagtgcacagaaacaacctgcggggaaagtccagatagtctccaaaaaagtgagctacagccatattcagtccaagtgtggttccaaggacaatattaagcatgtccctggaggtggtaatgttcagattcagaacaagaaagtggacatctctaaggtctcctccaagtgtgggtctaaggctaacatcaagcacaagcctggtggaggagatgtcaagattgaaagtcagaagttgaacttcaaggagaaggcccaggccaaggtgggatccctcgataatgtgggccacctacctgcaggaggtgctgtgaagactgagggcggtggcagcgaggctcctctgtgtccgggtccccctgctggggaggagccggccatctctgaggcagcgcctgaagctggcgcccccacttcagccagtggcctcaatggccaccccaccctgtcagggggtggtgaccaaagggaggcccagaccttggacagccagatccaggagacaagcatctaatgatgacattctggtctcgtcttccgtctcccccgtgttcccctcttgtctcccctgttcccctctcccttccctcctcccatgtcactgcagattgagacctacaggctgacgttccgggcaaatgccagggcccgcaccgaccacggggccgacattgtctcccgccccccacacttccctggcggccccaactcgggctcccgggtccttggccccctttcccgggctgtccactagaccagtgagcgcttgggcgccgtgctgggcagcccgctaggctcgccttccctcctgctttgcgtgcccggggcagcagcagccctgccccacacctcctctcactccccagcctgggcccatctccctgctttggtcttgccccatcactgcgccactgctccgtggaggaggttgggagggggttggggtggttgaggctaagttgggatctaggagaggagaaccagattctatcctcatctttttttggttctttggtccaaacccaaaagaaactgacatgccctcccttctccctggatctacctggagggaagagtggaggtggattccgagtggtgacaggacgctgaccgtggagcttaagccactgcctctccctctggtcccacaaatgggcgcccccccctccccatgcaggtggtgtcgggcccttcttgctgccctgccccaagttgggggtcagtgctgcctgtccccatgcttaacatacccgcctagctgctgtcacatttttcttgttttgtccttttatttttttctaataacctaaaaactggcaaaatagttctgcaggttgaagccatgtctacatgaaagtcctcagtaagtgttagagggaacagggcggagatatccttatgccacccccgctggaggatgtgggcagcttagggccctggaggcggtgcggcagggaagaggggtgcagaggctgtggctggtgagccggtcaggcacacaaggggcccttggagcgtggactggttggttttgccattttgttgtgtgtatgctgcttttcttttctaaccaagaggctggttttggcatctctgtcccattccctgggatctggtggtcagccctaggataaaaagccagggctggagaacaagaaagggccaggagatggaattccttcaggccggcacccacaccctaggacatgtaagccctcatgtccaagggagcctcatgcagatagtaggaaatcaggtctggaaatttaaaaataaaaggcatgagactaaggctatctgcttcccttatgccctgactggagaggggagggaggagaggcaaggcccacagagggcatcccagctaggccttgggatggctgcagtgaggagaaatcccgggaactgtattgacacaaagattcttattgcacttgtattttttgtattaaagtttgcatggtttctaataaaggattcaaacataagtttgtagtgaaatggcctgggagattccaagggcttctctggagggggattggctgcagtgtagatttgcctctgaggaggctgccccagacttggcctcctcatgccccctcctgacctctgcccttctctggtcctggcatccctggagaaggtaggggtcttgacctaagtttagatttgatctccatgtgcagggaggctgtcctgggcctgacaggtcctccccctttctgaggtagcagtgccttgtggaggtttgacaccatgtccctagctccccaagcacacaccaggaaactgcaggggctcacggaggaagtgctgcctgggccagggggaccagctttcctccgtagagaccatgtgcagaacacttctgctgtgccaagaacatgagggagccagtgttttgtcagcaggaagaaagggcctgctgggatgaaagtgggaaggaaacagggttgcgtagtcaggagacacctcaggggcaacagcacaggcccagagtacctgctgcctccactgcgtctgtcctggggtcatgaggatgctgaggttgacgacaggttccaggtcctttcactcctttggccaaaggttgggggtaggtggcccaagtggcgtgctctctaggtagacaacaggagtggtcagagttccctcaaaggatcctccactccagagcacctgagaaggccgggaccagaggccctgtgtgatgtgtactccgcagctgtttggggtgggacatttctgtacttctcgatttgcttatggctcagccattacctgtgtcagtccatgattctgttgtaacagttttaagagtaaataaataaagctgcctgatgtcccatcacgcag

SEQ ID NO: 1070 - DNA, 2757 bp, Homo sapiens
ctgggcggggccgggaagcggcagtggcggctacgcgcgcgggggtgcgcgcgggaacgaccgggaaacaccgcgagggccggggtgggccaggctgtggggacgacgggctgcgacgatggccgcagcggcgggcggcggcgggccggggacagcggtaggcgccacgggctcggggattgcggcggcagccgcaggcctagctgtttatcgacggaaggatgggggcccggccaccaagttttgggagagcccggagacggtgtcccagctggattcggtgcgggtctggctgggcaagcactacaagaaggttcagattcagaacaagaaagtggacatctctaaggtctcctccaagtgtgggtctaaggctaacatcaagcacaagcctggtggaggagatgtcaagattgaaagtcagaagttgaacttcaaggagaaggcccaggccaaggtgggatccctcgataatgtgggccacctacctgcaggaggtgctgtgaagattgagacctacaggctgacgttccgggcaaatgccagggcccgcaccgaccacggggccgacattgtctcccgccccccacacttccctggcggccccaactcgggctcccgggtccttggccccctttcccgggctgtccactagaccagtgagcgcttgggcgccgtgctgggcagcccgctaggctcgccttccctcctgctttgcgtgcccggggcagcagcagccctgccccacacctcctctcactccccagcctgggcccatctccctgctttggtcttgccccatcactgcgccactgctccgtggaggaggttgggagggggttggggtggttgaggctaagttgggatctaggagaggagaaccagattctatcctcatctttttttggttctttggtccaaacccaaaagaaactgacatgccctcccttctccctggatctacctggagggaagagtggaggtggattccgagtggtgacaggacgctgaccgtggagcttaagccactgcctctccctctggtcccacaaatgggcgcccccccctccccatgcaggtggtgtcgggcccttcttgctgccctgccccaagttgggggtcagtgctgcctgtccccatgcttaacatacccgcctagctgctgtcacatttttcttgttttgtccttttatttttttctaataacctaaaaactggcaaaatagttctgcaggttgaagccatgtctacatgaaagtcctcagtaagtgttagagggaacagggcggagatatccttatgccacccccgctggaggatgtgggcagcttagggccctggaggcggtgcggcagggaagaggggtgcagaggctgtggctggtgagccggtcaggcacacaaggggcccttggagcgtggactggttggttttgccattttgttgtgtgtatgctgcttttcttttctaaccaagaggctggttttggcatctctgtcccattccctgggatctggtggtcagccctaggataaaaagccagggctggagaacaagaaagggccaggagatggaattccttcaggccggcacccacaccctaggacatgtaagccctcatgtccaagggagcctcatgcagatagtaggaaatcaggtctggaaatttaaaaataaaaggcatgagactaaggctatctgcttcccttatgccctgactggagaggggagggaggagaggcaaggcccacagagggcatcccagctaggccttgggatggctgcagtgaggagaaatcccgggaactgtattgacacaaagattcttattgcacttgtattttttgtattaaagtttgcatggtttctaataaaggattcaaacataagtttgtagtgaaatggcctgggagattccaagggcttctctggagggggattggctgcagtgtagatttgcctctgaggaggctgccccagacttggcctcctcatgccccctcctgacctctgcccttctctggtcctggcatccctggagaaggtaggggtcttgacctaagtttagatttgatctccatgtgcagggaggctgtcctgggcctgacaggtcctccccctttctgaggtagcagtgccttgtggaggtttgacaccatgtccctagctccccaagcacacaccaggaaactgcaggggctcacggaggaagtgctgcctgggccagggggaccagctttcctccgtagagaccatgtgcagaacacttctgctgtgccaagaacatgagggagccagtgttttgtcagcaggaagaaagggcctgctgggatgaaagtgggaaggaaacagggttgcgtagtcaggagacacctcaggggcaacagcacaggcccagagtacctgctgcctccactgcgtctgtcctggggtcatgaggatgctgaggttgacgacaggttccaggtcctttcactcctttggccaaaggttgggggtaggtggcccaagtggcgtgctctctaggtagacaacaggagtggtcagagttccctcaaaggatcctccactccagagcacctgagaaggccgggaccagaggccctgtgtgatgtgtactccgcagctgtttggggtgggacatttctgtacttctcgatttgcttatggctcagccattacctgtgtcagtccatgattctgttgtaacagttttaagagtaaataaataaagctgcctgatgtcccatcacgcag

SEQ ID NO: 1071 - DNA, 5153 bp, Homo sapiens
aaaaaccggcgctcactagggcagaatgcagcctacggaggatggcggaagaggcggctgaggccgcaggacgtgctattccaagtatgttcatgcggatgctcctaccaataaaacactggctgggctggtggtgcagcttcttcagttccaggaagatgcctttgggaagcatgtcaccaacccggccttcaccaaactccctgcaaagtgtttcatggatttcaaagctggaggcgccttatgtcacattcttggggctgcttacaagtataaaaatgaacagggatggcggaggtttgacctacagaacccatctcgaatggatcgtaatgtggaaatgtttatgaacattgaaaaaacattggtgcagaacaattgtttgaccagacccaacatctacctcattccagacattgatctgaagttggctaacaaattgaaagatatcatcaaacgacatcagggaacatttacggatgagaagtcaaaagcttcccaccacatttacccatattcttcctcacaagacgatgaagaatggttgagaccggtgatgagaaaagagaagcaagtgttagtgcattggggcttttacccagacagctatgatacttgggtccatagtaatgatgttgatgctgaaattgaagatccaccaattccagaaaaaccatggaaggttcatgtgaaatggattttggacactgatattttcaatgaatggatgaatgaggaggattatgaggtggatgaaaataggaagcctgtgagttttcgtcagcggatttcaaccaagaatgaagagccagtcagaagtccagaaagaagagatagaaaagcatcagctaatgctcgaaagaggaaacattcgccttcgcctccccctccgacaccaacagaatcacggaagaagagtgggaagaaaggccaagctagcctttatgggaagcgcagaagtcagaaagaggaagatgagcaagaagatctaaccaaggatatggaagacccaacacctgtacccaatatagaagaagtagtacttcccaaaaatgtgaacctaaagaaagatagtgaaaatacacctgttaaaggaggaactgtagcggatctagatgagcaggatgaagaaacagtcacagcaggaggaaaggaagatgaagatcctgccaaaggtgatcagagtcgatcagttgaccttggggaagataatgtgacagagcagaccaatcacattattattcctagttatgcatcatggtttgattataactgtattcatgtgattgaacggcgtgctcttcctgagttcttcaatggaaaaaacaaatccaagactccagaaatatacttggcatatcgaaattttatgattgacacgtatcgtctaaacccccaagagtatttaactagcactgcttgtcggaggaacttgactggagatgtgtgtgctgtgatgagggtccatgcctttttagagcagtggggactcgttaattaccaagttgacccggaaagtagacccatggcaatgggacctcctcctactcctcattttaatgtattagctgataccccctctgggcttgtgcctctgcatcttcgatcacctcaggttcctgctgctcaacagatgctaaattttcctgagaaaaacaaggaaaaaccagttgatttgcagaactttggtctccgtactgacatttactccaagaaaacattagcaaagagtaaaggtgctagtgctggaagagaatggactgaacaggagacccttctactcctggaggccctggagatgtacaaggatgattggaacaaagtgtcggaacatgttggaagtcgtactcaggatgaatgcatcctccactttttgagacttcccattgaggacccataccttgagaattcagatgcttcccttgggcctttggcctaccagcctgtccccttcagtcagtcaggaaatccagttatgagtactgttgcttttttggcatctgtggtggaccctcgcgtggcatctgctgcagcaaaagcggctttggaggagttttctcgggtccgggaggaggtaccactggaattggttgaagctcatgtcaagaaagtacaagaagcagcacgagcctctgggaaagtggatcccacctacggtctggagagcagctgcattgcaggcacagggcccgatgagccagagaagcttgatccctttaagatgtaccatgatgatgacctggcagatttggtctttccctccagtgcgacagctgatacttcaatatttgcaggacaaaatgatcccttgaaagacagttacggtatgtctccctgcaacacagctgttgtacctcaggggtggtctgtggaagccttaaactctccacactcagagtcctttgtttccccagaggctgttgcagaacctcctcagccaacggcagttcccttagagctagccaaggagatagaaatggcatcagaagagaggccaccagcacaagcattggaaataatgatgggactgaagactactgacatggcaccatctaaagaaacagagatggccctcgccaaggacatggcactagctacaaaaaccgaggtggcattggctaaagatatggaatcacccaccaaattagatgtgacactggccaaggacatgcagccatccatggaatcagatatggccctagtcaaggacatggaactacccacagaaaaagaagtggccctggttaaggatgtcagatggcccacagaaacagatgtatcttcagccaagaatgtggtactgcccacagaaacagaggtagccccagccaaggatgtgacactgttgaaagaaacagagagggcatctcctataaaaatggacttagccccttccaaggacatgggaccacccaaagaaaacaagaaagaaacagagagggcatctcctataaaaatggacttggctccttccaaggacatgggaccacccaaagaaaacaagatagtcccagccaaggatttggtattactctcagaaatagaggtggcacaggctaatgacattatatcatccacagaaatatcctctgctgagaaggtggctttgtcctcagaaacagaggtagccctggccagggacatgacactgcccccggaaaccaacgtgatcttgaccaaggataaagcactacctttagaagcagaggtggccccagtcaaggacatggctcaactcccagaaacagaaatagccccggccaaggatgtggctccgtccacagtaaaagaagtgggcttgttgaaggacatgtctccactatcagaaacagaaatggctctgggcaaggatgtgactccacctccagaaacagaagtagttctcatcaagaacgtatgtctgcctccagaaatggaggtggccctgactgaggatcaggtcccagccctcaaaacagaagcacccctggctaaggatggggttctgaccctggccaacaatgtgactccagccaaagatgttccaccactctcagaaacagaggcaacaccagttccaattaaagacatggaaattgcacaaacacaaaaaggaataagtgaggattcccatttagaatctctgcaggatgtggggcagtcagctgcacctactttcatgatttcaccagaaaccgtcacaggaacggggaaaaagtgcagcttgccggccgaggaggattctgtgttagaaaaactaggggaaaggaaaccatgcaacagtcaaccttctgagctttcttcagagacctcagccaacttcatgtattgcggtacccctcccacacaagccaaacaagtttgcagacccagtgaccgcaggtcaacccggcccaagcctgccagggtccctcctgagctgctgggaggctctcctccatggaagactcttgatcacaggctgggccactgctctttgtctgagtcaggttgggtctctggttcatcctcctgtggtgggcctgggaaccaaagaaaaagtattcatgttgactcacttgaaccccagagggatcttggcagggaggcctgggatatagaaagcacaccaataatgatgaagaaaaagaagaagaaaccaaagcaaaagagatattctcaaccacgggctggaggaccttcggatgatgacaatgcagataagcctaaaggtcatccatttgcagctgacacacaaaaatcaggtgttctccccagccagcctaccactatgggtacagaatatggacttgtatctggagaaaacttgaaaagggaatgtttagttaactccagtgcagccagactggtagctgagaactttgtctcagagagtctcagaattcctttatatccttctgaagaagcccccaaaactgcaataagttctcagtctaagctgagagtagaggaagagagcaaaagtaacaagtcagtactacaaaaccaagacaagaaattgctgaagcaacatgaatacaaaccacagcctgcaccccacctgaagactcctgtagataaaagccagtcagtaggccctctcaatctgaaaggacccctagcagaagtttctgcatacaatgtagaaacccctttggatatcagacttaaagagggttgctctcctttcttggaccaagaggttatgggtgtagtttcaaaacccacagcagcaaaagaaataccaaatttggtacccactttgatagcaagtaatccattagaatgtaatctaaaagaagggaataatgaaagtaaaatgactaaactgcagaatgtcaaactgaaggagtttcctgaaggagctgaagaggataaagaactaaaaaaggaagcttttcccaacgaaagacaagagatcagcatctttacttctgagcagctgcagggccaagtgttggtacaggtccctggggtagagaatgaaccatttaagagaatggcaggtgatggcaaaagcaggaagggaaggggaagttctgggaaaatgagaacagattctgggaaggtaaaagcaaaatctgagctgccatttcttctggacagccagaaggacggaagggctgttctcataccgagtgagccagtctctaaaactgaaggaatgactactcaggataagagtgaggagctgg

SEQ ID NO: 1072 - DNA, 3042 bp, Homo sapiens
ctgggcggggccgggaagcggcagtggcggctacgcgcgcgggggtgcgcgcgggaacgaccgggaaacaccgcgagggccggggtgggccaggctgtggggacgacgggctgcgacgatggccgcagcggcgggcggcggcgggccggggacagcggtaggcgccacgggctcggggattgcggcggcagccgcaggcctagctgtttatcgacggaaggatgggggcccggccaccaagttttgggagagcccggagacggtgtcccagctggattcggtgcgggtctggctgggcaagcactacaagaagtatgttcatgcggatgctcctaccaataaaacactggctgggctggtggtgcagcttcttcagttccaggaagatgcctttgggaagcatgtcaccaacccggccttcaccaaactccctgcaaagtgtttcatggatttcaaagctggaggcgccttatgtcacattcttggggctgcttacaagtataaaaatgaacagggatggcggaggtttgacctacagaacccatctcgaatggatcgtaatgtggaaatgtttatgaacattgaaaaaacattggtgcagaacaattgtttgaccagacccaacatctacctcattccagacattgatctgaagttggctaacaaattgaaagatatcatcaaacgacatcagggaacatttacggatgagaagtcaaaagcttcccaccacatttacccatattcttcctcacaagacgatgaagaatggttgagaccggtgatgagaaaagagaagcaagtgttagtgcattggggcttttacccagacagctatgatacttgggtccatagtaatgatgttgatgctgaaattgaagatccaccaattccagaaaaaccatggaaggttcatgtgaaatggattttggacactgatattttcaatgaatggatgaatgaggaggattatgaggtggatgaaaataggaagcctgtgagttttcgtcagcggatttcaaccaagaatgaagagccagtcagaagtccagaaagaagagatagaaaagcatcagctaatgctcgaaagaggaaacattcgccttcgcctccccctccgacaccaacagaatcacggaagaagagtgggaagaaaggccaagctagcctttatgggaagcgcagaagtcagaaagaggaagatgagcaagaagatctaaccaaggatatggaagacccaacacctgtacccaatatagaagaagtagtacttcccaaaaatgtgaacctaaagaaagatagtgaaaatacacctgttaaaggaggaactgtagcggatctagatgagcaggatgaagaaacagtcacagcaggaggaaaggaagatgaagatcctgccaaaggtgatcagagtcgatcagttgaccttggggaagataatgtgacagagcagaccaatcacattattattcctagttatgcatcatggtttgattataactgtattcatgtgattgaacggcgtgctcttcctgagttcttcaatggaaaaaacaaatccaagactccagaaatatacttggcatatcgaaattttatgattgacacgtatcgtctaaacccccaagagtatttaactagcactgcttgtcggaggaacttgactggagatgtgtgtgctgtgatgagggtccatgcctttttagagcagtggggactcgttaattaccaagttgacccggaaagtagacccatggcaatgggacctcctcctactcctcattttaatgtattagctgataccccctctgggcttgtgcctctgcatcttcgatcacctcaggttcctgctgctcaacagatgctaaattttcctgagaaaaacaaggaaaaaccagttgatttgcagaactttggtctccgtactgacatttactccaagaaaacattagcaaagagtaaaggtgctagtgctggaagagaatggactgaacaggagacccttctactcctggaggccctggagatgtacaaggatgattggaacaaagtgtcggaacatgttggaagtcgtactcaggatgaatgcatcctccactttttgagacttcccattgaggacccataccttgagaattcagatgcttcccttgggcctttggcctaccagcctgtccccttcagtcagtcaggaaatccagttatgagtactgttgcttttttggcatctgtggtggaccctcgcgtggcatctgctgcagcaaaagcggctttggaggagttttctcgggtccgggaggaggtaccactggaattggttgaagctcatgtcaagaaagtacaagaagcagcacgagcctctgggaaagtggatcccacctacggtctggagagcagctgcattgcaggcacagggcccgatgagccagagaagcttggaatagccaggccagaagaaggaaggcctgtggtgagtgggacaggaaatgacatcaccaccccaccgaacaaggagctcccaccaagcccagagaagaaaacaaaggtaggtgccagaatggtggttatcttctactgccataatttttaaacggagtatcttctgctgttattgcttgaatcacgaatgaaatttcttttttctgagctgttattgtccttcctcatgtttggacatgcttagaaaatatcttgtattctcatttaccacagtggcctaaaccaactttaaaatctcagcctttgaccctattatcttatatatctgtaaaaaatgttctgtagaggccgggcatggtggctcatgcctgtaatctcagcactttgggaggccaaggcgggcggatcacatcaggagatggagaccatcctgaccaacatggtgaaatcccatctctactaaaaatactaaaattaactgggcgtggtgatgcatgcctgtaatcccagctactcaggaggctgaggcaggaggattgcttgaaccaaggagttggaggttgcggtgagccgagatcatgccactgcactgggctccatctc

SEQ ID NO: 1073 - DNA, 5704 bp, Homo sapiens
aaaaaccggcgctcactagggcagaatgcagcctacggaggatggcggaagaggcggctgaggccgcaggacgtgctattccaagtatgttcatgcggatgctcctaccaataaaacactggctgggctggtggtgcagcttcttcagttccaggaagatgcctttgggaagcatgtcaccaacccggccttcaccaaactccctgcaaagtgtttcatggatttcaaagctggaggcgccttatgtcacattcttggggctgcttacaagtataaaaatgaacagggatggcggaggtttgacctacagaacccatctcgaatggatcgtaatgtggaaatgtttatgaacattgaaaaaacattggtgcagaacaattgtttgaccagacccaacatctacctcattccagacattgatctgaagttggctaacaaattgaaagatatcatcaaacgacatcagggaacatttacggatgagaagtcaaaagcttcccaccacatttacccatattcttcctcacaagacgatgaagaatggttgagaccggtgatgagaaaagagaagcaagtgttagtgcattggggcttttacccagacagctatgatacttgggtccatagtaatgatgttgatgctgaaattgaagatccaccaattccagaaaaaccatggaaggttcatgtgaaatggattttggacactgatattttcaatgaatggatgaatgaggaggattatgaggtggatgaaaataggaagcctgtgagttttcgtcagcggatttcaaccaagaatgaagagccagtcagaagtccagaaagaagagatagaaaagcatcagctaatgctcgaaagaggaaacattcgccttcgcctccccctccgacaccaacagaatcacggaagaagagtgggaagaaaggccaagctagcctttatgggaagcgcagaagtcagaaagaggaagatgagcaagaagatctaaccaaggatatggaagacccaacacctgtacccaatatagaagaagtagtacttcccaaaaatgtgaacctaaagaaagatagtgaaaatacacctgttaaaggaggaactgtagcggatctagatgagcaggatgaagaaacagtcacagcaggaggaaaggaagatgaagatcctgccaaaggtgatcagagtcgatcagttgaccttggggaagataatgtgacagagcagaccaatcacattattattcctagttatgcatcatggtttgattataactgtattcatgtgattgaacggcgtgctcttcctgagttcttcaatggaaaaaacaaatccaagactccagaaatatacttggcatatcgaaattttatgattgacacgtatcgtctaaacccccaagagtatttaactagcactgcttgtcggaggaacttgactggagatgtgtgtgctgtgatgagggtccatgcctttttagagcagtggggactcgttaattaccaagttgacccggaaagtagacccatggcaatgggacctcctcctactcctcattttaatgtattagctgataccccctctgggcttgtgcctctgcatcttcgatcacctcaggttcctgctgctcaacagatgctaaattttcctgagaaaaacaaggaaaaaccagttgatttgcagaactttggtctccgtactgacatttactccaagaaaacattagcaaagagtaaaggtgctagtgctggaagagaatggactgaacaggagacccttctactcctggaggccctggagatgtacaaggatgattggaacaaagtgtcggaacatgttggaagtcgtactcaggatgaatgcatcctccactttttgagacttcccattgaggacccataccttgagaattcagatgcttcccttgggcctttggcctaccagcctgtccccttcagtcagtcaggaaatccagttatgagtactgttgcttttttggcatctgtggtggaccctcgcgtggcatctgctgcagcaaaagcggctttggaggagttttctcgggtccgggaggaggtaccactggaattggttgaagctcatgtcaagaaagtacaagaagcagcacgagcctctgggaaagtggatcccacctacggtctggagagcagctgcattgcaggcacagggcccgatgagccagagaagcttggaatagccaggccagaagaaggaaggcctgtggtgagtgggacaggaaatgacatcaccaccccaccgaacaaggagctcccaccaagcccagagaagaaaacaaagcctttggccaccactcaacctgcaaagacttcaacatcgaaagccaaaacacagcccacttctctccctaagcagccagctcccaccaccattggtgggttgaataaaaaacccatgagccttgcttcaggcttagtgccagctgccccacccaaacgccctgccgtcgcctctgccaggccttccatcttaccttcaaaagacgtgaagccaaagcccattgcagatgcaaaggctcctgagaagcgggcctcaccatccaagccagcttctgccccagcctccagatctgggtccaagagcactcagactgttgcaaaaaccacaacagctgctgctgttgcctcaactggcccaagcagtaggagcccctccacgctcctgcccaagaagcccactgccattaagactgagggaaaacctgcagaagtcaagaagatgactgcaaagtctgtaccagctgacttgagtcgcccaaagagcacctccaccagttccatgaagaaaaccaccactctcagtgggacagcccccgctgcaggggtggttcccagccgagtcaaggccacacccatgccctcccggccctccacaactcctttcatagacaagaagcccacctcggccaaacccagctccaccaccccccggctcagccgcctggccaccaatacttctgctcctgatctgaagaatgtccgctccaaggttggctccacggaaaacatcaagcatcagcctggaggaggccgggttcagattcagaacaagaaagtggacatctctaaggtctcctccaagtgtgggtctaaggctaacatcaagcacaagcctggtggaggagatgtcaagattgaaagtcagaagttgaacttcaaggagaaggcccaggccaaggtgggatccctcgataatgtgggccacctacctgcaggaggtgctgtgaagactgagggcggtggcagcgaggctcctctgtgtccgggtccccctgctggggaggagccggccatctctgaggcagcgcctgaagctggcgcccccacttcagccagtggcctcaatggccaccccaccctgtcagggggtggtgaccaaagggaggcccagaccttggacagccagatccaggagacaaattgagacctacaggctgacgttccgggcaaatgccagggcccgcaccgaccacggggccgacattgtctcccgccccccacacttccctggcggccccaactcgggctcccgggtccttggccccctttcccgggctgtccactagaccagtgagcgcttgggcgccgtgctgggcagcccgctaggctcgccttccctcctgctttgcgtgcccggggcagcagcagccctgccccacacctcctctcactccccagcctgggcccatctccctgctttggtcttgccccatcactgcgccactgctccgtggaggaggttgggagggggttggggtggttgaggctaagttgggatctaggagaggagaaccagattctatcctcatctttttttggttctttggtccaaacccaaaagaaactgacatgccctcccttctccctggatctacctggagggaagagtggaggtggattccgagtggtgacaggacgctgaccgtggagcttaagccactgcctctccctctggtcccacaaatgggcgcccccccctccccatgcaggtggtgtcgggcccttcttgctgccctgccccaagttgggggtcagtgctgcctgtccccatgcttaacatacccgcctagctgctgtcacatttttcttgttttgtccttttatttttttctaataacctaaaaactggcaaaatagttctgcaggttgaagccatgtctacatgaaagtcctcagtaagtgttagagggaacagggcggagatatccttatgccacccccgctggaggatgtgggcagcttagggccctggaggcggtgcggcagggaagaggggtgcagaggctgtggctggtgagccggtcaggcacacaaggggcccttggagcgtggactggttggttttgccattttgttgtgtgtatgctgcttttcttttctaaccaagaggctggttttggcatctctgtcccattccctgggatctggtggtcagccctaggataaaaagccagggctggagaacaagaaagggccaggagatggaattccttcaggccggcacccacaccctaggacatgtaagccctcatgtccaagggagcctcatgcagatagtaggaaatcaggtctggaaatttaaaaataaaaggcatgagactaaggctatctgcttcccttatgccctgactggagaggggagggaggagaggcaaggcccacagagggcatcccagctaggccttgggatggctgcagtgaggagaaatcccgggaactgtattgacacaaagattcttattgcacttgtattttttgtattaaagtttgcatggtttctaataaaggattcaaacataagtttgtagtgaaatggcctgggagattccaagggcttctctggagggggattggctgcagtgtagatttgcctctgaggaggctgccccagacttggcctcctcatgccccctcctgacctctgcccttctctggtcctggcatccctggagaaggtaggggtcttgacctaagtttagatttgatctccatgtgcagggaggctgtcctgggcctgacaggtcctccccctttctgaggtagcagtgccttgtggaggtttgacaccatgtccctagctccccaagcacacaccaggaaactgcaggggctcacggaggaagtgctgcctgggccagggggaccagctttcctccgtagagaccatgtgcagaacacttctgctgtgccaagaacatgagggagccagtgttttgtcagcaggaagaaagggcctgctgggatgaaagtgggaaggaaacagggttgcgtagtcaggagacacctcaggggcaacagcacaggcccagagtacctgctgcctccactgcgtctgtcctggggtcatgaggatgctgaggttgacgacaggttccaggtcctttcactcctttggccaaaggttgggggtaggtggcccaagtggcgtgctctctaggtagacaacaggagtggtcagagttccctcaaaggatcctccactccagagcacctgagaaggccgggaccagaggccctgtgtgatgtgtactccgcagctgtttggggtgggacatttctgtacttctcgatttgcttatggctcagccattacctgtgtcagtccatgattctgttgtaacagttttaagagtaaataaataaagctgcctgatgtcccatcacgcag

SEQ ID NO: 1074 - DNA, 2814 bp, Homo sapiens
aaaaaccggcgctcactagggcagaatgcagcctacggaggatggcggaagaggcggctgaggccgcaggacgtgctattccaagtatgttcatgcggatgctcctaccaataaaacactggctgggctggtggtgcagcttcttcagttccaggaagatgcctttgggaagcatgtcaccaacccggccttcaccaaactccctgcaaagtgtttcatggatttcaaagctggaggcgccttatgtcacattcttggggctgcttacaagtataaaaatgaacagggatggcggaggtttgacctacagaacccatctcgaatggatcgtaatgtggaaatgtttatgaacattgaaaaaacattggtgcagaacaattgtttgaccagacccaacatctacctcattccagacattgatctgaagttggctaacaaattgaaagatatcatcaaacgacatcagggaacatttacggatgagaagtcaaaagcttcccaccacatttacccatattcttcctcacaagacgatgaagaatggttgagaccggtgatgagaaaagagaagcaagtgttagtgcattggggcttttacccagacagctatgatacttgggtccatagtaatgatgttgatgctgaaattgaagatccaccaattccagaaaaaccatggaaggttcatgtgaaatggattttggacactgatattttcaatgaatggatgaatgaggaggattatgaggtggatgaaaataggaagcctgtgagttttcgtcagcggatttcaaccaagaatgaagagccagtcagaagtccagaaagaagagatagaaaagcatcagctaatgctcgaaagaggaaacattcgccttcgcctccccctccgacaccaacagaatcacggaagaagagtgggaagaaaggccaagctagcctttatgggaagcgcagaagtcagaaagaggaagatgagcaagaagatctaaccaaggatatggaagacccaacacctgtacccaatatagaagaagtagtacttcccaaaaatgtgaacctaaagaaagatagtgaaaatacacctgttaaaggaggaactgtagcggatctagatgagcaggatgaagaaacagtcacagcaggaggaaaggaagatgaagatcctgccaaaggtgatcagagtcgatcagttgaccttggggaagataatgtgacagagcagaccaatcacattattattcctagttatgcatcatggtttgattataactgtattcatgtgattgaacggcgtgctcttcctgagttcttcaatggaaaaaacaaatccaagactccagaaatatacttggcatatcgaaattttatgattgacacgtatcgtctaaacccccaagagtatttaactagcactgcttgtcggaggaacttgactggagatgtgtgtgctgtgatgagggtccatgcctttttagagcagtggggactcgttaattaccaagttgacccggaaagtagacccatggcaatgggacctcctcctactcctcattttaatgtattagctgataccccctctgggcttgtgcctctgcatcttcgatcacctcaggttcctgctgctcaacagatgctaaattttcctgagaaaaacaaggaaaaaccagttgatttgcagaactttggtctccgtactgacatttactccaagaaaacattagcaaagagtaaaggtgctagtgctggaagagaatggactgaacaggagacccttctactcctggaggccctggagatgtacaaggatgattggaacaaagtgtcggaacatgttggaagtcgtactcaggatgaatgcatcctccactttttgagacttcccattgaggacccataccttgagaattcagatgcttcccttgggcctttggcctaccagcctgtccccttcagtcagtcaggaaatccagttatgagtactgttgcttttttggcatctgtggtggaccctcgcgtggcatctgctgcagcaaaagcggctttggaggagttttctcgggtccgggaggaggtaccactggaattggttgaagctcatgtcaagaaagtacaagaagcagcacgagcctctgggaaagtggatcccacctacggtctggagagcagctgcattgcaggcacagggcccgatgagccagagaagcttggaatagccaggccagaagaaggaaggcctgtggtgagtgggacaggaaatgacatcaccaccccaccgaacaaggagctcccaccaagcccagagaagaaaacaaaggtaggtgccagaatggtggttatcttctactgccataatttttaaacggagtatcttctgctgttattgcttgaatcacgaatgaaatttcttttttctgagctgttattgtccttcctcatgtttggacatgcttagaaaatatcttgtattctcatttaccacagtggcctaaaccaactttaaaatctcagcctttgaccctattatcttatatatctgtaaaaaatgttctgtagaggccgggcatggtggctcatgcctgtaatctcagcactttgggaggccaaggcgggcggatcacatcaggagatggagaccatcctgaccaacatggtgaaatcccatctctactaaaaatactaaaattaactgggcgtggtgatgcatgcctgtaatcccagctactcaggaggctgaggcaggaggattgcttgaaccaaggagttggaggttgcggtgagccgagatcatgccactgcactgggctccatctc

SEQ ID NO: 1075 - DNA, 4345 bp, Homo sapiens
ctgggcggggccgggaagcggcagtggcggctacgcgcgcgggggtgcgcgcgggaacgaccgggaaacaccgcgagggccggggtgggccaggctgtggggacgacgggctgcgacgatggccgcagcggcgggcggcggcgggccggggacagcggtaggcgccacgggctcggggattgcggcggcagccgcaggcctagctgtttatcgacggaaggatgggggcccggccaccaagttttgggagagcccggagacggtgtcccagctggattcggtgcgggtctggctgggcaagcactacaagaagtatgttcatgcggatgctcctaccaataaaacactggctgggctggtggtgcagcttcttcagttccaggaagatgcctttgggaagcatgtcaccaacccggccttcaccaaactccctgcaaagtgtttcatggatttcaaagctggaggcgccttatgtcacattcttggggctgcttacaagtataaaaatgaacagggatggcggaggtttgacctacagaacccatctcgaatggatcgtaatgtggaaatgtttatgaacattgaaaaaacattggtgcagaacaattgtttgaccagacccaacatctacctcattccagacattgatctgaagttggctaacaaattgaaagatatcatcaaacgacatcagggaacatttacggatgagaagtcaaaagcttcccaccacatttacccatattcttcctcacaagacgatgaagaatggttgagaccggtgatgagaaaagagaagcaagtgttagtgcattggggcttttacccagacagctatgatacttgggtccatagtaatgatgttgatgctgaaattgaagatccaccaattccagaaaaaccatggaaggttcatgtgaaatggattttggacactgatattttcaatgaatggatgaatgaggaggattatgaggtggatgaaaataggaagcctgtgagttttcgtcagcggatttcaaccaagaatgaagagccagtcagaagtccagaaagaagagatagaaaagcatcagctaatgctcgaaagaggaaacattcgccttcgcctccccctccgacaccaacagaatcacggaagaagagtgggaagaaaggccaagctagcctttatgggaagcgcagaagtcagaaagaggaagatgagcaagaagatctaaccaaggatatggaagacccaacacctgtacccaatatagaagaagtagtacttcccaaaaatgtgaacctaaagaaagatagtgaaaatacacctgttaaaggaggaactgtagcggatctagatgagcaggatgaagaaacagtcacagcaggaggaaaggaagatgaagatcctgccaaaggtgatcagagtcgatcagttgaccttggggaagataatgtgacagagcagaccaatcacattattattcctagttatgcatcatggtttgattataactgtattcatgtgattgaacggcgtgctcttcctgagttcttcaatggaaaaaacaaatccaagactccagaaatatacttggcatatcgaaattttatgattgacacgtatcgtctaaacccccaagagtatttaactagcactgcttgtcggaggaacttgactggagatgtgtgtgctgtgatgagggtccatgcctttttagagcagtggggactcgttaattaccaagttgacccggaaagtagacccatggcaatgggacctcctcctactcctcattttaatgtattagctgataccccctctgggcttgtgcctctgcatcttcgatcacctcaggttcctgctgctcaacagatgctaaattttcctgagaaaaacaaggaaaaaccagttgatttgcagaactttggtctccgtactgacatttactccaagaaaacattagcaaagagtaaaggtgctagtgctggaagagaatggactgaacaggagacccttctactcctggaggccctggagatgtacaaggatgattggaacaaagtgtcggaacatgttggaagtcgtactcaggatgaatgcatcctccactttttgagacttcccattgaggacccataccttgagaattcagatgcttcccttgggcctttggcctaccagcctgtccccttcagtcagtcaggaaatccagttatgagtactgttgcttttttggcatctgtggtggaccctcgcgtggcatctgctgcagcaaaagcggctttggaggagttttctcgggtccgggaggaggtaccactggaattggttgaagctcatgtcaagaaagtacaagaagcagcacgagcctctgggaaagtggatcccacctacggtctggagagcagctgcattgcaggcacagggcccgatgagccagagaagcttgatccctttaagatgtaccatgatgatgacctggcagatttggtctttccctccagtgcgacagctgatacttcaatatttgcaggacaaaatgatcccttgaaagacagttacggtatgtctccctgcaacacagctgttgtacctcaggggtggtctgtggaagccttaaactctccacactcagagtcctttgtttccccagaggctgttgcagaacctcctcagccaacggcagttcccttagagctagccaaggagatagaaatggcatcagaagagaggccaccagcacaagcattggaaataatgatgggactgaagactactgacatggcaccatctaaagaaacagagatggccctcgccaaggacatggcactagctacaaaaaccgaggtggcattggctaaagatatggaatcacccaccaaattagatgtgacactggccaaggacatgcagccatccatggaatcagatatggccctagtcaaggacatggaactacccacagaaaaagaagtggccctggttaaggatgtcagatggcccacagaaacagatgtatcttcagccaagaatgtggtactgcccacagaaacagaggtagccccagccaaggatgtgacactgttgaaagaaacagagagggcatctcctataaaaatggacttagccccttccaaggacatgggaccacccaaagaaaacaagaaagaaacagagagggcatctcctataaaaatggacttggctccttccaaggacatgggaccacccaaagaaaacaagatagtcccagccaaggatttggtattactctcagaaatagaggtggcacaggctaatgacattatatcatccacagaaatatcctctgctgagaaggtggctttgtcctcagaaacagaggtagccctggccagggacatgacactgcccccggaaaccaacgtgatcttgaccaaggataaagcactacctttagaagcagaggtggccccagtcaaggacatggctcaactcccagaaacagaaatagccccggccaaggatgtggctccgtccacagtaaaagaagtgggcttgttgaaggacatgtctccactatcagaaacagaaatggctctgggcaaggatgtgactccacctccagaaacagaagtagttctcatcaagaacgtatgtctgcctccagaaatggaggtggccctgactgaggatcaggtcccagccctcaaaacagaagcacccctggctaaggatggggttctgaccctggccaacaatgtgactccagccaaagatgttccaccactctcagaaacagaggcaacaccagttccaattaaagacatggaaattgcacaaacacaaaaaggaataagtgaggattcccatttagaatctctgcaggatgtggggcagtcagctgcacctactttcatgatttcaccagaaaccgtcacaggaacggggaaaaagtgcagcttgccggccgaggaggattctgtgttagaaaaactaggggaaaggaaaccatgcaacagtcaaccttctgagctttcttcagagacctcaggaatagccaggccagaagaaggaaggcctgtggtgagtgggacaggaaatgacatcaccaccccaccgaacaaggagctcccaccaagcccagagaagaaaacaaagcctttggccaccactcaacctgcaaagacttcaacatcgaaagccaaaacacagcccacttctctccctaagcagccagctcccaccaccattggtgggttgaataaaaaacccatgagccttgcttcaggcttagtgccagctgccccacccaaacgccctgccgtcgcctctgccaggccttccatcttaccttcaaaagacgtgaagccaaag

SEQ ID NO: 1076 - DNA, 3168 bp, Homo sapiens
ctgggcggggccgggaagcggcagtggcggctacgcgcgcgggggtgcgcgcgggaacgaccgggaaacaccgcgagggccggggtgggccaggctgtggggacgacgggctgcgacgatggccgcagcggcgggcggcggcgggccggggacagcggtaggcgccacgggctcggggattgcggcggcagccgcaggcctagctgtttatcgacggaaggatgggggcccggccaccaagttttgggagagcccggagacggtgtcccagctggattcggtgcgggtctggctgggcaagcactacaagaagtatgttcatgcggatgctcctaccaataaaacactggctgggctggtggtgcagcttcttcagttccaggaagatgcctttgggaagcatgtcaccaacccggccttcaccaaactccctgttcagattcagaacaagaaagtggacatctctaaggtctcctccaagtgtgggtctaaggctaacatcaagcacaagcctggtggaggagatgtcaagattgaaagtcagaagttgaacttcaaggagaaggcccaggccaaggtgggatccctcgataatgtgggccacctacctgcaggaggtgctgtgaagactgagggcggtggcagcgaggctcctctgtgtccgggtccccctgctggggaggagccggccatctctgaggcagcgcctgaagctggcgcccccacttcagccagtggcctcaatggccaccccaccctgtcagggggtggtgaccaaagggaggcccagaccttggacagccagatccaggagacaagcatctaatgatgacattctggtctcgtcttccgtctcccccgtgttcccctcttgtctcccctgttcccctctcccttccctcctcccatgtcactgcagattgagacctacaggctgacgttccgggcaaatgccagggcccgcaccgaccacggggccgacattgtctcccgccccccacacttccctggcggccccaactcgggctcccgggtccttggccccctttcccgggctgtccactagaccagtgagcgcttgggcgccgtgctgggcagcccgctaggctcgccttccctcctgctttgcgtgcccggggcagcagcagccctgccccacacctcctctcactccccagcctgggcccatctccctgctttggtcttgccccatcactgcgccactgctccgtggaggaggttgggagggggttggggtggttgaggctaagttgggatctaggagaggagaaccagattctatcctcatctttttttggttctttggtccaaacccaaaagaaactgacatgccctcccttctccctggatctacctggagggaagagtggaggtggattccgagtggtgacaggacgctgaccgtggagcttaagccactgcctctccctctggtcccacaaatgggcgcccccccctccccatgcaggtggtgtcgggcccttcttgctgccctgccccaagttgggggtcagtgctgcctgtccccatgcttaacatacccgcctagctgctgtcacatttttcttgttttgtccttttatttttttctaataacctaaaaactggcaaaatagttctgcaggttgaagccatgtctacatgaaagtcctcagtaagtgttagagggaacagggcggagatatccttatgccacccccgctggaggatgtgggcagcttagggccctggaggcggtgcggcagggaagaggggtgcagaggctgtggctggtgagccggtcaggcacacaaggggcccttggagcgtggactggttggttttgccattttgttgtgtgtatgctgcttttcttttctaaccaagaggctggttttggcatctctgtcccattccctgggatctggtggtcagccctaggataaaaagccagggctggagaacaagaaagggccaggagatggaattccttcaggccggcacccacaccctaggacatgtaagccctcatgtccaagggagcctcatgcagatagtaggaaatcaggtctggaaatttaaaaataaaaggcatgagactaaggctatctgcttcccttatgccctgactggagaggggagggaggagaggcaaggcccacagagggcatcccagctaggccttgggatggctgcagtgaggagaaatcccgggaactgtattgacacaaagattcttattgcacttgtattttttgtattaaagtttgcatggtttctaataaaggattcaaacataagtttgtagtgaaatggcctgggagattccaagggcttctctggagggggattggctgcagtgtagatttgcctctgaggaggctgccccagacttggcctcctcatgccccctcctgacctctgcccttctctggtcctggcatccctggagaaggtaggggtcttgacctaagtttagatttgatctccatgtgcagggaggctgtcctgggcctgacaggtcctccccctttctgaggtagcagtgccttgtggaggtttgacaccatgtccctagctccccaagcacacaccaggaaactgcaggggctcacggaggaagtgctgcctgggccagggggaccagctttcctccgtagagaccatgtgcagaacacttctgctgtgccaagaacatgagggagccagtgttttgtcagcaggaagaaagggcctgctgggatgaaagtgggaaggaaacagggttgcgtagtcaggagacacctcaggggcaacagcacaggcccagagtacctgctgcctccactgcgtctgtcctggggtcatgaggatgctgaggttgacgacaggttccaggtcctttcactcctttggccaaaggttgggggtaggtggcccaagtggcgtgctctctaggtagacaacaggagtggtcagagttccctcaaaggatcctccactccagagcacctgagaaggccgggaccagaggccctgtgtgatgtgtactccgcagctgtttggggtgggacatttctgtacttctcgatttgcttatggctcagccattacctgtgtcagtccatgattctgttgtaacagttttaagagtaaataaataaagctgcctgatgtcccatcacgcag

SEQ ID NO: 1077 - DNA, 5949 bp, Homo sapiens
ctgggcggggccgggaagcggcagtggcggctacgcgcgcgggggtgcgcgcgggaacgaccgggaaacaccgcgagggccggggtgggccaggctgtggggacgacgggctgcgacgatggccgcagcggcgggcggcggcgggccggggacagcggtaggcgccacgggctcggggattgcggcggcagccgcaggcctagctgtttatcgacggaaggatgggggcccggccaccaagttttgggagagcccggagacggtgtcccagctggattcggtgcgggtctggctgggcaagcactacaagaagtatgttcatgcggatgctcctaccaataaaacactggctgggctggtggtgcagcttcttcagttccaggaagatgcctttgggaagcatgtcaccaacccggccttcaccaaactccctgcaaagtgtttcatggatttcaaagctggaggcgccttatgtcacattcttggggctgcttacaagtataaaaatgaacagggatggcggaggtttgacctacagaacccatctcgaatggatcgtaatgtggaaatgtttatgaacattgaaaaaacattggtgcagaacaattgtttgaccagacccaacatctacctcattccagacattgatctgaagttggctaacaaattgaaagatatcatcaaacgacatcagggaacatttacggatgagaagtcaaaagcttcccaccacatttacccatattcttcctcacaagacgatgaagaatggttgagaccggtgatgagaaaagagaagcaagtgttagtgcattggggcttttacccagacagctatgatacttgggtccatagtaatgatgttgatgctgaaattgaagatccaccaattccagaaaaaccatggaaggttcatgtgaaatggattttggacactgatattttcaatgaatggatgaatgaggaggattatgaggtggatgaaaataggaagcctgtgagttttcgtcagcggatttcaaccaagaatgaagagccagtcagaagtccagaaagaagagatagaaaagcatcagctaatgctcgaaagaggaaacattcgccttcgcctccccctccgacaccaacagaatcacggaagaagagtgggaagaaaggccaagctagcctttatgggaagcgcagaagtcagaaagaggaagatgagcaagaagatctaaccaaggatatggaagacccaacacctgtacccaatatagaagaagtagtacttcccaaaaatgtgaacctaaagaaagatagtgaaaatacacctgttaaaggaggaactgtagcggatctagatgagcaggatgaagaaacagtcacagcaggaggaaaggaagatgaagatcctgccaaaggtgatcagagtcgatcagttgaccttggggaagataatgtgacagagcagaccaatcacattattattcctagttatgcatcatggtttgattataactgtattcatgtgattgaacggcgtgctcttcctgagttcttcaatggaaaaaacaaatccaagactccagaaatatacttggcatatcgaaattttatgattgacacgtatcgtctaaacccccaagagtatttaactagcactgcttgtcggaggaacttgactggagatgtgtgtgctgtgatgagggtccatgcctttttagagcagtggggactcgttaattaccaagttgacccggaaagtagacccatggcaatgggacctcctcctactcctcattttaatgtattagctgataccccctctgggcttgtgcctctgcatcttcgatcacctcaggttcctgctgctcaacagatgctaaattttcctgagaaaaacaaggaaaaaccagttgatttgcagaactttggtctccgtactgacatttactccaagaaaacattagcaaagagtaaaggtgctagtgctggaagagaatggactgaacaggagacccttctactcctggaggccctggagatgtacaaggatgattggaacaaagtgtcggaacatgttggaagtcgtactcaggatgaatgcatcctccactttttgagacttcccattgaggacccataccttgagaattcagatgcttcccttgggcctttggcctaccagcctgtccccttcagtcagtcaggaaatccagttatgagtactgttgcttttttggcatctgtggtggaccctcgcgtggcatctgctgcagcaaaagcggctttggaggagttttctcgggtccgggaggaggtaccactggaattggttgaagctcatgtcaagaaagtacaagaagcagcacgagcctctgggaaagtggatcccacctacggtctggagagcagctgcattgcaggcacagggcccgatgagccagagaagcttggaatagccaggccagaagaaggaaggcctgtggtgagtgggacaggaaatgacatcaccaccccaccgaacaaggagctcccaccaagcccagagaagaaaacaaagcctttggccaccactcaacctgcaaagacttcaacatcgaaagccaaaacacagcccacttctctccctaagcagccagctcccaccaccattggtgggttgaataaaaaacccatgagccttgcttcaggcttagtgccagctgccccacccaaacgccctgccgtcgcctctgccaggccttccatcttaccttcaaaagacgtgaagccaaagcccattgcagatgcaaaggctcctgagaagcgggcctcaccatccaagccagcttctgccccagcctccagatctgggtccaagagcactcagactgttgcaaaaaccacaacagctgctgctgttgcctcaactggcccaagcagtaggagcccctccacgctcctgcccaagaagcccactgccattaagactgagggaaaacctgcagaagtcaagaagatgactgcaaagtctgtaccagctgacttgagtcgcccaaagagcacctccaccagttccatgaagaaaaccaccactctcagtgggacagcccccgctgcaggggtggttcccagccgagtcaaggccacacccatgccctcccggccctccacaactcctttcatagacaagaagcccacctcggccaaacccagctccaccaccccccggctcagccgcctggccaccaatacttctgctcctgatctgaagaatgtccgctccaaggttggctccacggaaaacatcaagcatcagcctggaggaggccgggccaaagtagagaaaaaaacagaggcagctgctacaacccgaaagcctgaatctaatgcagtcactaaaacagccggcccaattgcaagtgcacagaaacaacctgcggggaaagtccagatagtctccaaaaaagtgagctacagccatattcagtccaagtgtggttccaaggacaatattaagcatgtccctggaggtggtaatgttcagattcagaacaagaaagtggacatctctaaggtctcctccaagtgtgggtctaaggctaacatcaagcacaagcctggtggaggagatgtcaagattgaaagtcagaagttgaacttcaaggagaaggcccaggccaaggtgggatccctcgataatgtgggccacctacctgcaggaggtgctgtgaagattgagacctacaggctgacgttccgggcaaatgccagggcccgcaccgaccacggggccgacattgtctcccgccccccacacttccctggcggccccaactcgggctcccgggtccttggccccctttcccgggctgtccactagaccagtgagcgcttgggcgccgtgctgggcagcccgctaggctcgccttccctcctgctttgcgtgcccggggcagcagcagccctgccccacacctcctctcactccccagcctgggcccatctccctgctttggtcttgccccatcactgcgccactgctccgtggaggaggttgggagggggttggggtggttgaggctaagttgggatctaggagaggagaaccagattctatcctcatctttttttggttctttggtccaaacccaaaagaaactgacatgccctcccttctccctggatctacctggagggaagagtggaggtggattccgagtggtgacaggacgctgaccgtggagcttaagccactgcctctccctctggtcccacaaatgggcgcccccccctccccatgcaggtggtgtcgggcccttcttgctgccctgccccaagttgggggtcagtgctgcctgtccccatgcttaacatacccgcctagctgctgtcacatttttcttgttttgtccttttatttttttctaataacctaaaaactggcaaaatagttctgcaggttgaagccatgtctacatgaaagtcctcagtaagtgttagagggaacagggcggagatatccttatgccacccccgctggaggatgtgggcagcttagggccctggaggcggtgcggcagggaagaggggtgcagaggctgtggctggtgagccggtcaggcacacaaggggcccttggagcgtggactggttggttttgccattttgttgtgtgtatgctgcttttcttttctaaccaagaggctggttttggcatctctgtcccattccctgggatctggtggtcagccctaggataaaaagccagggctggagaacaagaaagggccaggagatggaattccttcaggccggcacccacaccctaggacatgtaagccctcatgtccaagggagcctcatgcagatagtaggaaatcaggtctggaaatttaaaaataaaaggcatgagactaaggctatctgcttcccttatgccctgactggagaggggagggaggagaggcaaggcccacagagggcatcccagctaggccttgggatggctgcagtgaggagaaatcccgggaactgtattgacacaaagattcttattgcacttgtattttttgtattaaagtttgcatggtttctaataaaggattcaaacataagtttgtagtgaaatggcctgggagattccaagggcttctctggagggggattggctgcagtgtagatttgcctctgaggaggctgccccagacttggcctcctcatgccccctcctgacctctgcccttctctggtcctggcatccctggagaaggtaggggtcttgacctaagtttagatttgatctccatgtgcagggaggctgtcctgggcctgacaggtcctccccctttctgaggtagcagtgccttgtggaggtttgacaccatgtccctagctccccaagcacacaccaggaaactgcaggggctcacggaggaagtgctgcctgggccagggggaccagctttcctccgtagagaccatgtgcagaacacttctgctgtgccaagaacatgagggagccagtgttttgtcagcaggaagaaagggcctgctgggatgaaagtgggaaggaaacagggttgcgtagtcaggagacacctcaggggcaacagcacaggcccagagtacctgctgcctccactgcgtctgtcctggggtcatgaggatgctgaggttgacgacaggttccaggtcctttcactcctttggccaaaggttgggggtaggtggcccaagtggcgtgctctctaggtagacaacaggagtggtcagagttccctcaaaggatcctccactccagagcacctgagaaggccgggaccagaggccctgtgtgatgtgtactccgcagctgtttggggtgggacatttctgtacttctcgatttgcttatggctcagccattacctgtgtcagtccatgattctgttgtaacagttttaagagtaaataaataaagctgcctgatgtcccatcacgcag

SEQ ID NO: 1078 - DNA, 7824 bp, Homo sapiens
ctgggcggggccgggaagcggcagtggcggctacgcgcgcgggggtgcgcgcgggaacgaccgggaaacaccgcgagggccggggtgggccaggctgtggggacgacgggctgcgacgatggccgcagcggcgggcggcggcgggccggggacagcggtaggcgccacgggctcggggattgcggcggcagccgcaggcctagctgtttatcgacggaaggatgggggcccggccaccaagttttgggagagcccggagacggtgtcccagctggattcggtgcgggtctggctgggcaagcactacaagaagtatgttcatgcggatgctcctaccaataaaacactggctgggctggtggtgcagcttcttcagttccaggaagatgcctttgggaagcatgtcaccaacccggccttcaccaaactccctgcaaagtgtttcatggatttcaaagctggaggcgccttatgtcacattcttggggctgcttacaagtataaaaatgaacagggatggcggaggtttgacctacagaacccatctcgaatggatcgtaatgtggaaatgtttatgaacattgaaaaaacattggtgcagaacaattgtttgaccagacccaacatctacctcattccagacattgatctgaagttggctaacaaattgaaagatatcatcaaacgacatcagggaacatttacggatgagaagtcaaaagcttcccaccacatttacccatattcttcctcacaagacgatgaagaatggttgagaccggtgatgagaaaagagaagcaagtgttagtgcattggggcttttacccagacagctatgatacttgggtccatagtaatgatgttgatgctgaaattgaagatccaccaattccagaaaaaccatggaaggttcatgtgaaatggattttggacactgatattttcaatgaatggatgaatgaggaggattatgaggtggatgaaaataggaagcctgtgagttttcgtcagcggatttcaaccaagaatgaagagccagtcagaagtccagaaagaagagatagaaaagcatcagctaatgctcgaaagaggaaacattcgccttcgcctccccctccgacaccaacagaatcacggaagaagagtgggaagaaaggccaagctagcctttatgggaagcgcagaagtcagaaagaggaagatgagcaagaagatctaaccaaggatatggaagacccaacacctgtacccaatatagaagaagtagtacttcccaaaaatgtgaacctaaagaaagatagtgaaaatacacctgttaaaggaggaactgtagcggatctagatgagcaggatgaagaaacagtcacagcaggaggaaaggaagatgaagatcctgccaaaggtgatcagagtcgatcagttgaccttggggaagataatgtgacagagcagaccaatcacattattattcctagttatgcatcatggtttgattataactgtattcatgtgattgaacggcgtgctcttcctgagttcttcaatggaaaaaacaaatccaagactccagaaatatacttggcatatcgaaattttatgattgacacgtatcgtctaaacccccaagagtatttaactagcactgcttgtcggaggaacttgactggagatgtgtgtgctgtgatgagggtccatgcctttttagagcagtggggactcgttaattaccaagttgacccggaaagtagacccatggcaatgggacctcctcctactcctcattttaatgtattagctgataccccctctgggcttgtgcctctgcatcttcgatcacctcaggttcctgctgctcaacagatgctaaattttcctgagaaaaacaaggaaaaaccagttgatttgcagaactttggtctccgtactgacatttactccaagaaaacattagcaaagagtaaaggtgctagtgctggaagagaatggactgaacaggagacccttctactcctggaggccctggagatgtacaaggatgattggaacaaagtgtcggaacatgttggaagtcgtactcaggatgaatgcatcctccactttttgagacttcccattgaggacccataccttgagaattcagatgcttcccttgggcctttggcctaccagcctgtccccttcagtcagtcaggaaatccagttatgagtactgttgcttttttggcatctgtggtggaccctcgcgtggcatctgctgcagcaaaagcggctttggaggagttttctcgggtccgggaggaggtaccactggaattggttgaagctcatgtcaagaaagtacaagaagcagcacgagcctctgggaaagtggatcccacctacggtctggagagcagctgcattgcaggcacagggcccgatgagccagagaagcttgatccctttaagatgtaccatgatgatgacctggcagatttggtctttccctccagtgcgacagctgatacttcaatatttgcaggacaaaatgatcccttgaaagacagttacggtatgtctccctgcaacacagctgttgtacctcaggggtggtctgtggaagccttaaactctccacactcagagtcctttgtttccccagaggctgttgcagaacctcctcagccaacggcagttcccttagagctagccaaggagatagaaatggcatcagaagagaggccaccagcacaagcattggaaataatgatgggactgaagactactgacatggcaccatctaaagaaacagagatggccctcgccaaggacatggcactagctacaaaaaccgaggtggcattggctaaagatatggaatcacccaccaaattagatgtgacactggccaaggacatgcagccatccatggaatcagatatggccctagtcaaggacatggaactacccacagaaaaagaagtggccctggttaaggatgtcagatggcccacagaaacagatgtatcttcagccaagaatgtggtactgcccacagaaacagaggtagccccagccaaggatgtgacactgttgaaagaaacagagagggcatctcctataaaaatggacttagccccttccaaggacatgggaccacccaaagaaaacaagaaagaaacagagagggcatctcctataaaaatggacttggctccttccaaggacatgggaccacccaaagaaaacaagatagtcccagccaaggatttggtattactctcagaaatagaggtggcacaggctaatgacattatatcatccacagaaatatcctctgctgagaaggtggctttgtcctcagaaacagaggtagccctggccagggacatgacactgcccccggaaaccaacgtgatcttgaccaaggataaagcactacctttagaagcagaggtggccccagtcaaggacatggctcaactcccagaaacagaaatagccccggccaaggatgtggctccgtccacagtaaaagaagtgggcttgttgaaggacatgtctccactatcagaaacagaaatggctctgggcaaggatgtgactccacctccagaaacagaagtagttctcatcaagaacgtatgtctgcctccagaaatggaggtggccctgactgaggatcaggtcccagccctcaaaacagaagcacccctggctaaggatggggttctgaccctggccaacaatgtgactccagccaaagatgttccaccactctcagaaacagaggcaacaccagttccaattaaagacatggaaattgcacaaacacaaaaaggaataagtgaggattcccatttagaatctctgcaggatgtggggcagtcagctgcacctactttcatgatttcaccagaaaccgtcacaggaacggggaaaaagtgcagcttgccggccgaggaggattctgtgttagaaaaactaggggaaaggaaaccatgcaacagtcaaccttctgagctttcttcagagacctcaggaatagccaggccagaagaaggaaggcctgtggtgagtgggacaggaaatgacatcaccaccccaccgaacaaggagctcccaccaagcccagagaagaaaacaaagcctttggccaccactcaacctgcaaagacttcaacatcgaaagccaaaacacagcccacttctctccctaagcagccagctcccaccaccattggtgggttgaataaaaaacccatgagccttgcttcaggcttagtgccagctgccccacccaaacgccctgccgtcgcctctgccaggccttccatcttaccttcaaaagacgtgaagccaaagcccattgcagatgcaaaggctcctgagaagcgggcctcaccatccaagccagcttctgccccagcctccagatctgggtccaagagcactcagactgttgcaaaaaccacaacagctgctgctgttgcctcaactggcccaagcagtaggagcccctccacgctcctgcccaagaagcccactgccattaagactgagggaaaacctgcagaagtcaagaagatgactgcaaagtctgtaccagctgacttgagtcgcccaaagagcacctccaccagttccatgaagaaaaccaccactctcagtgggacagcccccgctgcaggggtggttcccagccgagtcaaggccacacccatgccctcccggccctccacaactcctttcatagacaagaagcccacctcggccaaacccagctccaccaccccccggctcagccgcctggccaccaatacttctgctcctgatctgaagaatgtccgctccaaggttggctccacggaaaacatcaagcatcagcctggaggaggccgggccaaagtagagaaaaaaacagaggcagctgctacaacccgaaagcctgaatctaatgcagtcactaaaacagccggcccaattgcaagtgcacagaaacaacctgcggggaaagtccagatagtctccaaaaaagtgagctacagccatattcagtccaagtgtggttccaaggacaatattaagcatgtccctggaggtggtaatgttcagattcagaacaagaaagtggacatctctaaggtctcctccaagtgtgggtctaaggctaacatcaagcacaagcctggtggaggagatgtcaagattgaaagtcagaagttgaacttcaaggagaaggcccaggccaaggtgggatccctcgataatgtgggccacctacctgcaggaggtgctgtgaagactgagggcggtggcagcgaggctcctctgtgtccgggtccccctgctggggaggagccggccatctctgaggcagcgcctgaagctggcgcccccacttcagccagtggcctcaatggccaccccaccctgtcagggggtggtgaccaaagggaggcccagaccttggacagccagatccaggagacaagcatctaatgatgacattctggtctcgtcttccgtctcccccgtgttcccctcttgtctcccctgttcccctctcccttccctcctcccatgtcactgcagattgagacctacaggctgacgttccgggcaaatgccagggcccgcaccgaccacggggccgacattgtctcccgccccccacacttccctggcggccccaactcgggctcccgggtccttggccccctttcccgggctgtccactagaccagtgagcgcttgggcgccgtgctgggcagcccgctaggctcgccttccctcctgctttgcgtgcccggggcagcagcagccctgccccacacctcctctcactccccagcctgggcccatctccctgctttggtcttgccccatcactgcgccactgctccgtggaggaggttgggagggggttggggtggttgaggctaagttgggatctaggagaggagaaccagattctatcctcatctttttttggttctttggtccaaacccaaaagaaactgacatgccctcccttctccctggatctacctggagggaagagtggaggtggattccgagtggtgacaggacgctgaccgtggagcttaagccactgcctctccctctggtcccacaaatgggcgcccccccctccccatgcaggtggtgtcgggcccttcttgctgccctgccccaagttgggggtcagtgctgcctgtccccatgcttaacatacccgcctagctgctgtcacatttttcttgttttgtccttttatttttttctaataacctaaaaactggcaaaatagttctgcaggttgaagccatgtctacatgaaagtcctcagtaagtgttagagggaacagggcggagatatccttatgccacccccgctggaggatgtgggcagcttagggccctggaggcggtgcggcagggaagaggggtgcagaggctgtggctggtgagccggtcaggcacacaaggggcccttggagcgtggactggttggttttgccattttgttgtgtgtatgctgcttttcttttctaaccaagaggctggttttggcatctctgtcccattccctgggatctggtggtcagccctaggataaaaagccagggctggagaacaagaaagggccaggagatggaattccttcaggccggcacccacaccctaggacatgtaagccctcatgtccaagggagcctcatgcagatagtaggaaatcaggtctggaaatttaaaaataaaaggcatgagactaaggctatctgcttcccttatgccctgactggagaggggagggaggagaggcaaggcccacagagggcatcccagctaggccttgggatggctgcagtgaggagaaatcccgggaactgtattgacacaaagattcttattgcacttgtattttttgtattaaagtttgcatggtttctaataaaggattcaaacataagtttgtagtgaaatggcctgggagattccaagggcttctctggagggggattggctgcagtgtagatttgcctctgaggaggctgccccagacttggcctcctcatgccccctcctgacctctgcccttctctggtcctggcatccctggagaaggtaggggtcttgacctaagtttagatttgatctccatgtgcagggaggctgtcctgggcctgacaggtcctccccctttctgaggtagcagtgccttgtggaggtttgacaccatgtccctagctccccaagcacacaccaggaaactgcaggggctcacggaggaagtgctgcctgggccagggggaccagctttcctccgtagagaccatgtgcagaacacttctgctgtgccaagaacatgagggagccagtgttttgtcagcaggaagaaagggcctgctgggatgaaagtgggaaggaaacagggttgcgtagtcaggagacacctcaggggcaacagcacaggcccagagtacctgctgcctccactgcgtctgtcctggggtcatgaggatgctgaggttgacgacaggttccaggtcctttcactcctttggccaaaggttgggggtaggtggcccaagtggcgtgctctctaggtagacaacaggagtggtcagagttccctcaaaggatcctccactccagagcacctgagaaggccgggaccagaggccctgtgtgatgtgtactccgcagctgtttggggtgggacatttctgtacttctcgatttgcttatggctcagccattacctgtgtcagtccatgattctgttgtaacagttttaagagtaaataaataaagctgcctgatgtcccatcacgcag

SEQ ID NO: 1079 - DNA, 3460 bp, Homo sapiens
ctgggcggggccgggaagcggcagtggcggctacgcgcgcgggggtgcgcgcgggaacgaccgggaaacaccgcgagggccggggtgggccaggctgtggggacgacgggctgcgacgatggccgcagcggcgggcggcggcgggccggggacagcggtaggcgccacgggctcggggattgcggcggcagccgcaggcctagctgtttatcgacggaaggatgggggcccggccaccaagttttgggagagcccggagacggtgtcccagctggattcggtgcgggtctggctgggcaagcactacaagaagtatgttcatgcggatgctcctaccaataaaacactggctgggctggtggtgcagcttcttcagttccaggaagatgcctttgggaagcatgtcaccaacccggccttcaccaaactccctgcaaagtgtttcatggatttcaaagctggaggcgccttatgtcacattcttggggctgcttacaagtataaaaatgaacagggatggcggaggtttgacctacagaacccatctcgaatggatcgtaatgtggaaatgtttatgaacattgaaaaaacattggtgcagaacaattgtttgaccagacccaacatctacctcattccagacattgatctgaagttggctaacaaattgaaagatatcatcaaacgacatcagggaacatttacggatgagaagtcaaaagcttcccaccacatttacccatattcttcctcacaagacgatgaagaatggttgagaccggtgatgagaaaagagaagcaagtgttagtgcattggggcttttacccagacagctatgatacttgggtccatagtaatgatgttgatgctgaaattgaagatccaccaattccagaaaaaccatggaaggttcatgtgaaatggattttggacactgatattttcaatgaatggatgaatgaggaggattatgaggtggatgaaaataggaagcctgtgagttttcgtcagcggatttcaaccaagaatgaagagccagtcagaagtccagaaagaagagatagaaaagcatcagctaatgctcgaaagaggaaacattcgccttcgcctccccctccgacaccaacagaatcacggaagaagagtgggaagaaaggccaagctagcctttatgggaagcgcagaagtcagaaagaggaagatgagcaagaagatctaaccaaggatatggaagacccaacacctgtacccaatatagaagaagtagtacttcccaaaaatgtgaacctaaagaaagatagtgaaaatacacctgttaaaggaggaactgtagcggatctagatgagcaggatgaagaaacagtcacagcaggaggaaaggaagatgaagatcctgccaaaggtgatcagagtcgatcagttgaccttggggaagataatgtgacagagcagaccaatcacattattattcctagttatgcatcatggtttgattataactgtattcatgtgattgaacggcgtgctcttcctgagttcttcaatggaaaaaacaaatccaagactccagaaatatacttggcatatcgaaattttatgattgacacgtatcgtctaaacccccaagagtatttaactagcactgcttgtcggaggaacttgactggagatgtgtgtgctgtgatgagggtccatgcctttttagagcagtggggactcgttaattaccaagttgacccggaaagtagacccatggcaatgggacctcctcctactcctcattttaatgtattagctgataccccctctgggcttgtgcctctgcatcttcgatcacctcaggttcctgctgctcaacagatgctaaattttcctgagaaaaacaaggaaaaaccagttgatttgcagaactttggtctccgtactgacatttactccaagaaaacattagcaaagagtaaaggtgctagtgctggaagagaatggactgaacaggagacccttctactcctggaggccctggagatgtacaaggatgattggaacaaagtgtcggaacatgttggaagtcgtactcaggatgaatgcatcctccactttttgagacttcccattgaggacccataccttgagaattcagatgcttcccttgggcctttggcctaccagcctgtccccttcagtcagtcaggaaatccagttatgagtactgttgcttttttggcatctgtggtggaccctcgcgtggcatctgctgcagcaaaagcggctttggaggagttttctcgggtccgggaggaggtaccactggaattggttgaagctcatgtcaagaaagtacaagaagcagcacgagcctctgggaaagtggatcccacctacggtctggagagcagctgcattgcaggcacagggcccgatgagccagagaagcttggaatagccaggccagaagaaggaaggcctgtggtgagtgggacaggaaatgacatcaccaccccaccgaacaaggagctcccaccaagcccagagaagaaaacaaagcctttggccaccactcaacctgcaaagacttcaacatcgaaagccaaaacacagcccacttctctccctaagcagccagctcccaccaccattggtgggttgaataaaaaacccatgagccttgcttcaggcttagtgccagctgccccacccaaacgccctgccgtcgcctctgccaggccttccatcttaccttcaaaagacgtgaagccaaagcccattgcagatgcaaaggctcctgagaagcgggcctcaccatccaagccagcttctgccccagcctccagatctgggtccaagagcactcagactgttgcaaaaaccacaacagctgctgctgttgcctcaactggcccaagcagtaggagcccctccacgctcctgcccaagaagcccactgccattaagactgagggaaaacctgcagaagtcaagaagatgactgcaaagtctgtaccagctgacttgagtcgcccaaagagcacctccaccagttccatgaagaaaaccaccactctcagtgggacagcccccgctgcaggggtggttcccagccgagtcaaggccacacccatgccctcccggccctccacaactcctttcatagacaagaagcccacctcggccaaacccagctccaccaccccccggctcagccgcctggccaccaatacttctgctcctgatctgaagaatgtccgctccaaggccaaagtagagaaaaaaacagaggcagctgctacaacccgaaagcctgaatctaatgcagtcactaaaacagccggcccaattgcaagtgcacagaaacaacctgcggggaaagtccagatagtctccaaaaaagtgagctacagccatattcagtccaagtgtggttccaaggacaatattaagcatgtccctggaggtggtaat

SEQ ID NO: 1080 - DNA, 6012 bp, Homo sapiens
aaaaaccggcgctcactagggcagaatgcagcctacggaggatggcggaagaggcggctgaggccgcaggacgtgctattccaagtatgttcatgcggatgctcctaccaataaaacactggctgggctggtggtgcagcttcttcagttccaggaagatgcctttgggaagcatgtcaccaacccggccttcaccaaactccctgcaaagtgtttcatggatttcaaagctggaggcgccttatgtcacattcttggggctgcttacaagtataaaaatgaacagggatggcggaggtttgacctacagaacccatctcgaatggatcgtaatgtggaaatgtttatgaacattgaaaaaacattggtgcagaacaattgtttgaccagacccaacatctacctcattccagacattgatctgaagttggctaacaaattgaaagatatcatcaaacgacatcagggaacatttacggatgagaagtcaaaagcttcccaccacatttacccatattcttcctcacaagacgatgaagaatggttgagaccggtgatgagaaaagagaagcaagtgttagtgcattggggcttttacccagacagctatgatacttgggtccatagtaatgatgttgatgctgaaattgaagatccaccaattccagaaaaaccatggaaggttcatgtgaaatggattttggacactgatattttcaatgaatggatgaatgaggaggattatgaggtggatgaaaataggaagcctgtgagttttcgtcagcggatttcaaccaagaatgaagagccagtcagaagtccagaaagaagagatagaaaagcatcagctaatgctcgaaagaggaaacattcgccttcgcctccccctccgacaccaacagaatcacggaagaagagtgggaagaaaggccaagctagcctttatgggaagcgcagaagtcagaaagaggaagatgagcaagaagatctaaccaaggatatggaagacccaacacctgtacccaatatagaagaagtagtacttcccaaaaatgtgaacctaaagaaagatagtgaaaatacacctgttaaaggaggaactgtagcggatctagatgagcaggatgaagaaacagtcacagcaggaggaaaggaagatgaagatcctgccaaaggtgatcagagtcgatcagttgaccttggggaagataatgtgacagagcagaccaatcacattattattcctagttatgcatcatggtttgattataactgtattcatgtgattgaacggcgtgctcttcctgagttcttcaatggaaaaaacaaatccaagactccagaaatatacttggcatatcgaaattttatgattgacacgtatcgtctaaacccccaagagtatttaactagcactgcttgtcggaggaacttgactggagatgtgtgtgctgtgatgagggtccatgcctttttagagcagtggggactcgttaattaccaagttgacccggaaagtagacccatggcaatgggacctcctcctactcctcattttaatgtattagctgataccccctctgggcttgtgcctctgcatcttcgatcacctcaggttcctgctgctcaacagatgctaaattttcctgagaaaaacaaggaaaaaccagttgatttgcagaactttggtctccgtactgacatttactccaagaaaacattagcaaagagtaaaggtgctagtgctggaagagaatggactgaacaggagacccttctactcctggaggccctggagatgtacaaggatgattggaacaaagtgtcggaacatgttggaagtcgtactcaggatgaatgcatcctccactttttgagacttcccattgaggacccataccttgagaattcagatgcttcccttgggcctttggcctaccagcctgtccccttcagtcagtcaggaaatccagttatgagtactgttgcttttttggcatctgtggtggaccctcgcgtggcatctgctgcagcaaaagcggctttggaggagttttctcgggtccgggaggaggtaccactggaattggttgaagctcatgtcaagaaagtacaagaagcagcacgagcctctgggaaagtggatcccacctacggtctggagagcagctgcattgcaggcacagggcccgatgagccagagaagcttggaatagccaggccagaagaaggaaggcctgtggtgagtgggacaggaaatgacatcaccaccccaccgaacaaggagctcccaccaagcccagagaagaaaacaaagcctttggccaccactcaacctgcaaagacttcaacatcgaaagccaaaacacagcccacttctctccctaagcagccagctcccaccaccattggtgggttgaataaaaaacccatgagccttgcttcaggcttagtgccagctgccccacccaaacgccctgccgtcgcctctgccaggccttccatcttaccttcaaaagacgtgaagccaaagcccattgcagatgcaaaggctcctgagaagcgggcctcaccatccaagccagcttctgccccagcctccagatctgggtccaagagcactcagactgttgcaaaaaccacaacagctgctgctgttgcctcaactggcccaagcagtaggagcccctccacgctcctgcccaagaagcccactgccattaagactgagggaaaacctgcagaagtcaagaagatgactgcaaagtctgtaccagctgacttgagtcgcccaaagagcacctccaccagttccatgaagaaaaccaccactctcagtgggacagcccccgctgcaggggtggttcccagccgagtcaaggccacacccatgccctcccggccctccacaactcctttcatagacaagaagcccacctcggccaaacccagctccaccaccccccggctcagccgcctggccaccaatacttctgctcctgatctgaagaatgtccgctccaaggttggctccacggaaaacatcaagcatcagcctggaggaggccgggccaaagtagagaaaaaaacagaggcagctgctacaacccgaaagcctgaatctaatgcagtcactaaaacagccggcccaattgcaagtgcacagaaacaacctgcggggaaagtccagatagtctccaaaaaagtgagctacagccatattcagtccaagtgtggttccaaggacaatattaagcatgtccctggaggtggtaatgttcagattcagaacaagaaagtggacatctctaaggtctcctccaagtgtgggtctaaggctaacatcaagcacaagcctggtggaggagatgtcaagattgaaagtcagaagttgaacttcaaggagaaggcccaggccaaggtgggatccctcgataatgtgggccacctacctgcaggaggtgctgtgaagactgagggcggtggcagcgaggctcctctgtgtccgggtccccctgctggggaggagccggccatctctgaggcagcgcctgaagctggcgcccccacttcagccagtggcctcaatggccaccccaccctgtcagggggtggtgaccaaagggaggcccagaccttggacagccagatccaggagacaagcatctaatgatgacattctggtctcgtcttccgtctcccccgtgttcccctcttgtctcccctgttcccctctcccttccctcctcccatgtcactgcagattgagacctacaggctgacgttccgggcaaatgccagggcccgcaccgaccacggggccgacattgtctcccgccccccacacttccctggcggccccaactcgggctcccgggtccttggccccctttcccgggctgtccactagaccagtgagcgcttgggcgccgtgctgggcagcccgctaggctcgccttccctcctgctttgcgtgcccggggcagcagcagccctgccccacacctcctctcactccccagcctgggcccatctccctgctttggtcttgccccatcactgcgccactgctccgtggaggaggttgggagggggttggggtggttgaggctaagttgggatctaggagaggagaaccagattctatcctcatctttttttggttctttggtccaaacccaaaagaaactgacatgccctcccttctccctggatctacctggagggaagagtggaggtggattccgagtggtgacaggacgctgaccgtggagcttaagccactgcctctccctctggtcccacaaatgggcgcccccccctccccatgcaggtggtgtcgggcccttcttgctgccctgccccaagttgggggtcagtgctgcctgtccccatgcttaacatacccgcctagctgctgtcacatttttcttgttttgtccttttatttttttctaataacctaaaaactggcaaaatagttctgcaggttgaagccatgtctacatgaaagtcctcagtaagtgttagagggaacagggcggagatatccttatgccacccccgctggaggatgtgggcagcttagggccctggaggcggtgcggcagggaagaggggtgcagaggctgtggctggtgagccggtcaggcacacaaggggcccttggagcgtggactggttggttttgccattttgttgtgtgtatgctgcttttcttttctaaccaagaggctggttttggcatctctgtcccattccctgggatctggtggtcagccctaggataaaaagccagggctggagaacaagaaagggccaggagatggaattccttcaggccggcacccacaccctaggacatgtaagccctcatgtccaagggagcctcatgcagatagtaggaaatcaggtctggaaatttaaaaataaaaggcatgagactaaggctatctgcttcccttatgccctgactggagaggggagggaggagaggcaaggcccacagagggcatcccagctaggccttgggatggctgcagtgaggagaaatcccgggaactgtattgacacaaagattcttattgcacttgtattttttgtattaaagtttgcatggtttctaataaaggattcaaacataagtttgtagtgaaatggcctgggagattccaagggcttctctggagggggattggctgcagtgtagatttgcctctgaggaggctgccccagacttggcctcctcatgccccctcctgacctctgcccttctctggtcctggcatccctggagaaggtaggggtcttgacctaagtttagatttgatctccatgtgcagggaggctgtcctgggcctgacaggtcctccccctttctgaggtagcagtgccttgtggaggtttgacaccatgtccctagctccccaagcacacaccaggaaactgcaggggctcacggaggaagtgctgcctgggccagggggaccagctttcctccgtagagaccatgtgcagaacacttctgctgtgccaagaacatgagggagccagtgttttgtcagcaggaagaaagggcctgctgggatgaaagtgggaaggaaacagggttgcgtagtcaggagacacctcaggggcaacagcacaggcccagagtacctgctgcctccactgcgtctgtcctggggtcatgaggatgctgaggttgacgacaggttccaggtcctttcactcctttggccaaaggttgggggtaggtggcccaagtggcgtgctctctaggtagacaacaggagtggtcagagttccctcaaaggatcctccactccagagcacctgagaaggccgggaccagaggccctgtgtgatgtgtactccgcagctgtttggggtgggacatttctgtacttctcgatttgcttatggctcagccattacctgtgtcagtccatgattctgttgtaacagttttaagagtaaataaataaagctgcctgatgtcccatcacgcag

SEQ ID NO: 1081 - DNA, 5276 bp, Homo sapiens
aaaaaccggcgctcactagggcagaatgcagcctacggaggatggcggaagaggcggctgaggccgcaggacgtgctattccaagtatgttcatgcggatgctcctaccaataaaacactggctgggctggtggtgcagcttcttcagttccaggaagatgcctttgggaagcatgtcaccaacccggccttcaccaaactccctgcaaagtgtttcatggatttcaaagctggaggcgccttatgtcacattcttggggctgcttacaagtataaaaatgaacagggatggcggaggtttgacctacagaacccatctcgaatggatcgtaatgtggaaatgtttatgaacattgaaaaaacattggtgcagaacaattgtttgaccagacccaacatctacctcattccagacattgatctgaagttggctaacaaattgaaagatatcatcaaacgacatcagggaacatttacggatgagaagtcaaaagcttcccaccacatttacccatattcttcctcacaagacgatgaagaatggttgagaccggtgatgagaaaagagaagcaagtgttagtgcattggggcttttacccagacagctatgatacttgggtccatagtaatgatgttgatgctgaaattgaagatccaccaattccagaaaaaccatggaaggttcatgtgaaatggattttggacactgatattttcaatgaatggatgaatgaggaggattatgaggtggatgaaaataggaagcctgtgagttttcgtcagcggatttcaaccaagaatgaagagccagtcagaagtccagaaagaagagatagaaaagcatcagctaatgctcgaaagaggaaacattcgccttcgcctccccctccgacaccaacagaatcacggaagaagagtgggaagaaaggccaagctagcctttatgggaagcgcagaagtcagaaagaggaagatgagcaagaagatctaaccaaggatatggaagacccaacacctgtacccaatatagaagaagtagtacttcccaaaaatgtgaacctaaagaaagatagtgaaaatacacctgttaaaggaggaactgtagcggatctagatgagcaggatgaagaaacagtcacagcaggaggaaaggaagatgaagatcctgccaaaggtgatcagagtcgatcagttgaccttggggaagataatgtgacagagcagaccaatcacattattattcctagttatgcatcatggtttgattataactgtattcatgtgattgaacggcgtgctcttcctgagttcttcaatggaaaaaacaaatccaagactccagaaatatacttggcatatcgaaattttatgattgacacgtatcgtctaaacccccaagagtatttaactagcactgcttgtcggaggaacttgactggagatgtgtgtgctgtgatgagggtccatgcctttttagagcagtggggactcgttaattaccaagttgacccggaaagtagacccatggcaatgggacctcctcctactcctcattttaatgtattagctgataccccctctgggcttgtgcctctgcatcttcgatcacctcaggttcctgctgctcaacagatgctaaattttcctgagaaaaacaaggaaaaaccagttgatttgcagaactttggtctccgtactgacatttactccaagaaaacattagcaaagagtaaaggtgctagtgctggaagagaatggactgaacaggagacccttctactcctggaggccctggagatgtacaaggatgattggaacaaagtgtcggaacatgttggaagtcgtactcaggatgaatgcatcctccactttttgagacttcccattgaggacccataccttgagaattcagatgcttcccttgggcctttggcctaccagcctgtccccttcagtcagtcaggaaatccagttatgagtactgttgcttttttggcatctgtggtggaccctcgcgtggcatctgctgcagcaaaagcggctttggaggagttttctcgggtccgggaggaggtaccactggaattggttgaagctcatgtcaagaaagtacaagaagcagcacgagcctctgggaaagtggatcccacctacggtctggagagcagctgcattgcaggcacagggcccgatgagccagagaagcttgggtctccaactgaattccttgaagagaaaatggcctaccaggaatacccaaatagccagaactggccagaagataccaacttttgtttccaacctgagcaagtggtcgatcctatccagactgatccctttaagatgtaccatgatgatgacctggcagatttggtctttccctccagtgcgacagctgatacttcaatatttgcaggacaaaatgatcccttgaaagacagttacggtatgtctccctgcaacacagctgttgtacctcaggggtggtctgtggaagccttaaactctccacactcagagtcctttgtttccccagaggctgttgcagaacctcctcagccaacggcagttcccttagagctagccaaggagatagaaatggcatcagaagagaggccaccagcacaagcattggaaataatgatgggactgaagactactgacatggcaccatctaaagaaacagagatggccctcgccaaggacatggcactagctacaaaaaccgaggtggcattggctaaagatatggaatcacccaccaaattagatgtgacactggccaaggacatgcagccatccatggaatcagatatggccctagtcaaggacatggaactacccacagaaaaagaagtggccctggttaaggatgtcagatggcccacagaaacagatgtatcttcagccaagaatgtggtactgcccacagaaacagaggtagccccagccaaggatgtgacactgttgaaagaaacagagagggcatctcctataaaaatggacttagccccttccaaggacatgggaccacccaaagaaaacaagaaagaaacagagagggcatctcctataaaaatggacttggctccttccaaggacatgggaccacccaaagaaaacaagatagtcccagccaaggatttggtattactctcagaaatagaggtggcacaggctaatgacattatatcatccacagaaatatcctctgctgagaaggtggctttgtcctcagaaacagaggtagccctggccagggacatgacactgcccccggaaaccaacgtgatcttgaccaaggataaagcactacctttagaagcagaggtggccccagtcaaggacatggctcaactcccagaaacagaaatagccccggccaaggatgtggctccgtccacagtaaaagaagtgggcttgttgaaggacatgtctccactatcagaaacagaaatggctctgggcaaggatgtgactccacctccagaaacagaagtagttctcatcaagaacgtatgtctgcctccagaaatggaggtggccctgactgaggatcaggtcccagccctcaaaacagaagcacccctggctaaggatggggttctgaccctggccaacaatgtgactccagccaaagatgttccaccactctcagaaacagaggcaacaccagttccaattaaagacatggaaattgcacaaacacaaaaaggaataagtgaggattcccatttagaatctctgcaggatgtggggcagtcagctgcacctactttcatgatttcaccagaaaccgtcacaggaacggggaaaaagtgcagcttgccggccgaggaggattctgtgttagaaaaactaggggaaaggaaaccatgcaacagtcaaccttctgagctttcttcagagacctcagccaacttcatgtattgcggtacccctcccacacaagccaaacaagtttgcagacccagtgaccgcaggtcaacccggcccaagcctgccagggtccctcctgagctgctgggaggctctcctccatggaagactcttgatcacaggctgggccactgctctttgtctgagtcaggttgggtctctggttcatcctcctgtggtgggcctgggaaccaaagaaaaagtattcatgttgactcacttgaaccccagagggatcttggcagggaggcctgggatatagaaagcacaccaataatgatgaagaaaaagaagaagaaaccaaagcaaaagagatattctcaaccacgggctggaggaccttcggatgatgacaatgcagataagcctaaaggtcatccatttgcagctgacacacaaaaatcaggtgttctccccagccagcctaccactatgggtacagaatatggacttgtatctggagaaaacttgaaaagggaatgtttagttaactccagtgcagccagactggtagctgagaactttgtctcagagagtctcagaattcctttatatccttctgaagaagcccccaaaactgcaataagttctcagtctaagctgagagtagaggaagagagcaaaagtaacaagtcagtactacaaaaccaagacaagaaattgctgaagcaacatgaatacaaaccacagcctgcaccccacctgaagactcctgtagataaaagccagtcagtaggccctctcaatctgaaaggacccctagcagaagtttctgcatacaatgtagaaacccctttggatatcagacttaaagagggttgctctcctttcttggaccaagaggttatgggtgtagtttcaaaacccacagcagcaaaagaaataccaaatttggtacccactttgatagcaagtaatccattagaatgtaatctaaaagaagggaataatgaaagtaaaatgactaaactgcagaatgtcaaactgaaggagtttcctgaaggagctgaagaggataaagaactaaaaaaggaagcttttcccaacgaaagacaagagatcagcatctttacttctgagcagctgcagggccaagtgttggtacaggtccctggggtagagaatgaaccatttaagagaatggcaggtgatggcaaaagcaggaagggaaggggaagttctgggaaaatgagaacagattctgggaaggtaaaagcaaaatctgagctgccatttcttctggacagccagaaggacggaagggctgttctcataccgagtgagccagtctctaaaactgaaggaatgactactcaggataagagtgaggagctgg

SEQ ID NO: 1082 - DNA, 7719 bp, Homo sapiens
aaaaaccggcgctcactagggcagaatgcagcctacggaggatggcggaagaggcggctgaggccgcaggacgtgctattccaagtatgttcatgcggatgctcctaccaataaaacactggctgggctggtggtgcagcttcttcagttccaggaagatgcctttgggaagcatgtcaccaacccggccttcaccaaactccctgcaaagtgtttcatggatttcaaagctggaggcgccttatgtcacattcttggggctgcttacaagtataaaaatgaacagggatggcggaggtttgacctacagaacccatctcgaatggatcgtaatgtggaaatgtttatgaacattgaaaaaacattggtgcagaacaattgtttgaccagacccaacatctacctcattccagacattgatctgaagttggctaacaaattgaaagatatcatcaaacgacatcagggaacatttacggatgagaagtcaaaagcttcccaccacatttacccatattcttcctcacaagacgatgaagaatggttgagaccggtgatgagaaaagagaagcaagtgttagtgcattggggcttttacccagacagctatgatacttgggtccatagtaatgatgttgatgctgaaattgaagatccaccaattccagaaaaaccatggaaggttcatgtgaaatggattttggacactgatattttcaatgaatggatgaatgaggaggattatgaggtggatgaaaataggaagcctgtgagttttcgtcagcggatttcaaccaagaatgaagagccagtcagaagtccagaaagaagagatagaaaagcatcagctaatgctcgaaagaggaaacattcgccttcgcctccccctccgacaccaacagaatcacggaagaagagtgggaagaaaggccaagctagcctttatgggaagcgcagaagtcagaaagaggaagatgagcaagaagatctaaccaaggatatggaagacccaacacctgtacccaatatagaagaagtagtacttcccaaaaatgtgaacctaaagaaagatagtgaaaatacacctgttaaaggaggaactgtagcggatctagatgagcaggatgaagaaacagtcacagcaggaggaaaggaagatgaagatcctgccaaaggtgatcagagtcgatcagttgaccttggggaagataatgtgacagagcagaccaatcacattattattcctagttatgcatcatggtttgattataactgtattcatgtgattgaacggcgtgctcttcctgagttcttcaatggaaaaaacaaatccaagactccagaaatatacttggcatatcgaaattttatgattgacacgtatcgtctaaacccccaagagtatttaactagcactgcttgtcggaggaacttgactggagatgtgtgtgctgtgatgagggtccatgcctttttagagcagtggggactcgttaattaccaagttgacccggaaagtagacccatggcaatgggacctcctcctactcctcattttaatgtattagctgataccccctctgggcttgtgcctctgcatcttcgatcacctcaggttcctgctgctcaacagatgctaaattttcctgagaaaaacaaggaaaaaccagttgatttgcagaactttggtctccgtactgacatttactccaagaaaacattagcaaagagtaaaggtgctagtgctggaagagaatggactgaacaggagacccttctactcctggaggccctggagatgtacaaggatgattggaacaaagtgtcggaacatgttggaagtcgtactcaggatgaatgcatcctccactttttgagacttcccattgaggacccataccttgagaattcagatgcttcccttgggcctttggcctaccagcctgtccccttcagtcagtcaggaaatccagttatgagtactgttgcttttttggcatctgtggtggaccctcgcgtggcatctgctgcagcaaaagcggctttggaggagttttctcgggtccgggaggaggtaccactggaattggttgaagctcatgtcaagaaagtacaagaagcagcacgagcctctgggaaagtggatcccacctacggtctggagagcagctgcattgcaggcacagggcccgatgagccagagaagcttgggtctccaactgaattccttgaagagaaaatggcctaccaggaatacccaaatagccagaactggccagaagataccaacttttgtttccaacctgagcaagtggtcgatcctatccagactgatccctttaagatgtaccatgatgatgacctggcagatttggtctttccctccagtgcgacagctgatacttcaatatttgcaggacaaaatgatcccttgaaagacagttacggtatgtctccctgcaacacagctgttgtacctcaggggtggtctgtggaagccttaaactctccacactcagagtcctttgtttccccagaggctgttgcagaacctcctcagccaacggcagttcccttagagctagccaaggagatagaaatggcatcagaagagaggccaccagcacaagcattggaaataatgatgggactgaagactactgacatggcaccatctaaagaaacagagatggccctcgccaaggacatggcactagctacaaaaaccgaggtggcattggctaaagatatggaatcacccaccaaattagatgtgacactggccaaggacatgcagccatccatggaatcagatatggccctagtcaaggacatggaactacccacagaaaaagaagtggccctggttaaggatgtcagatggcccacagaaacagatgtatcttcagccaagaatgtggtactgcccacagaaacagaggtagccccagccaaggatgtgacactgttgaaagaaacagagagggcatctcctataaaaatggacttagccccttccaaggacatgggaccacccaaagaaaacaagaaagaaacagagagggcatctcctataaaaatggacttggctccttccaaggacatgggaccacccaaagaaaacaagatagtcccagccaaggatttggtattactctcagaaatagaggtggcacaggctaatgacattatatcatccacagaaatatcctctgctgagaaggtggctttgtcctcagaaacagaggtagccctggccagggacatgacactgcccccggaaaccaacgtgatcttgaccaaggataaagcactacctttagaagcagaggtggccccagtcaaggacatggctcaactcccagaaacagaaatagccccggccaaggatgtggctccgtccacagtaaaagaagtgggcttgttgaaggacatgtctccactatcagaaacagaaatggctctgggcaaggatgtgactccacctccagaaacagaagtagttctcatcaagaacgtatgtctgcctccagaaatggaggtggccctgactgaggatcaggtcccagccctcaaaacagaagcacccctggctaaggatggggttctgaccctggccaacaatgtgactccagccaaagatgttccaccactctcagaaacagaggcaacaccagttccaattaaagacatggaaattgcacaaacacaaaaaggaataagtgaggattcccatttagaatctctgcaggatgtggggcagtcagctgcacctactttcatgatttcaccagaaaccgtcacaggaacggggaaaaagtgcagcttgccggccgaggaggattctgtgttagaaaaactaggggaaaggaaaccatgcaacagtcaaccttctgagctttcttcagagacctcaggaatagccaggccagaagaaggaaggcctgtggtgagtgggacaggaaatgacatcaccaccccaccgaacaaggagctcccaccaagcccagagaagaaaacaaagcctttggccaccactcaacctgcaaagacttcaacatcgaaagccaaaacacagcccacttctctccctaagcagccagctcccaccaccattggtgggttgaataaaaaacccatgagccttgcttcaggcttagtgccagctgccccacccaaacgccctgccgtcgcctctgccaggccttccatcttaccttcaaaagacgtgaagccaaagcccattgcagatgcaaaggctcctgagaagcgggcctcaccatccaagccagcttctgccccagcctccagatctgggtccaagagcactcagactgttgcaaaaaccacaacagctgctgctgttgcctcaactggcccaagcagtaggagcccctccacgctcctgcccaagaagcccactgccattaagactgagggaaaacctgcagaagtcaagaagatgactgcaaagtctgtaccagctgacttgagtcgcccaaagagcacctccaccagttccatgaagaaaaccaccactctcagtgggacagcccccgctgcaggggtggttcccagccgagtcaaggccacacccatgccctcccggccctccacaactcctttcatagacaagaagcccacctcggccaaacccagctccaccaccccccggctcagccgcctggccaccaatacttctgctcctgatctgaagaatgtccgctccaaggttggctccacggaaaacatcaagcatcagcctggaggaggccgggccaaagtagagaaaaaaacagaggcagctgctacaacccgaaagcctgaatctaatgcagtcactaaaacagccggcccaattgcaagtgcacagaaacaacctgcggggaaagtccagatagtctccaaaaaagtgagctacagccatattcagtccaagtgtggttccaaggacaatattaagcatgtccctggaggtggtaatgttcagattcagaacaagaaagtggacatctctaaggtctcctccaagtgtgggtctaaggctaacatcaagcacaagcctggtggaggagatgtcaagattgaaagtcagaagttgaacttcaaggagaaggcccaggccaaggtgggatccctcgataatgtgggccacctacctgcaggaggtgctgtgaagactgagggcggtggcagcgaggctcctctgtgtccgggtccccctgctggggaggagccggccatctctgaggcagcgcctgaagctggcgcccccacttcagccagtggcctcaatggccaccccaccctgtcagggggtggtgaccaaagggaggcccagaccttggacagccagatccaggagacaagcatctaatgatgacattctggtctcgtcttccgtctcccccgtgttcccctcttgtctcccctgttcccctctcccttccctcctcccatgtcactgcagattgagacctacaggctgacgttccgggcaaatgccagggcccgcaccgaccacggggccgacattgtctcccgccccccacacttccctggcggccccaactcgggctcccgggtccttggccccctttcccgggctgtccactagaccagtgagcgcttgggcgccgtgctgggcagcccgctaggctcgccttccctcctgctttgcgtgcccggggcagcagcagccctgccccacacctcctctcactccccagcctgggcccatctccctgctttggtcttgccccatcactgcgccactgctccgtggaggaggttgggagggggttggggtggttgaggctaagttgggatctaggagaggagaaccagattctatcctcatctttttttggttctttggtccaaacccaaaagaaactgacatgccctcccttctccctggatctacctggagggaagagtggaggtggattccgagtggtgacaggacgctgaccgtggagcttaagccactgcctctccctctggtcccacaaatgggcgcccccccctccccatgcaggtggtgtcgggcccttcttgctgccctgccccaagttgggggtcagtgctgcctgtccccatgcttaacatacccgcctagctgctgtcacatttttcttgttttgtccttttatttttttctaataacctaaaaactggcaaaatagttctgcaggttgaagccatgtctacatgaaagtcctcagtaagtgttagagggaacagggcggagatatccttatgccacccccgctggaggatgtgggcagcttagggccctggaggcggtgcggcagggaagaggggtgcagaggctgtggctggtgagccggtcaggcacacaaggggcccttggagcgtggactggttggttttgccattttgttgtgtgtatgctgcttttcttttctaaccaagaggctggttttggcatctctgtcccattccctgggatctggtggtcagccctaggataaaaagccagggctggagaacaagaaagggccaggagatggaattccttcaggccggcacccacaccctaggacatgtaagccctcatgtccaagggagcctcatgcagatagtaggaaatcaggtctggaaatttaaaaataaaaggcatgagactaaggctatctgcttcccttatgccctgactggagaggggagggaggagaggcaaggcccacagagggcatcccagctaggccttgggatggctgcagtgaggagaaatcccgggaactgtattgacacaaagattcttattgcacttgtattttttgtattaaagtttgcatggtttctaataaaggattcaaacataagtttgtagtgaaatggcctgggagattccaagggcttctctggagggggattggctgcagtgtagatttgcctctgaggaggctgccccagacttggcctcctcatgccccctcctgacctctgcccttctctggtcctggcatccctggagaaggtaggggtcttgacctaagtttagatttgatctccatgtgcagggaggctgtcctgggcctgacaggtcctccccctttctgaggtagcagtgccttgtggaggtttgacaccatgtccctagctccccaagcacacaccaggaaactgcaggggctcacggaggaagtgctgcctgggccagggggaccagctttcctccgtagagaccatgtgcagaacacttctgctgtgccaagaacatgagggagccagtgttttgtcagcaggaagaaagggcctgctgggatgaaagtgggaaggaaacagggttgcgtagtcaggagacacctcaggggcaacagcacaggcccagagtacctgctgcctccactgcgtctgtcctggggtcatgaggatgctgaggttgacgacaggttccaggtcctttcactcctttggccaaaggttgggggtaggtggcccaagtggcgtgctctctaggtagacaacaggagtggtcagagttccctcaaaggatcctccactccagagcacctgagaaggccgggaccagaggccctgtgtgatgtgtactccgcagctgtttggggtgggacatttctgtacttctcgatttgcttatggctcagccattacctgtgtcagtccatgattctgttgtaacagttttaagagtaaataaataaagctgcctgatgtcccatcacgcag

SEQ ID NO: 1083 - DNA, 3048 bp, Homo sapiens
ctgggcggggccgggaagcggcagtggcggctacgcgcgcgggggtgcgcgcgggaacgaccgggaaacaccgcgagggccggggtgggccaggctgtggggacgacgggctgcgacgatggccgcagcggcgggcggcggcgggccggggacagcggtaggcgccacgggctcggggattgcggcggcagccgcaggcctagctgtttatcgacggaaggatgggggcccggccaccaagttttgggagagcccggagacggtgtcccagctggattcggtgcgggtctggctgggcaagcactacaagaaggttcagattcagaacaagaaagtggacatctctaaggtctcctccaagtgtgggtctaaggctaacatcaagcacaagcctggtggaggagatgtcaagattgaaagtcagaagttgaacttcaaggagaaggcccaggccaaggtgggatccctcgataatgtgggccacctacctgcaggaggtgctgtgaagactgagggcggtggcagcgaggctcctctgtgtccgggtccccctgctggggaggagccggccatctctgaggcagcgcctgaagctggcgcccccacttcagccagtggcctcaatggccaccccaccctgtcagggggtggtgaccaaagggaggcccagaccttggacagccagatccaggagacaagcatctaatgatgacattctggtctcgtcttccgtctcccccgtgttcccctcttgtctcccctgttcccctctcccttccctcctcccatgtcactgcagattgagacctacaggctgacgttccgggcaaatgccagggcccgcaccgaccacggggccgacattgtctcccgccccccacacttccctggcggccccaactcgggctcccgggtccttggccccctttcccgggctgtccactagaccagtgagcgcttgggcgccgtgctgggcagcccgctaggctcgccttccctcctgctttgcgtgcccggggcagcagcagccctgccccacacctcctctcactccccagcctgggcccatctccctgctttggtcttgccccatcactgcgccactgctccgtggaggaggttgggagggggttggggtggttgaggctaagttgggatctaggagaggagaaccagattctatcctcatctttttttggttctttggtccaaacccaaaagaaactgacatgccctcccttctccctggatctacctggagggaagagtggaggtggattccgagtggtgacaggacgctgaccgtggagcttaagccactgcctctccctctggtcccacaaatgggcgcccccccctccccatgcaggtggtgtcgggcccttcttgctgccctgccccaagttgggggtcagtgctgcctgtccccatgcttaacatacccgcctagctgctgtcacatttttcttgttttgtccttttatttttttctaataacctaaaaactggcaaaatagttctgcaggttgaagccatgtctacatgaaagtcctcagtaagtgttagagggaacagggcggagatatccttatgccacccccgctggaggatgtgggcagcttagggccctggaggcggtgcggcagggaagaggggtgcagaggctgtggctggtgagccggtcaggcacacaaggggcccttggagcgtggactggttggttttgccattttgttgtgtgtatgctgcttttcttttctaaccaagaggctggttttggcatctctgtcccattccctgggatctggtggtcagccctaggataaaaagccagggctggagaacaagaaagggccaggagatggaattccttcaggccggcacccacaccctaggacatgtaagccctcatgtccaagggagcctcatgcagatagtaggaaatcaggtctggaaatttaaaaataaaaggcatgagactaaggctatctgcttcccttatgccctgactggagaggggagggaggagaggcaaggcccacagagggcatcccagctaggccttgggatggctgcagtgaggagaaatcccgggaactgtattgacacaaagattcttattgcacttgtattttttgtattaaagtttgcatggtttctaataaaggattcaaacataagtttgtagtgaaatggcctgggagattccaagggcttctctggagggggattggctgcagtgtagatttgcctctgaggaggctgccccagacttggcctcctcatgccccctcctgacctctgcccttctctggtcctggcatccctggagaaggtaggggtcttgacctaagtttagatttgatctccatgtgcagggaggctgtcctgggcctgacaggtcctccccctttctgaggtagcagtgccttgtggaggtttgacaccatgtccctagctccccaagcacacaccaggaaactgcaggggctcacggaggaagtgctgcctgggccagggggaccagctttcctccgtagagaccatgtgcagaacacttctgctgtgccaagaacatgagggagccagtgttttgtcagcaggaagaaagggcctgctgggatgaaagtgggaaggaaacagggttgcgtagtcaggagacacctcaggggcaacagcacaggcccagagtacctgctgcctccactgcgtctgtcctggggtcatgaggatgctgaggttgacgacaggttccaggtcctttcactcctttggccaaaggttgggggtaggtggcccaagtggcgtgctctctaggtagacaacaggagtggtcagagttccctcaaaggatcctccactccagagcacctgagaaggccgggaccagaggccctgtgtgatgtgtactccgcagctgtttggggtgggacatttctgtacttctcgatttgcttatggctcagccattacctgtgtcagtccatgattctgttgtaacagttttaagagtaaataaataaagctgcctgatgtcccatcacgcag

SEQ ID NO: 1084 - DNA, 5504 bp, Homo sapiens
ctgggcggggccgggaagcggcagtggcggctacgcgcgcgggggtgcgcgcgggaacgaccgggaaacaccgcgagggccggggtgggccaggctgtggggacgacgggctgcgacgatggccgcagcggcgggcggcggcgggccggggacagcggtaggcgccacgggctcggggattgcggcggcagccgcaggcctagctgtttatcgacggaaggatgggggcccggccaccaagttttgggagagcccggagacggtgtcccagctggattcggtgcgggtctggctgggcaagcactacaagaagtatgttcatgcggatgctcctaccaataaaacactggctgggctggtggtgcagcttcttcagttccaggaagatgcctttgggaagcatgtcaccaacccggccttcaccaaactccctgcaaagtgtttcatggatttcaaagctggaggcgccttatgtcacattcttggggctgcttacaagtataaaaatgaacagggatggcggaggtttgacctacagaacccatctcgaatggatcgtaatgtggaaatgtttatgaacattgaaaaaacattggtgcagaacaattgtttgaccagacccaacatctacctcattccagacattgatctgaagttggctaacaaattgaaagatatcatcaaacgacatcagggaacatttacggatgagaagtcaaaagcttcccaccacatttacccatattcttcctcacaagacgatgaagaatggttgagaccggtgatgagaaaagagaagcaagtgttagtgcattggggcttttacccagacagctatgatacttgggtccatagtaatgatgttgatgctgaaattgaagatccaccaattccagaaaaaccatggaaggttcatgtgaaatggattttggacactgatattttcaatgaatggatgaatgaggaggattatgaggtggatgaaaataggaagcctgtgagttttcgtcagcggatttcaaccaagaatgaagagccagtcagaagtccagaaagaagagatagaaaagcatcagctaatgctcgaaagaggaaacattcgccttcgcctccccctccgacaccaacagaatcacggaagaagagtgggaagaaaggccaagctagcctttatgggaagcgcagaagtcagaaagaggaagatgagcaagaagatctaaccaaggatatggaagacccaacacctgtacccaatatagaagaagtagtacttcccaaaaatgtgaacctaaagaaagatagtgaaaatacacctgttaaaggaggaactgtagcggatctagatgagcaggatgaagaaacagtcacagcaggaggaaaggaagatgaagatcctgccaaaggtgatcagagtcgatcagttgaccttggggaagataatgtgacagagcagaccaatcacattattattcctagttatgcatcatggtttgattataactgtattcatgtgattgaacggcgtgctcttcctgagttcttcaatggaaaaaacaaatccaagactccagaaatatacttggcatatcgaaattttatgattgacacgtatcgtctaaacccccaagagtatttaactagcactgcttgtcggaggaacttgactggagatgtgtgtgctgtgatgagggtccatgcctttttagagcagtggggactcgttaattaccaagttgacccggaaagtagacccatggcaatgggacctcctcctactcctcattttaatgtattagctgataccccctctgggcttgtgcctctgcatcttcgatcacctcaggttcctgctgctcaacagatgctaaattttcctgagaaaaacaaggaaaaaccagttgatttgcagaactttggtctccgtactgacatttactccaagaaaacattagcaaagagtaaaggtgctagtgctggaagagaatggactgaacaggagacccttctactcctggaggccctggagatgtacaaggatgattggaacaaagtgtcggaacatgttggaagtcgtactcaggatgaatgcatcctccactttttgagacttcccattgaggacccataccttgagaattcagatgcttcccttgggcctttggcctaccagcctgtccccttcagtcagtcaggaaatccagttatgagtactgttgcttttttggcatctgtggtggaccctcgcgtggcatctgctgcagcaaaagcggctttggaggagttttctcgggtccgggaggaggtaccactggaattggttgaagctcatgtcaagaaagtacaagaagcagcacgagcctctgggaaagtggatcccacctacggtctggagagcagctgcattgcaggcacagggcccgatgagccagagaagcttgggtctccaactgaattccttgaagagaaaatggcctaccaggaatacccaaatagccagaactggccagaagataccaacttttgtttccaacctgagcaagtggtcgatcctatccagactgatccctttaagatgtaccatgatgatgacctggcagatttggtctttccctccagtgcgacagctgatacttcaatatttgcaggacaaaatgatcccttgaaagacagttacggtatgtctccctgcaacacagctgttgtacctcaggggtggtctgtggaagccttaaactctccacactcagagtcctttgtttccccagaggctgttgcagaacctcctcagccaacggcagttcccttagagctagccaaggagatagaaatggcatcagaagagaggccaccagcacaagcattggaaataatgatgggactgaagactactgacatggcaccatctaaagaaacagagatggccctcgccaaggacatggcactagctacaaaaaccgaggtggcattggctaaagatatggaatcacccaccaaattagatgtgacactggccaaggacatgcagccatccatggaatcagatatggccctagtcaaggacatggaactacccacagaaaaagaagtggccctggttaaggatgtcagatggcccacagaaacagatgtatcttcagccaagaatgtggtactgcccacagaaacagaggtagccccagccaaggatgtgacactgttgaaagaaacagagagggcatctcctataaaaatggacttagccccttccaaggacatgggaccacccaaagaaaacaagaaagaaacagagagggcatctcctataaaaatggacttggctccttccaaggacatgggaccacccaaagaaaacaagatagtcccagccaaggatttggtattactctcagaaatagaggtggcacaggctaatgacattatatcatccacagaaatatcctctgctgagaaggtggctttgtcctcagaaacagaggtagccctggccagggacatgacactgcccccggaaaccaacgtgatcttgaccaaggataaagcactacctttagaagcagaggtggccccagtcaaggacatggctcaactcccagaaacagaaatagccccggccaaggatgtggctccgtccacagtaaaagaagtgggcttgttgaaggacatgtctccactatcagaaacagaaatggctctgggcaaggatgtgactccacctccagaaacagaagtagttctcatcaagaacgtatgtctgcctccagaaatggaggtggccctgactgaggatcaggtcccagccctcaaaacagaagcacccctggctaaggatggggttctgaccctggccaacaatgtgactccagccaaagatgttccaccactctcagaaacagaggcaacaccagttccaattaaagacatggaaattgcacaaacacaaaaaggaataagtgaggattcccatttagaatctctgcaggatgtggggcagtcagctgcacctactttcatgatttcaccagaaaccgtcacaggaacggggaaaaagtgcagcttgccggccgaggaggattctgtgttagaaaaactaggggaaaggaaaccatgcaacagtcaaccttctgagctttcttcagagacctcagccaacttcatgtattgcggtacccctcccacacaagccaaacaagtttgcagacccagtgaccgcaggtcaacccggcccaagcctgccagggtccctcctgagctgctgggaggctctcctccatggaagactcttgatcacaggctgggccactgctctttgtctgagtcaggttgggtctctggttcatcctcctgtggtgggcctgggaaccaaagaaaaagtattcatgttgactcacttgaaccccagagggatcttggcagggaggcctgggatatagaaagcacaccaataatgatgaagaaaaagaagaagaaaccaaagcaaaagagatattctcaaccacgggctggaggaccttcggatgatgacaatgcagataagcctaaaggtcatccatttgcagctgacacacaaaaatcaggtgttctccccagccagcctaccactatgggtacagaatatggacttgtatctggagaaaacttgaaaagggaatgtttagttaactccagtgcagccagactggtagctgagaactttgtctcagagagtctcagaattcctttatatccttctgaagaagcccccaaaactgcaataagttctcagtctaagctgagagtagaggaagagagcaaaagtaacaagtcagtactacaaaaccaagacaagaaattgctgaagcaacatgaatacaaaccacagcctgcaccccacctgaagactcctgtagataaaagccagtcagtaggccctctcaatctgaaaggacccctagcagaagtttctgcatacaatgtagaaacccctttggatatcagacttaaagagggttgctctcctttcttggaccaagaggttatgggtgtagtttcaaaacccacagcagcaaaagaaataccaaatttggtacccactttgatagcaagtaatccattagaatgtaatctaaaagaagggaataatgaaagtaaaatgactaaactgcagaatgtcaaactgaaggagtttcctgaaggagctgaagaggataaagaactaaaaaaggaagcttttcccaacgaaagacaagagatcagcatctttacttctgagcagctgcagggccaagtgttggtacaggtccctggggtagagaatgaaccatttaagagaatggcaggtgatggcaaaagcaggaagggaaggggaagttctgggaaaatgagaacagattctgggaaggtaaaagcaaaatctgagctgccatttcttctggacagccagaaggacggaagggctgttctcataccgagtgagccagtctctaaaactgaaggaatgactactcaggataagagtgaggagctgg

SEQ ID NO: 1085 - DNA, 7947 bp, Homo sapiens
ctgggcggggccgggaagcggcagtggcggctacgcgcgcgggggtgcgcgcgggaacgaccgggaaacaccgcgagggccggggtgggccaggctgtggggacgacgggctgcgacgatggccgcagcggcgggcggcggcgggccggggacagcggtaggcgccacgggctcggggattgcggcggcagccgcaggcctagctgtttatcgacggaaggatgggggcccggccaccaagttttgggagagcccggagacggtgtcccagctggattcggtgcgggtctggctgggcaagcactacaagaagtatgttcatgcggatgctcctaccaataaaacactggctgggctggtggtgcagcttcttcagttccaggaagatgcctttgggaagcatgtcaccaacccggccttcaccaaactccctgcaaagtgtttcatggatttcaaagctggaggcgccttatgtcacattcttggggctgcttacaagtataaaaatgaacagggatggcggaggtttgacctacagaacccatctcgaatggatcgtaatgtggaaatgtttatgaacattgaaaaaacattggtgcagaacaattgtttgaccagacccaacatctacctcattccagacattgatctgaagttggctaacaaattgaaagatatcatcaaacgacatcagggaacatttacggatgagaagtcaaaagcttcccaccacatttacccatattcttcctcacaagacgatgaagaatggttgagaccggtgatgagaaaagagaagcaagtgttagtgcattggggcttttacccagacagctatgatacttgggtccatagtaatgatgttgatgctgaaattgaagatccaccaattccagaaaaaccatggaaggttcatgtgaaatggattttggacactgatattttcaatgaatggatgaatgaggaggattatgaggtggatgaaaataggaagcctgtgagttttcgtcagcggatttcaaccaagaatgaagagccagtcagaagtccagaaagaagagatagaaaagcatcagctaatgctcgaaagaggaaacattcgccttcgcctccccctccgacaccaacagaatcacggaagaagagtgggaagaaaggccaagctagcctttatgggaagcgcagaagtcagaaagaggaagatgagcaagaagatctaaccaaggatatggaagacccaacacctgtacccaatatagaagaagtagtacttcccaaaaatgtgaacctaaagaaagatagtgaaaatacacctgttaaaggaggaactgtagcggatctagatgagcaggatgaagaaacagtcacagcaggaggaaaggaagatgaagatcctgccaaaggtgatcagagtcgatcagttgaccttggggaagataatgtgacagagcagaccaatcacattattattcctagttatgcatcatggtttgattataactgtattcatgtgattgaacggcgtgctcttcctgagttcttcaatggaaaaaacaaatccaagactccagaaatatacttggcatatcgaaattttatgattgacacgtatcgtctaaacccccaagagtatttaactagcactgcttgtcggaggaacttgactggagatgtgtgtgctgtgatgagggtccatgcctttttagagcagtggggactcgttaattaccaagttgacccggaaagtagacccatggcaatgggacctcctcctactcctcattttaatgtattagctgataccccctctgggcttgtgcctctgcatcttcgatcacctcaggttcctgctgctcaacagatgctaaattttcctgagaaaaacaaggaaaaaccagttgatttgcagaactttggtctccgtactgacatttactccaagaaaacattagcaaagagtaaaggtgctagtgctggaagagaatggactgaacaggagacccttctactcctggaggccctggagatgtacaaggatgattggaacaaagtgtcggaacatgttggaagtcgtactcaggatgaatgcatcctccactttttgagacttcccattgaggacccataccttgagaattcagatgcttcccttgggcctttggcctaccagcctgtccccttcagtcagtcaggaaatccagttatgagtactgttgcttttttggcatctgtggtggaccctcgcgtggcatctgctgcagcaaaagcggctttggaggagttttctcgggtccgggaggaggtaccactggaattggttgaagctcatgtcaagaaagtacaagaagcagcacgagcctctgggaaagtggatcccacctacggtctggagagcagctgcattgcaggcacagggcccgatgagccagagaagcttgggtctccaactgaattccttgaagagaaaatggcctaccaggaatacccaaatagccagaactggccagaagataccaacttttgtttccaacctgagcaagtggtcgatcctatccagactgatccctttaagatgtaccatgatgatgacctggcagatttggtctttccctccagtgcgacagctgatacttcaatatttgcaggacaaaatgatcccttgaaagacagttacggtatgtctccctgcaacacagctgttgtacctcaggggtggtctgtggaagccttaaactctccacactcagagtcctttgtttccccagaggctgttgcagaacctcctcagccaacggcagttcccttagagctagccaaggagatagaaatggcatcagaagagaggccaccagcacaagcattggaaataatgatgggactgaagactactgacatggcaccatctaaagaaacagagatggccctcgccaaggacatggcactagctacaaaaaccgaggtggcattggctaaagatatggaatcacccaccaaattagatgtgacactggccaaggacatgcagccatccatggaatcagatatggccctagtcaaggacatggaactacccacagaaaaagaagtggccctggttaaggatgtcagatggcccacagaaacagatgtatcttcagccaagaatgtggtactgcccacagaaacagaggtagccccagccaaggatgtgacactgttgaaagaaacagagagggcatctcctataaaaatggacttagccccttccaaggacatgggaccacccaaagaaaacaagaaagaaacagagagggcatctcctataaaaatggacttggctccttccaaggacatgggaccacccaaagaaaacaagatagtcccagccaaggatttggtattactctcagaaatagaggtggcacaggctaatgacattatatcatccacagaaatatcctctgctgagaaggtggctttgtcctcagaaacagaggtagccctggccagggacatgacactgcccccggaaaccaacgtgatcttgaccaaggataaagcactacctttagaagcagaggtggccccagtcaaggacatggctcaactcccagaaacagaaatagccccggccaaggatgtggctccgtccacagtaaaagaagtgggcttgttgaaggacatgtctccactatcagaaacagaaatggctctgggcaaggatgtgactccacctccagaaacagaagtagttctcatcaagaacgtatgtctgcctccagaaatggaggtggccctgactgaggatcaggtcccagccctcaaaacagaagcacccctggctaaggatggggttctgaccctggccaacaatgtgactccagccaaagatgttccaccactctcagaaacagaggcaacaccagttccaattaaagacatggaaattgcacaaacacaaaaaggaataagtgaggattcccatttagaatctctgcaggatgtggggcagtcagctgcacctactttcatgatttcaccagaaaccgtcacaggaacggggaaaaagtgcagcttgccggccgaggaggattctgtgttagaaaaactaggggaaaggaaaccatgcaacagtcaaccttctgagctttcttcagagacctcaggaatagccaggccagaagaaggaaggcctgtggtgagtgggacaggaaatgacatcaccaccccaccgaacaaggagctcccaccaagcccagagaagaaaacaaagcctttggccaccactcaacctgcaaagacttcaacatcgaaagccaaaacacagcccacttctctccctaagcagccagctcccaccaccattggtgggttgaataaaaaacccatgagccttgcttcaggcttagtgccagctgccccacccaaacgccctgccgtcgcctctgccaggccttccatcttaccttcaaaagacgtgaagccaaagcccattgcagatgcaaaggctcctgagaagcgggcctcaccatccaagccagcttctgccccagcctccagatctgggtccaagagcactcagactgttgcaaaaaccacaacagctgctgctgttgcctcaactggcccaagcagtaggagcccctccacgctcctgcccaagaagcccactgccattaagactgagggaaaacctgcagaagtcaagaagatgactgcaaagtctgtaccagctgacttgagtcgcccaaagagcacctccaccagttccatgaagaaaaccaccactctcagtgggacagcccccgctgcaggggtggttcccagccgagtcaaggccacacccatgccctcccggccctccacaactcctttcatagacaagaagcccacctcggccaaacccagctccaccaccccccggctcagccgcctggccaccaatacttctgctcctgatctgaagaatgtccgctccaaggttggctccacggaaaacatcaagcatcagcctggaggaggccgggccaaagtagagaaaaaaacagaggcagctgctacaacccgaaagcctgaatctaatgcagtcactaaaacagccggcccaattgcaagtgcacagaaacaacctgcggggaaagtccagatagtctccaaaaaagtgagctacagccatattcagtccaagtgtggttccaaggacaatattaagcatgtccctggaggtggtaatgttcagattcagaacaagaaagtggacatctctaaggtctcctccaagtgtgggtctaaggctaacatcaagcacaagcctggtggaggagatgtcaagattgaaagtcagaagttgaacttcaaggagaaggcccaggccaaggtgggatccctcgataatgtgggccacctacctgcaggaggtgctgtgaagactgagggcggtggcagcgaggctcctctgtgtccgggtccccctgctggggaggagccggccatctctgaggcagcgcctgaagctggcgcccccacttcagccagtggcctcaatggccaccccaccctgtcagggggtggtgaccaaagggaggcccagaccttggacagccagatccaggagacaagcatctaatgatgacattctggtctcgtcttccgtctcccccgtgttcccctcttgtctcccctgttcccctctcccttccctcctcccatgtcactgcagattgagacctacaggctgacgttccgggcaaatgccagggcccgcaccgaccacggggccgacattgtctcccgccccccacacttccctggcggccccaactcgggctcccgggtccttggccccctttcccgggctgtccactagaccagtgagcgcttgggcgccgtgctgggcagcccgctaggctcgccttccctcctgctttgcgtgcccggggcagcagcagccctgccccacacctcctctcactccccagcctgggcccatctccctgctttggtcttgccccatcactgcgccactgctccgtggaggaggttgggagggggttggggtggttgaggctaagttgggatctaggagaggagaaccagattctatcctcatctttttttggttctttggtccaaacccaaaagaaactgacatgccctcccttctccctggatctacctggagggaagagtggaggtggattccgagtggtgacaggacgctgaccgtggagcttaagccactgcctctccctctggtcccacaaatgggcgcccccccctccccatgcaggtggtgtcgggcccttcttgctgccctgccccaagttgggggtcagtgctgcctgtccccatgcttaacatacccgcctagctgctgtcacatttttcttgttttgtccttttatttttttctaataacctaaaaactggcaaaatagttctgcaggttgaagccatgtctacatgaaagtcctcagtaagtgttagagggaacagggcggagatatccttatgccacccccgctggaggatgtgggcagcttagggccctggaggcggtgcggcagggaagaggggtgcagaggctgtggctggtgagccggtcaggcacacaaggggcccttggagcgtggactggttggttttgccattttgttgtgtgtatgctgcttttcttttctaaccaagaggctggttttggcatctctgtcccattccctgggatctggtggtcagccctaggataaaaagccagggctggagaacaagaaagggccaggagatggaattccttcaggccggcacccacaccctaggacatgtaagccctcatgtccaagggagcctcatgcagatagtaggaaatcaggtctggaaatttaaaaataaaaggcatgagactaaggctatctgcttcccttatgccctgactggagaggggagggaggagaggcaaggcccacagagggcatcccagctaggccttgggatggctgcagtgaggagaaatcccgggaactgtattgacacaaagattcttattgcacttgtattttttgtattaaagtttgcatggtttctaataaaggattcaaacataagtttgtagtgaaatggcctgggagattccaagggcttctctggagggggattggctgcagtgtagatttgcctctgaggaggctgccccagacttggcctcctcatgccccctcctgacctctgcccttctctggtcctggcatccctggagaaggtaggggtcttgacctaagtttagatttgatctccatgtgcagggaggctgtcctgggcctgacaggtcctccccctttctgaggtagcagtgccttgtggaggtttgacaccatgtccctagctccccaagcacacaccaggaaactgcaggggctcacggaggaagtgctgcctgggccagggggaccagctttcctccgtagagaccatgtgcagaacacttctgctgtgccaagaacatgagggagccagtgttttgtcagcaggaagaaagggcctgctgggatgaaagtgggaaggaaacagggttgcgtagtcaggagacacctcaggggcaacagcacaggcccagagtacctgctgcctccactgcgtctgtcctggggtcatgaggatgctgaggttgacgacaggttccaggtcctttcactcctttggccaaaggttgggggtaggtggcccaagtggcgtgctctctaggtagacaacaggagtggtcagagttccctcaaaggatcctccactccagagcacctgagaaggccgggaccagaggccctgtgtgatgtgtactccgcagctgtttggggtgggacatttctgtacttctcgatttgcttatggctcagccattacctgtgtcagtccatgattctgttgtaacagttttaagagtaaataaataaagctgcctgatgtcccatcacgcag

SEQ ID NO: 1086 - DNA, 7656 bp, Homo sapiens
ctgggcggggccgggaagcggcagtggcggctacgcgcgcgggggtgcgcgcgggaacgaccgggaaacaccgcgagggccggggtgggccaggctgtggggacgacgggctgcgacgatggccgcagcggcgggcggcggcgggccggggacagcggtaggcgccacgggctcggggattgcggcggcagccgcaggcctagctgtttatcgacggaaggatgggggcccggccaccaagttttgggagagcccggagacggtgtcccagctggattcggtgcgggtctggctgggcaagcactacaagaagtatgttcatgcggatgctcctaccaataaaacactggctgggctggtggtgcagcttcttcagttccaggaagatgcctttgggaagcatgtcaccaacccggccttcaccaaactccctgcaaagtgtttcatggatttcaaagctggaggcgccttatgtcacattcttggggctgcttacaagtataaaaatgaacagggatggcggaggtttgacctacagaacccatctcgaatggatcgtaatgtggaaatgtttatgaacattgaaaaaacattggtgcagaacaattgtttgaccagacccaacatctacctcattccagacattgatctgaagttggctaacaaattgaaagatatcatcaaacgacatcagggaacatttacggatgagaagtcaaaagcttcccaccacatttacccatattcttcctcacaagacgatgaagaatggttgagaccggtgatgagaaaagagaagcaagtgttagtgcattggggcttttacccagacagctatgatacttgggtccatagtaatgatgttgatgctgaaattgaagatccaccaattccagaaaaaccatggaaggttcatgtgaaatggattttggacactgatattttcaatgaatggatgaatgaggaggattatgaggtggatgaaaataggaagcctgtgagttttcgtcagcggatttcaaccaagaatgaagagccagtcagaagtccagaaagaagagatagaaaagcatcagctaatgctcgaaagaggaaacattcgccttcgcctccccctccgacaccaacagaatcacggaagaagagtgggaagaaaggccaagctagcctttatgggaagcgcagaagtcagaaagaggaagatgagcaagaagatctaaccaaggatatggaagacccaacacctgtacccaatatagaagaagtagtacttcccaaaaatgtgaacctaaagaaagatagtgaaaatacacctgttaaaggaggaactgtagcggatctagatgagcaggatgaagaaacagtcacagcaggaggaaaggaagatgaagatcctgccaaaggtgatcagagtcgatcagttgaccttggggaagataatgtgacagagcagaccaatcacattattattcctagttatgcatcatggtttgattataactgtattcatgtgattgaacggcgtgctcttcctgagttcttcaatggaaaaaacaaatccaagactccagaaatatacttggcatatcgaaattttatgattgacacgtatcgtctaaacccccaagagtatttaactagcactgcttgtcggaggaacttgactggagatgtgtgtgctgtgatgagggtccatgcctttttagagcagtggggactcgttaattaccaagttgacccggaaagtagacccatggcaatgggacctcctcctactcctcattttaatgtattagctgataccccctctgggcttgtgcctctgcatcttcgatcacctcaggttcctgctgctcaacagatgctaaattttcctgagaaaaacaaggaaaaaccagttgatttgcagaactttggtctccgtactgacatttactccaagaaaacattagcaaagagtaaaggtgctagtgctggaagagaatggactgaacaggagacccttctactcctggaggccctggagatgtacaaggatgattggaacaaagtgtcggaacatgttggaagtcgtactcaggatgaatgcatcctccactttttgagacttcccattgaggacccataccttgagaattcagatgcttcccttgggcctttggcctaccagcctgtccccttcagtcagtcaggaaatccagttatgagtactgttgcttttttggcatctgtggtggaccctcgcgtggcatctgctgcagcaaaagcggctttggaggagttttctcgggtccgggaggaggtaccactggaattggttgaagctcatgtcaagaaagtacaagaagcagcacgagcctctgggaaagtggatcccacctacggtctggagagcagctgcattgcaggcacagggcccgatgagccagagaagcttgggtctccaactgaattccttgaagagaaaatggcctaccaggaatacccaaatagccagaactggccagaagataccaacttttgtttccaacctgagcaagtggtcgatcctatccagactgatccctttaagatgtaccatgatgatgacctggcagatttggtctttccctccagtgcgacagctgatacttcaatatttgcaggacaaaatgatcccttgaaagacagttacggtatgtctccctgcaacacagctgttgtacctcaggggtggtctgtggaagccttaaactctccacactcagagtcctttgtttccccagaggctgttgcagaacctcctcagccaacggcagttcccttagagctagccaaggagatagaaatggcatcagaagagaggccaccagcacaagcattggaaataatgatgggactgaagactactgacatggcaccatctaaagaaacagagatggccctcgccaaggacatggcactagctacaaaaaccgaggtggcattggctaaagatatggaatcacccaccaaattagatgtgacactggccaaggacatgcagccatccatggaatcagatatggccctagtcaaggacatggaactacccacagaaaaagaagtggccctggttaaggatgtcagatggcccacagaaacagatgtatcttcagccaagaatgtggtactgcccacagaaacagaggtagccccagccaaggatgtgacactgttgaaagaaacagagagggcatctcctataaaaatggacttagccccttccaaggacatgggaccacccaaagaaaacaagaaagaaacagagagggcatctcctataaaaatggacttggctccttccaaggacatgggaccacccaaagaaaacaagatagtcccagccaaggatttggtattactctcagaaatagaggtggcacaggctaatgacattatatcatccacagaaatatcctctgctgagaaggtggctttgtcctcagaaacagaggtagccctggccagggacatgacactgcccccggaaaccaacgtgatcttgaccaaggataaagcactacctttagaagcagaggtggccccagtcaaggacatggctcaactcccagaaacagaaatagccccggccaaggatgtggctccgtccacagtaaaagaagtgggcttgttgaaggacatgtctccactatcagaaacagaaatggctctgggcaaggatgtgactccacctccagaaacagaagtagttctcatcaagaacgtatgtctgcctccagaaatggaggtggccctgactgaggatcaggtcccagccctcaaaacagaagcacccctggctaaggatggggttctgaccctggccaacaatgtgactccagccaaagatgttccaccactctcagaaacagaggcaacaccagttccaattaaagacatggaaattgcacaaacacaaaaaggaataagtgaggattcccatttagaatctctgcaggatgtggggcagtcagctgcacctactttcatgatttcaccagaaaccgtcacaggaacggggaaaaagtgcagcttgccggccgaggaggattctgtgttagaaaaactaggggaaaggaaaccatgcaacagtcaaccttctgagctttcttcagagacctcaggaatagccaggccagaagaaggaaggcctgtggtgagtgggacaggaaatgacatcaccaccccaccgaacaaggagctcccaccaagcccagagaagaaaacaaagcctttggccaccactcaacctgcaaagacttcaacatcgaaagccaaaacacagcccacttctctccctaagcagccagctcccaccaccattggtgggttgaataaaaaacccatgagccttgcttcaggcttagtgccagctgccccacccaaacgccctgccgtcgcctctgccaggccttccatcttaccttcaaaagacgtgaagccaaagcccattgcagatgcaaaggctcctgagaagcgggcctcaccatccaagccagcttctgccccagcctccagatctgggtccaagagcactcagactgttgcaaaaaccacaacagctgctgctgttgcctcaactggcccaagcagtaggagcccctccacgctcctgcccaagaagcccactgccattaagactgagggaaaacctgcagaagtcaagaagatgactgcaaagtctgtaccagctgacttgagtcgcccaaagagcacctccaccagttccatgaagaaaaccaccactctcagtgggacagcccccgctgcaggggtggttcccagccgagtcaaggccacacccatgccctcccggccctccacaactcctttcatagacaagaagcccacctcggccaaacccagctccaccaccccccggctcagccgcctggccaccaatacttctgctcctgatctgaagaatgtccgctccaaggttggctccacggaaaacatcaagcatcagcctggaggaggccgggccaaagtagagaaaaaaacagaggcagctgctacaacccgaaagcctgaatctaatgcagtcactaaaacagccggcccaattgcaagtgcacagaaacaacctgcggggaaagtccagatagtctccaaaaaagtgagctacagccatattcagtccaagtgtggttccaaggacaatattaagcatgtccctggaggtggtaatgttcagattcagaacaagaaagtggacatctctaaggtctcctccaagtgtgggtctaaggctaacatcaagcacaagcctggtggaggagatgtcaagattgaaagtcagaagttgaacttcaaggagaaggcccaggccaaggtgggatccctcgataatgtgggccacctacctgcaggaggtgctgtgaagattgagacctacaggctgacgttccgggcaaatgccagggcccgcaccgaccacggggccgacattgtctcccgccccccacacttccctggcggccccaactcgggctcccgggtccttggccccctttcccgggctgtccactagaccagtgagcgcttgggcgccgtgctgggcagcccgctaggctcgccttccctcctgctttgcgtgcccggggcagcagcagccctgccccacacctcctctcactccccagcctgggcccatctccctgctttggtcttgccccatcactgcgccactgctccgtggaggaggttgggagggggttggggtggttgaggctaagttgggatctaggagaggagaaccagattctatcctcatctttttttggttctttggtccaaacccaaaagaaactgacatgccctcccttctccctggatctacctggagggaagagtggaggtggattccgagtggtgacaggacgctgaccgtggagcttaagccactgcctctccctctggtcccacaaatgggcgcccccccctccccatgcaggtggtgtcgggcccttcttgctgccctgccccaagttgggggtcagtgctgcctgtccccatgcttaacatacccgcctagctgctgtcacatttttcttgttttgtccttttatttttttctaataacctaaaaactggcaaaatagttctgcaggttgaagccatgtctacatgaaagtcctcagtaagtgttagagggaacagggcggagatatccttatgccacccccgctggaggatgtgggcagcttagggccctggaggcggtgcggcagggaagaggggtgcagaggctgtggctggtgagccggtcaggcacacaaggggcccttggagcgtggactggttggttttgccattttgttgtgtgtatgctgcttttcttttctaaccaagaggctggttttggcatctctgtcccattccctgggatctggtggtcagccctaggataaaaagccagggctggagaacaagaaagggccaggagatggaattccttcaggccggcacccacaccctaggacatgtaagccctcatgtccaagggagcctcatgcagatagtaggaaatcaggtctggaaatttaaaaataaaaggcatgagactaaggctatctgcttcccttatgccctgactggagaggggagggaggagaggcaaggcccacagagggcatcccagctaggccttgggatggctgcagtgaggagaaatcccgggaactgtattgacacaaagattcttattgcacttgtattttttgtattaaagtttgcatggtttctaataaaggattcaaacataagtttgtagtgaaatggcctgggagattccaagggcttctctggagggggattggctgcagtgtagatttgcctctgaggaggctgccccagacttggcctcctcatgccccctcctgacctctgcccttctctggtcctggcatccctggagaaggtaggggtcttgacctaagtttagatttgatctccatgtgcagggaggctgtcctgggcctgacaggtcctccccctttctgaggtagcagtgccttgtggaggtttgacaccatgtccctagctccccaagcacacaccaggaaactgcaggggctcacggaggaagtgctgcctgggccagggggaccagctttcctccgtagagaccatgtgcagaacacttctgctgtgccaagaacatgagggagccagtgttttgtcagcaggaagaaagggcctgctgggatgaaagtgggaaggaaacagggttgcgtagtcaggagacacctcaggggcaacagcacaggcccagagtacctgctgcctccactgcgtctgtcctggggtcatgaggatgctgaggttgacgacaggttccaggtcctttcactcctttggccaaaggttgggggtaggtggcccaagtggcgtgctctctaggtagacaacaggagtggtcagagttccctcaaaggatcctccactccagagcacctgagaaggccgggaccagaggccctgtgtgatgtgtactccgcagctgtttggggtgggacatttctgtacttctcgatttgcttatggctcagccattacctgtgtcagtccatgattctgttgtaacagttttaagagtaaataaataaagctgcctgatgtcccatcacgcag

SEQ ID NO: 1087 - DNA, 5721 bp, Homo sapiens
aaaaaccggcgctcactagggcagaatgcagcctacggaggatggcggaagaggcggctgaggccgcaggacgtgctattccaagtatgttcatgcggatgctcctaccaataaaacactggctgggctggtggtgcagcttcttcagttccaggaagatgcctttgggaagcatgtcaccaacccggccttcaccaaactccctgcaaagtgtttcatggatttcaaagctggaggcgccttatgtcacattcttggggctgcttacaagtataaaaatgaacagggatggcggaggtttgacctacagaacccatctcgaatggatcgtaatgtggaaatgtttatgaacattgaaaaaacattggtgcagaacaattgtttgaccagacccaacatctacctcattccagacattgatctgaagttggctaacaaattgaaagatatcatcaaacgacatcagggaacatttacggatgagaagtcaaaagcttcccaccacatttacccatattcttcctcacaagacgatgaagaatggttgagaccggtgatgagaaaagagaagcaagtgttagtgcattggggcttttacccagacagctatgatacttgggtccatagtaatgatgttgatgctgaaattgaagatccaccaattccagaaaaaccatggaaggttcatgtgaaatggattttggacactgatattttcaatgaatggatgaatgaggaggattatgaggtggatgaaaataggaagcctgtgagttttcgtcagcggatttcaaccaagaatgaagagccagtcagaagtccagaaagaagagatagaaaagcatcagctaatgctcgaaagaggaaacattcgccttcgcctccccctccgacaccaacagaatcacggaagaagagtgggaagaaaggccaagctagcctttatgggaagcgcagaagtcagaaagaggaagatgagcaagaagatctaaccaaggatatggaagacccaacacctgtacccaatatagaagaagtagtacttcccaaaaatgtgaacctaaagaaagatagtgaaaatacacctgttaaaggaggaactgtagcggatctagatgagcaggatgaagaaacagtcacagcaggaggaaaggaagatgaagatcctgccaaaggtgatcagagtcgatcagttgaccttggggaagataatgtgacagagcagaccaatcacattattattcctagttatgcatcatggtttgattataactgtattcatgtgattgaacggcgtgctcttcctgagttcttcaatggaaaaaacaaatccaagactccagaaatatacttggcatatcgaaattttatgattgacacgtatcgtctaaacccccaagagtatttaactagcactgcttgtcggaggaacttgactggagatgtgtgtgctgtgatgagggtccatgcctttttagagcagtggggactcgttaattaccaagttgacccggaaagtagacccatggcaatgggacctcctcctactcctcattttaatgtattagctgataccccctctgggcttgtgcctctgcatcttcgatcacctcaggttcctgctgctcaacagatgctaaattttcctgagaaaaacaaggaaaaaccagttgatttgcagaactttggtctccgtactgacatttactccaagaaaacattagcaaagagtaaaggtgctagtgctggaagagaatggactgaacaggagacccttctactcctggaggccctggagatgtacaaggatgattggaacaaagtgtcggaacatgttggaagtcgtactcaggatgaatgcatcctccactttttgagacttcccattgaggacccataccttgagaattcagatgcttcccttgggcctttggcctaccagcctgtccccttcagtcagtcaggaaatccagttatgagtactgttgcttttttggcatctgtggtggaccctcgcgtggcatctgctgcagcaaaagcggctttggaggagttttctcgggtccgggaggaggtaccactggaattggttgaagctcatgtcaagaaagtacaagaagcagcacgagcctctgggaaagtggatcccacctacggtctggagagcagctgcattgcaggcacagggcccgatgagccagagaagcttggaatagccaggccagaagaaggaaggcctgtggtgagtgggacaggaaatgacatcaccaccccaccgaacaaggagctcccaccaagcccagagaagaaaacaaagcctttggccaccactcaacctgcaaagacttcaacatcgaaagccaaaacacagcccacttctctccctaagcagccagctcccaccaccattggtgggttgaataaaaaacccatgagccttgcttcaggcttagtgccagctgccccacccaaacgccctgccgtcgcctctgccaggccttccatcttaccttcaaaagacgtgaagccaaagcccattgcagatgcaaaggctcctgagaagcgggcctcaccatccaagccagcttctgccccagcctccagatctgggtccaagagcactcagactgttgcaaaaaccacaacagctgctgctgttgcctcaactggcccaagcagtaggagcccctccacgctcctgcccaagaagcccactgccattaagactgagggaaaacctgcagaagtcaagaagatgactgcaaagtctgtaccagctgacttgagtcgcccaaagagcacctccaccagttccatgaagaaaaccaccactctcagtgggacagcccccgctgcaggggtggttcccagccgagtcaaggccacacccatgccctcccggccctccacaactcctttcatagacaagaagcccacctcggccaaacccagctccaccaccccccggctcagccgcctggccaccaatacttctgctcctgatctgaagaatgtccgctccaaggttggctccacggaaaacatcaagcatcagcctggaggaggccgggccaaagtagagaaaaaaacagaggcagctgctacaacccgaaagcctgaatctaatgcagtcactaaaacagccggcccaattgcaagtgcacagaaacaacctgcggggaaagtccagatagtctccaaaaaagtgagctacagccatattcagtccaagtgtggttccaaggacaatattaagcatgtccctggaggtggtaatgttcagattcagaacaagaaagtggacatctctaaggtctcctccaagtgtgggtctaaggctaacatcaagcacaagcctggtggaggagatgtcaagattgaaagtcagaagttgaacttcaaggagaaggcccaggccaaggtgggatccctcgataatgtgggccacctacctgcaggaggtgctgtgaagattgagacctacaggctgacgttccgggcaaatgccagggcccgcaccgaccacggggccgacattgtctcccgccccccacacttccctggcggccccaactcgggctcccgggtccttggccccctttcccgggctgtccactagaccagtgagcgcttgggcgccgtgctgggcagcccgctaggctcgccttccctcctgctttgcgtgcccggggcagcagcagccctgccccacacctcctctcactccccagcctgggcccatctccctgctttggtcttgccccatcactgcgccactgctccgtggaggaggttgggagggggttggggtggttgaggctaagttgggatctaggagaggagaaccagattctatcctcatctttttttggttctttggtccaaacccaaaagaaactgacatgccctcccttctccctggatctacctggagggaagagtggaggtggattccgagtggtgacaggacgctgaccgtggagcttaagccactgcctctccctctggtcccacaaatgggcgcccccccctccccatgcaggtggtgtcgggcccttcttgctgccctgccccaagttgggggtcagtgctgcctgtccccatgcttaacatacccgcctagctgctgtcacatttttcttgttttgtccttttatttttttctaataacctaaaaactggcaaaatagttctgcaggttgaagccatgtctacatgaaagtcctcagtaagtgttagagggaacagggcggagatatccttatgccacccccgctggaggatgtgggcagcttagggccctggaggcggtgcggcagggaagaggggtgcagaggctgtggctggtgagccggtcaggcacacaaggggcccttggagcgtggactggttggttttgccattttgttgtgtgtatgctgcttttcttttctaaccaagaggctggttttggcatctctgtcccattccctgggatctggtggtcagccctaggataaaaagccagggctggagaacaagaaagggccaggagatggaattccttcaggccggcacccacaccctaggacatgtaagccctcatgtccaagggagcctcatgcagatagtaggaaatcaggtctggaaatttaaaaataaaaggcatgagactaaggctatctgcttcccttatgccctgactggagaggggagggaggagaggcaaggcccacagagggcatcccagctaggccttgggatggctgcagtgaggagaaatcccgggaactgtattgacacaaagattcttattgcacttgtattttttgtattaaagtttgcatggtttctaataaaggattcaaacataagtttgtagtgaaatggcctgggagattccaagggcttctctggagggggattggctgcagtgtagatttgcctctgaggaggctgccccagacttggcctcctcatgccccctcctgacctctgcccttctctggtcctggcatccctggagaaggtaggggtcttgacctaagtttagatttgatctccatgtgcagggaggctgtcctgggcctgacaggtcctccccctttctgaggtagcagtgccttgtggaggtttgacaccatgtccctagctccccaagcacacaccaggaaactgcaggggctcacggaggaagtgctgcctgggccagggggaccagctttcctccgtagagaccatgtgcagaacacttctgctgtgccaagaacatgagggagccagtgttttgtcagcaggaagaaagggcctgctgggatgaaagtgggaaggaaacagggttgcgtagtcaggagacacctcaggggcaacagcacaggcccagagtacctgctgcctccactgcgtctgtcctggggtcatgaggatgctgaggttgacgacaggttccaggtcctttcactcctttggccaaaggttgggggtaggtggcccaagtggcgtgctctctaggtagacaacaggagtggtcagagttccctcaaaggatcctccactccagagcacctgagaaggccgggaccagaggccctgtgtgatgtgtactccgcagctgtttggggtgggacatttctgtacttctcgatttgcttatggctcagccattacctgtgtcagtccatgattctgttgtaacagttttaagagtaaataaataaagctgcctgatgtcccatcacgcag

SEQ ID NO: 1088 - DNA, 5391 bp, Homo sapiens
aaaaaccggcgctcactagggcagaatgcagcctacggaggatggcggaagaggcggctgaggccgcaggacgtgctattccaagtatgttcatgcggatgctcctaccaataaaacactggctgggctggtggtgcagcttcttcagttccaggaagatgcctttgggaagcatgtcaccaacccggccttcaccaaactccctgcaaagtgtttcatggatttcaaagctggaggcgccttatgtcacattcttggggctgcttacaagtataaaaatgaacagggatggcggaggtttgacctacagaacccatctcgaatggatcgtaatgtggaaatgtttatgaacattgaaaaaacattggtgcagaacaattgtttgaccagacccaacatctacctcattccagacattgatctgaagttggctaacaaattgaaagatatcatcaaacgacatcagggaacatttacggatgagaagtcaaaagcttcccaccacatttacccatattcttcctcacaagacgatgaagaatggttgagaccggtgatgagaaaagagaagcaagtgttagtgcattggggcttttacccagacagctatgatacttgggtccatagtaatgatgttgatgctgaaattgaagatccaccaattccagaaaaaccatggaaggttcatgtgaaatggattttggacactgatattttcaatgaatggatgaatgaggaggattatgaggtggatgaaaataggaagcctgtgagttttcgtcagcggatttcaaccaagaatgaagagccagtcagaagtccagaaagaagagatagaaaagcatcagctaatgctcgaaagaggaaacattcgccttcgcctccccctccgacaccaacagaatcacggaagaagagtgggaagaaaggccaagctagcctttatgggaagcgcagaagtcagaaagaggaagatgagcaagaagatctaaccaaggatatggaagacccaacacctgtacccaatatagaagaagtagtacttcccaaaaatgtgaacctaaagaaagatagtgaaaatacacctgttaaaggaggaactgtagcggatctagatgagcaggatgaagaaacagtcacagcaggaggaaaggaagatgaagatcctgccaaaggtgatcagagtcgatcagttgaccttggggaagataatgtgacagagcagaccaatcacattattattcctagttatgcatcatggtttgattataactgtattcatgtgattgaacggcgtgctcttcctgagttcttcaatggaaaaaacaaatccaagactccagaaatatacttggcatatcgaaattttatgattgacacgtatcgtctaaacccccaagagtatttaactagcactgcttgtcggaggaacttgactggagatgtgtgtgctgtgatgagggtccatgcctttttagagcagtggggactcgttaattaccaagttgacccggaaagtagacccatggcaatgggacctcctcctactcctcattttaatgtattagctgataccccctctgggcttgtgcctctgcatcttcgatcacctcaggttcctgctgctcaacagatgctaaattttcctgagaaaaacaaggaaaaaccagttgatttgcagaactttggtctccgtactgacatttactccaagaaaacattagcaaagagtaaaggtgctagtgctggaagagaatggactgaacaggagacccttctactcctggaggccctggagatgtacaaggatgattggaacaaagtgtcggaacatgttggaagtcgtactcaggatgaatgcatcctccactttttgagacttcccattgaggacccataccttgagaattcagatgcttcccttgggcctttggcctaccagcctgtccccttcagtcagtcaggaaatccagttatgagtactgttgcttttttggcatctgtggtggaccctcgcgtggcatctgctgcagcaaaagcggctttggaggagttttctcgggtccgggaggaggtaccactggaattggttgaagctcatgtcaagaaagtacaagaagcagcacgagcctctgggaaagtggatcccacctacggtctggagagcagctgcattgcaggcacagggcccgatgagccagagaagcttggaatagccaggccagaagaaggaaggcctgtggtgagtgggacaggaaatgacatcaccaccccaccgaacaaggagctcccaccaagcccagagaagaaaacaaagcccattgcagatgcaaaggctcctgagaagcgggcctcaccatccaagccagcttctgccccagcctccagatctgggtccaagagcactcagactgttgcaaaaaccacaacagctgctgctgttgcctcaactggcccaagcagtaggagcccctccacgctcctgcccaagaagcccactgccattaagactgagggaaaacctgcagaagtcaagaagatgactgcaaagtctgtaccagctgacttgagtcgcccaaagagcacctccaccagttccatgaagaaaaccaccactctcagtgggacagcccccgctgcaggggtggttcccagccgagtcaaggccacacccatgccctcccggccctccacaactcctttcatagacaagaagcccacctcggccaaacccagctccaccaccccccggctcagccgcctggccaccaatacttctgctcctgatctgaagaatgtccgctccaaggttggctccacggaaaacatcaagcatcagcctggaggaggccgggtccagatagtctccaaaaaagtgagctacagccatattcagtccaagtgtggttccaaggacaatattaagcatgtccctggaggtggtaatgttcagattcagaacaagaaagtggacatctctaaggtctcctccaagtgtgggtctaaggctaacatcaagcacaagcctggtggaggagatgtcaagattgaaagtcagaagttgaacttcaaggagaaggcccaggccaaggtgggatccctcgataatgtgggccacctacctgcaggaggtgctgtgaagattgagacctacaggctgacgttccgggcaaatgccagggcccgcaccgaccacggggccgacattgtctcccgccccccacacttccctggcggccccaactcgggctcccgggtccttggccccctttcccgggctgtccactagaccagtgagcgcttgggcgccgtgctgggcagcccgctaggctcgccttccctcctgctttgcgtgcccggggcagcagcagccctgccccacacctcctctcactccccagcctgggcccatctccctgctttggtcttgccccatcactgcgccactgctccgtggaggaggttgggagggggttggggtggttgaggctaagttgggatctaggagaggagaaccagattctatcctcatctttttttggttctttggtccaaacccaaaagaaactgacatgccctcccttctccctggatctacctggagggaagagtggaggtggattccgagtggtgacaggacgctgaccgtggagcttaagccactgcctctccctctggtcccacaaatgggcgcccccccctccccatgcaggtggtgtcgggcccttcttgctgccctgccccaagttgggggtcagtgctgcctgtccccatgcttaacatacccgcctagctgctgtcacatttttcttgttttgtccttttatttttttctaataacctaaaaactggcaaaatagttctgcaggttgaagccatgtctacatgaaagtcctcagtaagtgttagagggaacagggcggagatatccttatgccacccccgctggaggatgtgggcagcttagggccctggaggcggtgcggcagggaagaggggtgcagaggctgtggctggtgagccggtcaggcacacaaggggcccttggagcgtggactggttggttttgccattttgttgtgtgtatgctgcttttcttttctaaccaagaggctggttttggcatctctgtcccattccctgggatctggtggtcagccctaggataaaaagccagggctggagaacaagaaagggccaggagatggaattccttcaggccggcacccacaccctaggacatgtaagccctcatgtccaagggagcctcatgcagatagtaggaaatcaggtctggaaatttaaaaataaaaggcatgagactaaggctatctgcttcccttatgccctgactggagaggggagggaggagaggcaaggcccacagagggcatcccagctaggccttgggatggctgcagtgaggagaaatcccgggaactgtattgacacaaagattcttattgcacttgtattttttgtattaaagtttgcatggtttctaataaaggattcaaacataagtttgtagtgaaatggcctgggagattccaagggcttctctggagggggattggctgcagtgtagatttgcctctgaggaggctgccccagacttggcctcctcatgccccctcctgacctctgcccttctctggtcctggcatccctggagaaggtaggggtcttgacctaagtttagatttgatctccatgtgcagggaggctgtcctgggcctgacaggtcctccccctttctgaggtagcagtgccttgtggaggtttgacaccatgtccctagctccccaagcacacaccaggaaactgcaggggctcacggaggaagtgctgcctgggccagggggaccagctttcctccgtagagaccatgtgcagaacacttctgctgtgccaagaacatgagggagccagtgttttgtcagcaggaagaaagggcctgctgggatgaaagtgggaaggaaacagggttgcgtagtcaggagacacctcaggggcaacagcacaggcccagagtacctgctgcctccactgcgtctgtcctggggtcatgaggatgctgaggttgacgacaggttccaggtcctttcactcctttggccaaaggttgggggtaggtggcccaagtggcgtgctctctaggtagacaacaggagtggtcagagttccctcaaaggatcctccactccagagcacctgagaaggccgggaccagaggccctgtgtgatgtgtactccgcagctgtttggggtgggacatttctgtacttctcgatttgcttatggctcagccattacctgtgtcagtccatgattctgttgtaacagttttaagagtaaataaataaagctgcctgatgtcccatcacgcag

SEQ ID NO: 1089 - DNA, 5932 bp, Homo sapiens
ctgggcggggccgggaagcggcagtggcggctacgcgcgcgggggtgcgcgcgggaacgaccgggaaacaccgcgagggccggggtgggccaggctgtggggacgacgggctgcgacgatggccgcagcggcgggcggcggcgggccggggacagcggtaggcgccacgggctcggggattgcggcggcagccgcaggcctagctgtttatcgacggaaggatgggggcccggccaccaagttttgggagagcccggagacggtgtcccagctggattcggtgcgggtctggctgggcaagcactacaagaagtatgttcatgcggatgctcctaccaataaaacactggctgggctggtggtgcagcttcttcagttccaggaagatgcctttgggaagcatgtcaccaacccggccttcaccaaactccctgcaaagtgtttcatggatttcaaagctggaggcgccttatgtcacattcttggggctgcttacaagtataaaaatgaacagggatggcggaggtttgacctacagaacccatctcgaatggatcgtaatgtggaaatgtttatgaacattgaaaaaacattggtgcagaacaattgtttgaccagacccaacatctacctcattccagacattgatctgaagttggctaacaaattgaaagatatcatcaaacgacatcagggaacatttacggatgagaagtcaaaagcttcccaccacatttacccatattcttcctcacaagacgatgaagaatggttgagaccggtgatgagaaaagagaagcaagtgttagtgcattggggcttttacccagacagctatgatacttgggtccatagtaatgatgttgatgctgaaattgaagatccaccaattccagaaaaaccatggaaggttcatgtgaaatggattttggacactgatattttcaatgaatggatgaatgaggaggattatgaggtggatgaaaataggaagcctgtgagttttcgtcagcggatttcaaccaagaatgaagagccagtcagaagtccagaaagaagagatagaaaagcatcagctaatgctcgaaagaggaaacattcgccttcgcctccccctccgacaccaacagaatcacggaagaagagtgggaagaaaggccaagctagcctttatgggaagcgcagaagtcagaaagaggaagatgagcaagaagatctaaccaaggatatggaagacccaacacctgtacccaatatagaagaagtagtacttcccaaaaatgtgaacctaaagaaagatagtgaaaatacacctgttaaaggaggaactgtagcggatctagatgagcaggatgaagaaacagtcacagcaggaggaaaggaagatgaagatcctgccaaaggtgatcagagtcgatcagttgaccttggggaagataatgtgacagagcagaccaatcacattattattcctagttatgcatcatggtttgattataactgtattcatgtgattgaacggcgtgctcttcctgagttcttcaatggaaaaaacaaatccaagactccagaaatatacttggcatatcgaaattttatgattgacacgtatcgtctaaacccccaagagtatttaactagcactgcttgtcggaggaacttgactggagatgtgtgtgctgtgatgagggtccatgcctttttagagcagtggggactcgttaattaccaagttgacccggaaagtagacccatggcaatgggacctcctcctactcctcattttaatgtattagctgataccccctctgggcttgtgcctctgcatcttcgatcacctcaggttcctgctgctcaacagatgctaaattttcctgagaaaaacaaggaaaaaccagttgatttgcagaactttggtctccgtactgacatttactccaagaaaacattagcaaagagtaaaggtgctagtgctggaagagaatggactgaacaggagacccttctactcctggaggccctggagatgtacaaggatgattggaacaaagtgtcggaacatgttggaagtcgtactcaggatgaatgcatcctccactttttgagacttcccattgaggacccataccttgagaattcagatgcttcccttgggcctttggcctaccagcctgtccccttcagtcagtcaggaaatccagttatgagtactgttgcttttttggcatctgtggtggaccctcgcgtggcatctgctgcagcaaaagcggctttggaggagttttctcgggtccgggaggaggtaccactggaattggttgaagctcatgtcaagaaagtacaagaagcagcacgagcctctgggaaagtggatcccacctacggtctggagagcagctgcattgcaggcacagggcccgatgagccagagaagcttggaatagccaggccagaagaaggaaggcctgtggtgagtgggacaggaaatgacatcaccaccccaccgaacaaggagctcccaccaagcccagagaagaaaacaaagcctttggccaccactcaacctgcaaagacttcaacatcgaaagccaaaacacagcccacttctctccctaagcagccagctcccaccaccattggtgggttgaataaaaaacccatgagccttgcttcaggcttagtgccagctgccccacccaaacgccctgccgtcgcctctgccaggccttccatcttaccttcaaaagacgtgaagccaaagcccattgcagatgcaaaggctcctgagaagcgggcctcaccatccaagccagcttctgccccagcctccagatctgggtccaagagcactcagactgttgcaaaaaccacaacagctgctgctgttgcctcaactggcccaagcagtaggagcccctccacgctcctgcccaagaagcccactgccattaagactgagggaaaacctgcagaagtcaagaagatgactgcaaagtctgtaccagctgacttgagtcgcccaaagagcacctccaccagttccatgaagaaaaccaccactctcagtgggacagcccccgctgcaggggtggttcccagccgagtcaaggccacacccatgccctcccggccctccacaactcctttcatagacaagaagcccacctcggccaaacccagctccaccaccccccggctcagccgcctggccaccaatacttctgctcctgatctgaagaatgtccgctccaaggttggctccacggaaaacatcaagcatcagcctggaggaggccgggttcagattcagaacaagaaagtggacatctctaaggtctcctccaagtgtgggtctaaggctaacatcaagcacaagcctggtggaggagatgtcaagattgaaagtcagaagttgaacttcaaggagaaggcccaggccaaggtgggatccctcgataatgtgggccacctacctgcaggaggtgctgtgaagactgagggcggtggcagcgaggctcctctgtgtccgggtccccctgctggggaggagccggccatctctgaggcagcgcctgaagctggcgcccccacttcagccagtggcctcaatggccaccccaccctgtcagggggtggtgaccaaagggaggcccagaccttggacagccagatccaggagacaaattgagacctacaggctgacgttccgggcaaatgccagggcccgcaccgaccacggggccgacattgtctcccgccccccacacttccctggcggccccaactcgggctcccgggtccttggccccctttcccgggctgtccactagaccagtgagcgcttgggcgccgtgctgggcagcccgctaggctcgccttccctcctgctttgcgtgcccggggcagcagcagccctgccccacacctcctctcactccccagcctgggcccatctccctgctttggtcttgccccatcactgcgccactgctccgtggaggaggttgggagggggttggggtggttgaggctaagttgggatctaggagaggagaaccagattctatcctcatctttttttggttctttggtccaaacccaaaagaaactgacatgccctcccttctccctggatctacctggagggaagagtggaggtggattccgagtggtgacaggacgctgaccgtggagcttaagccactgcctctccctctggtcccacaaatgggcgcccccccctccccatgcaggtggtgtcgggcccttcttgctgccctgccccaagttgggggtcagtgctgcctgtccccatgcttaacatacccgcctagctgctgtcacatttttcttgttttgtccttttatttttttctaataacctaaaaactggcaaaatagttctgcaggttgaagccatgtctacatgaaagtcctcagtaagtgttagagggaacagggcggagatatccttatgccacccccgctggaggatgtgggcagcttagggccctggaggcggtgcggcagggaagaggggtgcagaggctgtggctggtgagccggtcaggcacacaaggggcccttggagcgtggactggttggttttgccattttgttgtgtgtatgctgcttttcttttctaaccaagaggctggttttggcatctctgtcccattccctgggatctggtggtcagccctaggataaaaagccagggctggagaacaagaaagggccaggagatggaattccttcaggccggcacccacaccctaggacatgtaagccctcatgtccaagggagcctcatgcagatagtaggaaatcaggtctggaaatttaaaaataaaaggcatgagactaaggctatctgcttcccttatgccctgactggagaggggagggaggagaggcaaggcccacagagggcatcccagctaggccttgggatggctgcagtgaggagaaatcccgggaactgtattgacacaaagattcttattgcacttgtattttttgtattaaagtttgcatggtttctaataaaggattcaaacataagtttgtagtgaaatggcctgggagattccaagggcttctctggagggggattggctgcagtgtagatttgcctctgaggaggctgccccagacttggcctcctcatgccccctcctgacctctgcccttctctggtcctggcatccctggagaaggtaggggtcttgacctaagtttagatttgatctccatgtgcagggaggctgtcctgggcctgacaggtcctccccctttctgaggtagcagtgccttgtggaggtttgacaccatgtccctagctccccaagcacacaccaggaaactgcaggggctcacggaggaagtgctgcctgggccagggggaccagctttcctccgtagagaccatgtgcagaacacttctgctgtgccaagaacatgagggagccagtgttttgtcagcaggaagaaagggcctgctgggatgaaagtgggaaggaaacagggttgcgtagtcaggagacacctcaggggcaacagcacaggcccagagtacctgctgcctccactgcgtctgtcctggggtcatgaggatgctgaggttgacgacaggttccaggtcctttcactcctttggccaaaggttgggggtaggtggcccaagtggcgtgctctctaggtagacaacaggagtggtcagagttccctcaaaggatcctccactccagagcacctgagaaggccgggaccagaggccctgtgtgatgtgtactccgcagctgtttggggtgggacatttctgtacttctcgatttgcttatggctcagccattacctgtgtcagtccatgattctgttgtaacagttttaagagtaaataaataaagctgcctgatgtcccatcacgcag

SEQ ID NO: 1090 - DNA, 2533 bp, Homo sapiens
aaaaaccggcgctcactagggcagaatgcagcctacggaggatggcggaagaggcggctgaggccgcaggacgtgctattccaagtatgttcatgcggatgctcctaccaataaaacactggctgggctggtggtgcagcttcttcagttccaggaagatgcctttgggaagcatgtcaccaacccggccttcaccaaactccctgcaaagtgtttcatggatttcaaagctggaggcgccttatgtcacattcttggggctgcttacaagtataaaaatgaacagggatggcggaggtttgacctacagaacccatctcgaatggatcgtaatgtggaaatgtttatgaacattgaaaaaacattggtgcagaacaattgtttgaccagacccaacatctacctcattccagacattgatctgaagttggctaacaaattgaaagatatcatcaaacgacatcagggaacatttacggatgagaagtcaaaagcttcccaccacatttacccatattcttcctcacaagacgatgaagaatggttgagaccggtgatgagaaaagagaagcaagtgttagtgcattggggcttttacccagacagctatgatacttgggtccatagtaatgatgttgatgctgaaattgaagatccaccaattccagaaaaaccatggaaggttcatgtgaaatggattttggacactgatattttcaatgaatggatgaatgaggaggattatgaggtggatgaaaataggaagcctgtgagttttcgtcagcggatttcaaccaagaatgaagagccagtcagaagtccagaaagaagagatagaaaagcatcagctaatgctcgaaagaggaaacattcgccttcgcctccccctccgacaccaacagaatcacggaagaagagtgggaagaaaggccaagctagcctttatgggaagcgcagaagtcagaaagaggaagatgagcaagaagatctaaccaaggatatggaagacccaacacctgtacccaatatagaagaagtagtacttcccaaaaatgtgaacctaaagaaagatagtgaaaatacacctgttaaaggaggaactgtagcggatctagatgagcaggatgaagaaacagtcacagcaggaggaaaggaagatgaagatcctgccaaaggtgatcagagtcgatcagttgaccttggggaagataatgtgacagagcagaccaatcacattattattcctagttatgcatcatggtttgattataactgtattcatgtgattgaacggcgtgctcttcctgagttcttcaatggaaaaaacaaatccaagactccagaaatatacttggcatatcgaaattttatgattgacacgtatcgtctaaacccccaagagtatttaactagcactgcttgtcggaggaacttgactggagatgtgtgtgctgtgatgagggtccatgcctttttagagcagtggggactcgttaattaccaagttgacccggaaagtagacccatggcaatgggacctcctcctactcctcattttaatgtattagctgataccccctctgggcttgtgcctctgcatcttcgatcacctcaggttcctgctgctcaacagatgctaaattttcctgagaaaaacaaggaaaaaccagttgatttgcagaactttggtctccgtactgacatttactccaagaaaacattagcaaagagtaaaggtgctagtgctggaagagaatggactgaacaggagacccttctactcctggaggccctggagatgtacaaggatgattggaacaaagtgtcggaacatgttggaagtcgtactcaggatgaatgcatcctccactttttgagacttcccattgaggacccataccttgagaattcagatgcttcccttgggcctttggcctaccagcctgtccccttcagtcagtcaggaaatccagttatgagtactgttgcttttttggcatctgtggtggaccctcgcgtggcatctgctgcagcaaaagcggctttggaggagttttctcgggtccgggaggaggtaccactggaattggttgaagctcatgtcaagaaagtacaagaagcagcacgagcctctgggaaagtggatcccacctacggtctggagagcagctgcattgcaggcacagggcccgatgagccagagaagcttggaatagccaggccagaagaaggaaggcctgtggtgagtgggacaggaaatgacatcaccaccccaccgaacaaggagctcccaccaagcccagagaagaaaacaaagcctttggccaccactcaacctgcaaagacttcaacatcgaaagccaaaacacagcccacttctctccctaagcagccagctcccaccaccattggtgggttgaataaaaaacccatgagccttgcttcaggcttagtgccagctgccccacccaaacgccctgccgtcgcctctgccaggccttccatcttaccttcaaaagacgtgaagccaaag

SEQ ID NO: 1091 - DNA, 4468 bp, Homo sapiens
ctgggcggggccgggaagcggcagtggcggctacgcgcgcgggggtgcgcgcgggaacgaccgggaaacaccgcgagggccggggtgggccaggctgtggggacgacgggctgcgacgatggccgcagcggcgggcggcggcgggccggggacagcggtaggcgccacgggctcggggattgcggcggcagccgcaggcctagctgtttatcgacggaaggatgggggcccggccaccaagttttgggagagcccggagacggtgtcccagctggattcggtgcgggtctggctgggcaagcactacaagaagtatgttcatgcggatgctcctaccaataaaacactggctgggctggtggtgcagcttcttcagttccaggaagatgcctttgggaagcatgtcaccaacccggccttcaccaaactccctgcaaagtgtttcatggatttcaaagctggaggcgccttatgtcacattcttggggctgcttacaagtataaaaatgaacagggatggcggaggtttgacctacagaacccatctcgaatggatcgtaatgtggaaatgtttatgaacattgaaaaaacattggtgcagaacaattgtttgaccagacccaacatctacctcattccagacattgatctgaagttggctaacaaattgaaagatatcatcaaacgacatcagggaacatttacggatgagaagtcaaaagcttcccaccacatttacccatattcttcctcacaagacgatgaagaatggttgagaccggtgatgagaaaagagaagcaagtgttagtgcattggggcttttacccagacagctatgatacttgggtccatagtaatgatgttgatgctgaaattgaagatccaccaattccagaaaaaccatggaaggttcatgtgaaatggattttggacactgatattttcaatgaatggatgaatgaggaggattatgaggtggatgaaaataggaagcctgtgagttttcgtcagcggatttcaaccaagaatgaagagccagtcagaagtccagaaagaagagatagaaaagcatcagctaatgctcgaaagaggaaacattcgccttcgcctccccctccgacaccaacagaatcacggaagaagagtgggaagaaaggccaagctagcctttatgggaagcgcagaagtcagaaagaggaagatgagcaagaagatctaaccaaggatatggaagacccaacacctgtacccaatatagaagaagtagtacttcccaaaaatgtgaacctaaagaaagatagtgaaaatacacctgttaaaggaggaactgtagcggatctagatgagcaggatgaagaaacagtcacagcaggaggaaaggaagatgaagatcctgccaaaggtgatcagagtcgatcagttgaccttggggaagataatgtgacagagcagaccaatcacattattattcctagttatgcatcatggtttgattataactgtattcatgtgattgaacggcgtgctcttcctgagttcttcaatggaaaaaacaaatccaagactccagaaatatacttggcatatcgaaattttatgattgacacgtatcgtctaaacccccaagagtatttaactagcactgcttgtcggaggaacttgactggagatgtgtgtgctgtgatgagggtccatgcctttttagagcagtggggactcgttaattaccaagttgacccggaaagtagacccatggcaatgggacctcctcctactcctcattttaatgtattagctgataccccctctgggcttgtgcctctgcatcttcgatcacctcaggttcctgctgctcaacagatgctaaattttcctgagaaaaacaaggaaaaaccagttgatttgcagaactttggtctccgtactgacatttactccaagaaaacattagcaaagagtaaaggtgctagtgctggaagagaatggactgaacaggagacccttctactcctggaggccctggagatgtacaaggatgattggaacaaagtgtcggaacatgttggaagtcgtactcaggatgaatgcatcctccactttttgagacttcccattgaggacccataccttgagaattcagatgcttcccttgggcctttggcctaccagcctgtccccttcagtcagtcaggaaatccagttatgagtactgttgcttttttggcatctgtggtggaccctcgcgtggcatctgctgcagcaaaagcggctttggaggagttttctcgggtccgggaggaggtaccactggaattggttgaagctcatgtcaagaaagtacaagaagcagcacgagcctctgggaaagtggatcccacctacggtctggagagcagctgcattgcaggcacagggcccgatgagccagagaagcttgggtctccaactgaattccttgaagagaaaatggcctaccaggaatacccaaatagccagaactggccagaagataccaacttttgtttccaacctgagcaagtggtcgatcctatccagactgatccctttaagatgtaccatgatgatgacctggcagatttggtctttccctccagtgcgacagctgatacttcaatatttgcaggacaaaatgatcccttgaaagacagttacggtatgtctccctgcaacacagctgttgtacctcaggggtggtctgtggaagccttaaactctccacactcagagtcctttgtttccccagaggctgttgcagaacctcctcagccaacggcagttcccttagagctagccaaggagatagaaatggcatcagaagagaggccaccagcacaagcattggaaataatgatgggactgaagactactgacatggcaccatctaaagaaacagagatggccctcgccaaggacatggcactagctacaaaaaccgaggtggcattggctaaagatatggaatcacccaccaaattagatgtgacactggccaaggacatgcagccatccatggaatcagatatggccctagtcaaggacatggaactacccacagaaaaagaagtggccctggttaaggatgtcagatggcccacagaaacagatgtatcttcagccaagaatgtggtactgcccacagaaacagaggtagccccagccaaggatgtgacactgttgaaagaaacagagagggcatctcctataaaaatggacttagccccttccaaggacatgggaccacccaaagaaaacaagaaagaaacagagagggcatctcctataaaaatggacttggctccttccaaggacatgggaccacccaaagaaaacaagatagtcccagccaaggatttggtattactctcagaaatagaggtggcacaggctaatgacattatatcatccacagaaatatcctctgctgagaaggtggctttgtcctcagaaacagaggtagccctggccagggacatgacactgcccccggaaaccaacgtgatcttgaccaaggataaagcactacctttagaagcagaggtggccccagtcaaggacatggctcaactcccagaaacagaaatagccccggccaaggatgtggctccgtccacagtaaaagaagtgggcttgttgaaggacatgtctccactatcagaaacagaaatggctctgggcaaggatgtgactccacctccagaaacagaagtagttctcatcaagaacgtatgtctgcctccagaaatggaggtggccctgactgaggatcaggtcccagccctcaaaacagaagcacccctggctaaggatggggttctgaccctggccaacaatgtgactccagccaaagatgttccaccactctcagaaacagaggcaacaccagttccaattaaagacatggaaattgcacaaacacaaaaaggaataagtgaggattcccatttagaatctctgcaggatgtggggcagtcagctgcacctactttcatgatttcaccagaaaccgtcacaggaacggggaaaaagtgcagcttgccggccgaggaggattctgtgttagaaaaactaggggaaaggaaaccatgcaacagtcaaccttctgagctttcttcagagacctcaggaatagccaggccagaagaaggaaggcctgtggtgagtgggacaggaaatgacatcaccaccccaccgaacaaggagctcccaccaagcccagagaagaaaacaaagcctttggccaccactcaacctgcaaagacttcaacatcgaaagccaaaacacagcccacttctctccctaagcagccagctcccaccaccattggtgggttgaataaaaaacccatgagccttgcttcaggcttagtgccagctgccccacccaaacgccctgccgtcgcctctgccaggccttccatcttaccttcaaaagacgtgaagccaaag

SEQ ID NO: 1092 - DNA, 5619 bp, Homo sapiens
ctgggcggggccgggaagcggcagtggcggctacgcgcgcgggggtgcgcgcgggaacgaccgggaaacaccgcgagggccggggtgggccaggctgtggggacgacgggctgcgacgatggccgcagcggcgggcggcggcgggccggggacagcggtaggcgccacgggctcggggattgcggcggcagccgcaggcctagctgtttatcgacggaaggatgggggcccggccaccaagttttgggagagcccggagacggtgtcccagctggattcggtgcgggtctggctgggcaagcactacaagaagtatgttcatgcggatgctcctaccaataaaacactggctgggctggtggtgcagcttcttcagttccaggaagatgcctttgggaagcatgtcaccaacccggccttcaccaaactccctgcaaagtgtttcatggatttcaaagctggaggcgccttatgtcacattcttggggctgcttacaagtataaaaatgaacagggatggcggaggtttgacctacagaacccatctcgaatggatcgtaatgtggaaatgtttatgaacattgaaaaaacattggtgcagaacaattgtttgaccagacccaacatctacctcattccagacattgatctgaagttggctaacaaattgaaagatatcatcaaacgacatcagggaacatttacggatgagaagtcaaaagcttcccaccacatttacccatattcttcctcacaagacgatgaagaatggttgagaccggtgatgagaaaagagaagcaagtgttagtgcattggggcttttacccagacagctatgatacttgggtccatagtaatgatgttgatgctgaaattgaagatccaccaattccagaaaaaccatggaaggttcatgtgaaatggattttggacactgatattttcaatgaatggatgaatgaggaggattatgaggtggatgaaaataggaagcctgtgagttttcgtcagcggatttcaaccaagaatgaagagccagtcagaagtccagaaagaagagatagaaaagcatcagctaatgctcgaaagaggaaacattcgccttcgcctccccctccgacaccaacagaatcacggaagaagagtgggaagaaaggccaagctagcctttatgggaagcgcagaagtcagaaagaggaagatgagcaagaagatctaaccaaggatatggaagacccaacacctgtacccaatatagaagaagtagtacttcccaaaaatgtgaacctaaagaaagatagtgaaaatacacctgttaaaggaggaactgtagcggatctagatgagcaggatgaagaaacagtcacagcaggaggaaaggaagatgaagatcctgccaaaggtgatcagagtcgatcagttgaccttggggaagataatgtgacagagcagaccaatcacattattattcctagttatgcatcatggtttgattataactgtattcatgtgattgaacggcgtgctcttcctgagttcttcaatggaaaaaacaaatccaagactccagaaatatacttggcatatcgaaattttatgattgacacgtatcgtctaaacccccaagagtatttaactagcactgcttgtcggaggaacttgactggagatgtgtgtgctgtgatgagggtccatgcctttttagagcagtggggactcgttaattaccaagttgacccggaaagtagacccatggcaatgggacctcctcctactcctcattttaatgtattagctgataccccctctgggcttgtgcctctgcatcttcgatcacctcaggttcctgctgctcaacagatgctaaattttcctgagaaaaacaaggaaaaaccagttgatttgcagaactttggtctccgtactgacatttactccaagaaaacattagcaaagagtaaaggtgctagtgctggaagagaatggactgaacaggagacccttctactcctggaggccctggagatgtacaaggatgattggaacaaagtgtcggaacatgttggaagtcgtactcaggatgaatgcatcctccactttttgagacttcccattgaggacccataccttgagaattcagatgcttcccttgggcctttggcctaccagcctgtccccttcagtcagtcaggaaatccagttatgagtactgttgcttttttggcatctgtggtggaccctcgcgtggcatctgctgcagcaaaagcggctttggaggagttttctcgggtccgggaggaggtaccactggaattggttgaagctcatgtcaagaaagtacaagaagcagcacgagcctctgggaaagtggatcccacctacggtctggagagcagctgcattgcaggcacagggcccgatgagccagagaagcttggaatagccaggccagaagaaggaaggcctgtggtgagtgggacaggaaatgacatcaccaccccaccgaacaaggagctcccaccaagcccagagaagaaaacaaagcccattgcagatgcaaaggctcctgagaagcgggcctcaccatccaagccagcttctgccccagcctccagatctgggtccaagagcactcagactgttgcaaaaaccacaacagctgctgctgttgcctcaactggcccaagcagtaggagcccctccacgctcctgcccaagaagcccactgccattaagactgagggaaaacctgcagaagtcaagaagatgactgcaaagtctgtaccagctgacttgagtcgcccaaagagcacctccaccagttccatgaagaaaaccaccactctcagtgggacagcccccgctgcaggggtggttcccagccgagtcaaggccacacccatgccctcccggccctccacaactcctttcatagacaagaagcccacctcggccaaacccagctccaccaccccccggctcagccgcctggccaccaatacttctgctcctgatctgaagaatgtccgctccaaggttggctccacggaaaacatcaagcatcagcctggaggaggccgggtccagatagtctccaaaaaagtgagctacagccatattcagtccaagtgtggttccaaggacaatattaagcatgtccctggaggtggtaatgttcagattcagaacaagaaagtggacatctctaaggtctcctccaagtgtgggtctaaggctaacatcaagcacaagcctggtggaggagatgtcaagattgaaagtcagaagttgaacttcaaggagaaggcccaggccaaggtgggatccctcgataatgtgggccacctacctgcaggaggtgctgtgaagattgagacctacaggctgacgttccgggcaaatgccagggcccgcaccgaccacggggccgacattgtctcccgccccccacacttccctggcggccccaactcgggctcccgggtccttggccccctttcccgggctgtccactagaccagtgagcgcttgggcgccgtgctgggcagcccgctaggctcgccttccctcctgctttgcgtgcccggggcagcagcagccctgccccacacctcctctcactccccagcctgggcccatctccctgctttggtcttgccccatcactgcgccactgctccgtggaggaggttgggagggggttggggtggttgaggctaagttgggatctaggagaggagaaccagattctatcctcatctttttttggttctttggtccaaacccaaaagaaactgacatgccctcccttctccctggatctacctggagggaagagtggaggtggattccgagtggtgacaggacgctgaccgtggagcttaagccactgcctctccctctggtcccacaaatgggcgcccccccctccccatgcaggtggtgtcgggcccttcttgctgccctgccccaagttgggggtcagtgctgcctgtccccatgcttaacatacccgcctagctgctgtcacatttttcttgttttgtccttttatttttttctaataacctaaaaactggcaaaatagttctgcaggttgaagccatgtctacatgaaagtcctcagtaagtgttagagggaacagggcggagatatccttatgccacccccgctggaggatgtgggcagcttagggccctggaggcggtgcggcagggaagaggggtgcagaggctgtggctggtgagccggtcaggcacacaaggggcccttggagcgtggactggttggttttgccattttgttgtgtgtatgctgcttttcttttctaaccaagaggctggttttggcatctctgtcccattccctgggatctggtggtcagccctaggataaaaagccagggctggagaacaagaaagggccaggagatggaattccttcaggccggcacccacaccctaggacatgtaagccctcatgtccaagggagcctcatgcagatagtaggaaatcaggtctggaaatttaaaaataaaaggcatgagactaaggctatctgcttcccttatgccctgactggagaggggagggaggagaggcaaggcccacagagggcatcccagctaggccttgggatggctgcagtgaggagaaatcccgggaactgtattgacacaaagattcttattgcacttgtattttttgtattaaagtttgcatggtttctaataaaggattcaaacataagtttgtagtgaaatggcctgggagattccaagggcttctctggagggggattggctgcagtgtagatttgcctctgaggaggctgccccagacttggcctcctcatgccccctcctgacctctgcccttctctggtcctggcatccctggagaaggtaggggtcttgacctaagtttagatttgatctccatgtgcagggaggctgtcctgggcctgacaggtcctccccctttctgaggtagcagtgccttgtggaggtttgacaccatgtccctagctccccaagcacacaccaggaaactgcaggggctcacggaggaagtgctgcctgggccagggggaccagctttcctccgtagagaccatgtgcagaacacttctgctgtgccaagaacatgagggagccagtgttttgtcagcaggaagaaagggcctgctgggatgaaagtgggaaggaaacagggttgcgtagtcaggagacacctcaggggcaacagcacaggcccagagtacctgctgcctccactgcgtctgtcctggggtcatgaggatgctgaggttgacgacaggttccaggtcctttcactcctttggccaaaggttgggggtaggtggcccaagtggcgtgctctctaggtagacaacaggagtggtcagagttccctcaaaggatcctccactccagagcacctgagaaggccgggaccagaggccctgtgtgatgtgtactccgcagctgtttggggtgggacatttctgtacttctcgatttgcttatggctcagccattacctgtgtcagtccatgattctgttgtaacagttttaagagtaaataaataaagctgcctgatgtcccatcacgcag

SEQ ID NO: 1093 - DNA, 7305 bp, Homo sapiens
aaaaaccggcgctcactagggcagaatgcagcctacggaggatggcggaagaggcggctgaggccgcaggacgtgctattccaagtatgttcatgcggatgctcctaccaataaaacactggctgggctggtggtgcagcttcttcagttccaggaagatgcctttgggaagcatgtcaccaacccggccttcaccaaactccctgcaaagtgtttcatggatttcaaagctggaggcgccttatgtcacattcttggggctgcttacaagtataaaaatgaacagggatggcggaggtttgacctacagaacccatctcgaatggatcgtaatgtggaaatgtttatgaacattgaaaaaacattggtgcagaacaattgtttgaccagacccaacatctacctcattccagacattgatctgaagttggctaacaaattgaaagatatcatcaaacgacatcagggaacatttacggatgagaagtcaaaagcttcccaccacatttacccatattcttcctcacaagacgatgaagaatggttgagaccggtgatgagaaaagagaagcaagtgttagtgcattggggcttttacccagacagctatgatacttgggtccatagtaatgatgttgatgctgaaattgaagatccaccaattccagaaaaaccatggaaggttcatgtgaaatggattttggacactgatattttcaatgaatggatgaatgaggaggattatgaggtggatgaaaataggaagcctgtgagttttcgtcagcggatttcaaccaagaatgaagagccagtcagaagtccagaaagaagagatagaaaagcatcagctaatgctcgaaagaggaaacattcgccttcgcctccccctccgacaccaacagaatcacggaagaagagtgggaagaaaggccaagctagcctttatgggaagcgcagaagtcagaaagaggaagatgagcaagaagatctaaccaaggatatggaagacccaacacctgtacccaatatagaagaagtagtacttcccaaaaatgtgaacctaaagaaagatagtgaaaatacacctgttaaaggaggaactgtagcggatctagatgagcaggatgaagaaacagtcacagcaggaggaaaggaagatgaagatcctgccaaaggtgatcagagtcgatcagttgaccttggggaagataatgtgacagagcagaccaatcacattattattcctagttatgcatcatggtttgattataactgtattcatgtgattgaacggcgtgctcttcctgagttcttcaatggaaaaaacaaatccaagactccagaaatatacttggcatatcgaaattttatgattgacacgtatcgtctaaacccccaagagtatttaactagcactgcttgtcggaggaacttgactggagatgtgtgtgctgtgatgagggtccatgcctttttagagcagtggggactcgttaattaccaagttgacccggaaagtagacccatggcaatgggacctcctcctactcctcattttaatgtattagctgataccccctctgggcttgtgcctctgcatcttcgatcacctcaggttcctgctgctcaacagatgctaaattttcctgagaaaaacaaggaaaaaccagttgatttgcagaactttggtctccgtactgacatttactccaagaaaacattagcaaagagtaaaggtgctagtgctggaagagaatggactgaacaggagacccttctactcctggaggccctggagatgtacaaggatgattggaacaaagtgtcggaacatgttggaagtcgtactcaggatgaatgcatcctccactttttgagacttcccattgaggacccataccttgagaattcagatgcttcccttgggcctttggcctaccagcctgtccccttcagtcagtcaggaaatccagttatgagtactgttgcttttttggcatctgtggtggaccctcgcgtggcatctgctgcagcaaaagcggctttggaggagttttctcgggtccgggaggaggtaccactggaattggttgaagctcatgtcaagaaagtacaagaagcagcacgagcctctgggaaagtggatcccacctacggtctggagagcagctgcattgcaggcacagggcccgatgagccagagaagcttgatccctttaagatgtaccatgatgatgacctggcagatttggtctttccctccagtgcgacagctgatacttcaatatttgcaggacaaaatgatcccttgaaagacagttacggtatgtctccctgcaacacagctgttgtacctcaggggtggtctgtggaagccttaaactctccacactcagagtcctttgtttccccagaggctgttgcagaacctcctcagccaacggcagttcccttagagctagccaaggagatagaaatggcatcagaagagaggccaccagcacaagcattggaaataatgatgggactgaagactactgacatggcaccatctaaagaaacagagatggccctcgccaaggacatggcactagctacaaaaaccgaggtggcattggctaaagatatggaatcacccaccaaattagatgtgacactggccaaggacatgcagccatccatggaatcagatatggccctagtcaaggacatggaactacccacagaaaaagaagtggccctggttaaggatgtcagatggcccacagaaacagatgtatcttcagccaagaatgtggtactgcccacagaaacagaggtagccccagccaaggatgtgacactgttgaaagaaacagagagggcatctcctataaaaatggacttagccccttccaaggacatgggaccacccaaagaaaacaagaaagaaacagagagggcatctcctataaaaatggacttggctccttccaaggacatgggaccacccaaagaaaacaagatagtcccagccaaggatttggtattactctcagaaatagaggtggcacaggctaatgacattatatcatccacagaaatatcctctgctgagaaggtggctttgtcctcagaaacagaggtagccctggccagggacatgacactgcccccggaaaccaacgtgatcttgaccaaggataaagcactacctttagaagcagaggtggccccagtcaaggacatggctcaactcccagaaacagaaatagccccggccaaggatgtggctccgtccacagtaaaagaagtgggcttgttgaaggacatgtctccactatcagaaacagaaatggctctgggcaaggatgtgactccacctccagaaacagaagtagttctcatcaagaacgtatgtctgcctccagaaatggaggtggccctgactgaggatcaggtcccagccctcaaaacagaagcacccctggctaaggatggggttctgaccctggccaacaatgtgactccagccaaagatgttccaccactctcagaaacagaggcaacaccagttccaattaaagacatggaaattgcacaaacacaaaaaggaataagtgaggattcccatttagaatctctgcaggatgtggggcagtcagctgcacctactttcatgatttcaccagaaaccgtcacaggaacggggaaaaagtgcagcttgccggccgaggaggattctgtgttagaaaaactaggggaaaggaaaccatgcaacagtcaaccttctgagctttcttcagagacctcaggaatagccaggccagaagaaggaaggcctgtggtgagtgggacaggaaatgacatcaccaccccaccgaacaaggagctcccaccaagcccagagaagaaaacaaagcctttggccaccactcaacctgcaaagacttcaacatcgaaagccaaaacacagcccacttctctccctaagcagccagctcccaccaccattggtgggttgaataaaaaacccatgagccttgcttcaggcttagtgccagctgccccacccaaacgccctgccgtcgcctctgccaggccttccatcttaccttcaaaagacgtgaagccaaagcccattgcagatgcaaaggctcctgagaagcgggcctcaccatccaagccagcttctgccccagcctccagatctgggtccaagagcactcagactgttgcaaaaaccacaacagctgctgctgttgcctcaactggcccaagcagtaggagcccctccacgctcctgcccaagaagcccactgccattaagactgagggaaaacctgcagaagtcaagaagatgactgcaaagtctgtaccagctgacttgagtcgcccaaagagcacctccaccagttccatgaagaaaaccaccactctcagtgggacagcccccgctgcaggggtggttcccagccgagtcaaggccacacccatgccctcccggccctccacaactcctttcatagacaagaagcccacctcggccaaacccagctccaccaccccccggctcagccgcctggccaccaatacttctgctcctgatctgaagaatgtccgctccaaggttggctccacggaaaacatcaagcatcagcctggaggaggccgggccaaagtagagaaaaaaacagaggcagctgctacaacccgaaagcctgaatctaatgcagtcactaaaacagccggcccaattgcaagtgcacagaaacaacctgcggggaaagtccagatagtctccaaaaaagtgagctacagccatattcagtccaagtgtggttccaaggacaatattaagcatgtccctggaggtggtaatgttcagattcagaacaagaaagtggacatctctaaggtctcctccaagtgtgggtctaaggctaacatcaagcacaagcctggtggaggagatgtcaagattgaaagtcagaagttgaacttcaaggagaaggcccaggccaaggtgggatccctcgataatgtgggccacctacctgcaggaggtgctgtgaagattgagacctacaggctgacgttccgggcaaatgccagggcccgcaccgaccacggggccgacattgtctcccgccccccacacttccctggcggccccaactcgggctcccgggtccttggccccctttcccgggctgtccactagaccagtgagcgcttgggcgccgtgctgggcagcccgctaggctcgccttccctcctgctttgcgtgcccggggcagcagcagccctgccccacacctcctctcactccccagcctgggcccatctccctgctttggtcttgccccatcactgcgccactgctccgtggaggaggttgggagggggttggggtggttgaggctaagttgggatctaggagaggagaaccagattctatcctcatctttttttggttctttggtccaaacccaaaagaaactgacatgccctcccttctccctggatctacctggagggaagagtggaggtggattccgagtggtgacaggacgctgaccgtggagcttaagccactgcctctccctctggtcccacaaatgggcgcccccccctccccatgcaggtggtgtcgggcccttcttgctgccctgccccaagttgggggtcagtgctgcctgtccccatgcttaacatacccgcctagctgctgtcacatttttcttgttttgtccttttatttttttctaataacctaaaaactggcaaaatagttctgcaggttgaagccatgtctacatgaaagtcctcagtaagtgttagagggaacagggcggagatatccttatgccacccccgctggaggatgtgggcagcttagggccctggaggcggtgcggcagggaagaggggtgcagaggctgtggctggtgagccggtcaggcacacaaggggcccttggagcgtggactggttggttttgccattttgttgtgtgtatgctgcttttcttttctaaccaagaggctggttttggcatctctgtcccattccctgggatctggtggtcagccctaggataaaaagccagggctggagaacaagaaagggccaggagatggaattccttcaggccggcacccacaccctaggacatgtaagccctcatgtccaagggagcctcatgcagatagtaggaaatcaggtctggaaatttaaaaataaaaggcatgagactaaggctatctgcttcccttatgccctgactggagaggggagggaggagaggcaaggcccacagagggcatcccagctaggccttgggatggctgcagtgaggagaaatcccgggaactgtattgacacaaagattcttattgcacttgtattttttgtattaaagtttgcatggtttctaataaaggattcaaacataagtttgtagtgaaatggcctgggagattccaagggcttctctggagggggattggctgcagtgtagatttgcctctgaggaggctgccccagacttggcctcctcatgccccctcctgacctctgcccttctctggtcctggcatccctggagaaggtaggggtcttgacctaagtttagatttgatctccatgtgcagggaggctgtcctgggcctgacaggtcctccccctttctgaggtagcagtgccttgtggaggtttgacaccatgtccctagctccccaagcacacaccaggaaactgcaggggctcacggaggaagtgctgcctgggccagggggaccagctttcctccgtagagaccatgtgcagaacacttctgctgtgccaagaacatgagggagccagtgttttgtcagcaggaagaaagggcctgctgggatgaaagtgggaaggaaacagggttgcgtagtcaggagacacctcaggggcaacagcacaggcccagagtacctgctgcctccactgcgtctgtcctggggtcatgaggatgctgaggttgacgacaggttccaggtcctttcactcctttggccaaaggttgggggtaggtggcccaagtggcgtgctctctaggtagacaacaggagtggtcagagttccctcaaaggatcctccactccagagcacctgagaaggccgggaccagaggccctgtgtgatgtgtactccgcagctgtttggggtgggacatttctgtacttctcgatttgcttatggctcagccattacctgtgtcagtccatgattctgttgtaacagttttaagagtaaataaataaagctgcctgatgtcccatcacgcag

SEQ ID NO: 1094 - DNA, 4117 bp, Homo sapiens
aaaaaccggcgctcactagggcagaatgcagcctacggaggatggcggaagaggcggctgaggccgcaggacgtgctattccaagtatgttcatgcggatgctcctaccaataaaacactggctgggctggtggtgcagcttcttcagttccaggaagatgcctttgggaagcatgtcaccaacccggccttcaccaaactccctgcaaagtgtttcatggatttcaaagctggaggcgccttatgtcacattcttggggctgcttacaagtataaaaatgaacagggatggcggaggtttgacctacagaacccatctcgaatggatcgtaatgtggaaatgtttatgaacattgaaaaaacattggtgcagaacaattgtttgaccagacccaacatctacctcattccagacattgatctgaagttggctaacaaattgaaagatatcatcaaacgacatcagggaacatttacggatgagaagtcaaaagcttcccaccacatttacccatattcttcctcacaagacgatgaagaatggttgagaccggtgatgagaaaagagaagcaagtgttagtgcattggggcttttacccagacagctatgatacttgggtccatagtaatgatgttgatgctgaaattgaagatccaccaattccagaaaaaccatggaaggttcatgtgaaatggattttggacactgatattttcaatgaatggatgaatgaggaggattatgaggtggatgaaaataggaagcctgtgagttttcgtcagcggatttcaaccaagaatgaagagccagtcagaagtccagaaagaagagatagaaaagcatcagctaatgctcgaaagaggaaacattcgccttcgcctccccctccgacaccaacagaatcacggaagaagagtgggaagaaaggccaagctagcctttatgggaagcgcagaagtcagaaagaggaagatgagcaagaagatctaaccaaggatatggaagacccaacacctgtacccaatatagaagaagtagtacttcccaaaaatgtgaacctaaagaaagatagtgaaaatacacctgttaaaggaggaactgtagcggatctagatgagcaggatgaagaaacagtcacagcaggaggaaaggaagatgaagatcctgccaaaggtgatcagagtcgatcagttgaccttggggaagataatgtgacagagcagaccaatcacattattattcctagttatgcatcatggtttgattataactgtattcatgtgattgaacggcgtgctcttcctgagttcttcaatggaaaaaacaaatccaagactccagaaatatacttggcatatcgaaattttatgattgacacgtatcgtctaaacccccaagagtatttaactagcactgcttgtcggaggaacttgactggagatgtgtgtgctgtgatgagggtccatgcctttttagagcagtggggactcgttaattaccaagttgacccggaaagtagacccatggcaatgggacctcctcctactcctcattttaatgtattagctgataccccctctgggcttgtgcctctgcatcttcgatcacctcaggttcctgctgctcaacagatgctaaattttcctgagaaaaacaaggaaaaaccagttgatttgcagaactttggtctccgtactgacatttactccaagaaaacattagcaaagagtaaaggtgctagtgctggaagagaatggactgaacaggagacccttctactcctggaggccctggagatgtacaaggatgattggaacaaagtgtcggaacatgttggaagtcgtactcaggatgaatgcatcctccactttttgagacttcccattgaggacccataccttgagaattcagatgcttcccttgggcctttggcctaccagcctgtccccttcagtcagtcaggaaatccagttatgagtactgttgcttttttggcatctgtggtggaccctcgcgtggcatctgctgcagcaaaagcggctttggaggagttttctcgggtccgggaggaggtaccactggaattggttgaagctcatgtcaagaaagtacaagaagcagcacgagcctctgggaaagtggatcccacctacggtctggagagcagctgcattgcaggcacagggcccgatgagccagagaagcttgatccctttaagatgtaccatgatgatgacctggcagatttggtctttccctccagtgcgacagctgatacttcaatatttgcaggacaaaatgatcccttgaaagacagttacggtatgtctccctgcaacacagctgttgtacctcaggggtggtctgtggaagccttaaactctccacactcagagtcctttgtttccccagaggctgttgcagaacctcctcagccaacggcagttcccttagagctagccaaggagatagaaatggcatcagaagagaggccaccagcacaagcattggaaataatgatgggactgaagactactgacatggcaccatctaaagaaacagagatggccctcgccaaggacatggcactagctacaaaaaccgaggtggcattggctaaagatatggaatcacccaccaaattagatgtgacactggccaaggacatgcagccatccatggaatcagatatggccctagtcaaggacatggaactacccacagaaaaagaagtggccctggttaaggatgtcagatggcccacagaaacagatgtatcttcagccaagaatgtggtactgcccacagaaacagaggtagccccagccaaggatgtgacactgttgaaagaaacagagagggcatctcctataaaaatggacttagccccttccaaggacatgggaccacccaaagaaaacaagaaagaaacagagagggcatctcctataaaaatggacttggctccttccaaggacatgggaccacccaaagaaaacaagatagtcccagccaaggatttggtattactctcagaaatagaggtggcacaggctaatgacattatatcatccacagaaatatcctctgctgagaaggtggctttgtcctcagaaacagaggtagccctggccagggacatgacactgcccccggaaaccaacgtgatcttgaccaaggataaagcactacctttagaagcagaggtggccccagtcaaggacatggctcaactcccagaaacagaaatagccccggccaaggatgtggctccgtccacagtaaaagaagtgggcttgttgaaggacatgtctccactatcagaaacagaaatggctctgggcaaggatgtgactccacctccagaaacagaagtagttctcatcaagaacgtatgtctgcctccagaaatggaggtggccctgactgaggatcaggtcccagccctcaaaacagaagcacccctggctaaggatggggttctgaccctggccaacaatgtgactccagccaaagatgttccaccactctcagaaacagaggcaacaccagttccaattaaagacatggaaattgcacaaacacaaaaaggaataagtgaggattcccatttagaatctctgcaggatgtggggcagtcagctgcacctactttcatgatttcaccagaaaccgtcacaggaacggggaaaaagtgcagcttgccggccgaggaggattctgtgttagaaaaactaggggaaaggaaaccatgcaacagtcaaccttctgagctttcttcagagacctcaggaatagccaggccagaagaaggaaggcctgtggtgagtgggacaggaaatgacatcaccaccccaccgaacaaggagctcccaccaagcccagagaagaaaacaaagcctttggccaccactcaacctgcaaagacttcaacatcgaaagccaaaacacagcccacttctctccctaagcagccagctcccaccaccattggtgggttgaataaaaaacccatgagccttgcttcaggcttagtgccagctgccccacccaaacgccctgccgtcgcctctgccaggccttccatcttaccttcaaaagacgtgaagccaaag

SEQ ID NO: 1095 - DNA, 2761 bp, Homo sapiens
ctgggcggggccgggaagcggcagtggcggctacgcgcgcgggggtgcgcgcgggaacgaccgggaaacaccgcgagggccggggtgggccaggctgtggggacgacgggctgcgacgatggccgcagcggcgggcggcggcgggccggggacagcggtaggcgccacgggctcggggattgcggcggcagccgcaggcctagctgtttatcgacggaaggatgggggcccggccaccaagttttgggagagcccggagacggtgtcccagctggattcggtgcgggtctggctgggcaagcactacaagaagtatgttcatgcggatgctcctaccaataaaacactggctgggctggtggtgcagcttcttcagttccaggaagatgcctttgggaagcatgtcaccaacccggccttcaccaaactccctgcaaagtgtttcatggatttcaaagctggaggcgccttatgtcacattcttggggctgcttacaagtataaaaatgaacagggatggcggaggtttgacctacagaacccatctcgaatggatcgtaatgtggaaatgtttatgaacattgaaaaaacattggtgcagaacaattgtttgaccagacccaacatctacctcattccagacattgatctgaagttggctaacaaattgaaagatatcatcaaacgacatcagggaacatttacggatgagaagtcaaaagcttcccaccacatttacccatattcttcctcacaagacgatgaagaatggttgagaccggtgatgagaaaagagaagcaagtgttagtgcattggggcttttacccagacagctatgatacttgggtccatagtaatgatgttgatgctgaaattgaagatccaccaattccagaaaaaccatggaaggttcatgtgaaatggattttggacactgatattttcaatgaatggatgaatgaggaggattatgaggtggatgaaaataggaagcctgtgagttttcgtcagcggatttcaaccaagaatgaagagccagtcagaagtccagaaagaagagatagaaaagcatcagctaatgctcgaaagaggaaacattcgccttcgcctccccctccgacaccaacagaatcacggaagaagagtgggaagaaaggccaagctagcctttatgggaagcgcagaagtcagaaagaggaagatgagcaagaagatctaaccaaggatatggaagacccaacacctgtacccaatatagaagaagtagtacttcccaaaaatgtgaacctaaagaaagatagtgaaaatacacctgttaaaggaggaactgtagcggatctagatgagcaggatgaagaaacagtcacagcaggaggaaaggaagatgaagatcctgccaaaggtgatcagagtcgatcagttgaccttggggaagataatgtgacagagcagaccaatcacattattattcctagttatgcatcatggtttgattataactgtattcatgtgattgaacggcgtgctcttcctgagttcttcaatggaaaaaacaaatccaagactccagaaatatacttggcatatcgaaattttatgattgacacgtatcgtctaaacccccaagagtatttaactagcactgcttgtcggaggaacttgactggagatgtgtgtgctgtgatgagggtccatgcctttttagagcagtggggactcgttaattaccaagttgacccggaaagtagacccatggcaatgggacctcctcctactcctcattttaatgtattagctgataccccctctgggcttgtgcctctgcatcttcgatcacctcaggttcctgctgctcaacagatgctaaattttcctgagaaaaacaaggaaaaaccagttgatttgcagaactttggtctccgtactgacatttactccaagaaaacattagcaaagagtaaaggtgctagtgctggaagagaatggactgaacaggagacccttctactcctggaggccctggagatgtacaaggatgattggaacaaagtgtcggaacatgttggaagtcgtactcaggatgaatgcatcctccactttttgagacttcccattgaggacccataccttgagaattcagatgcttcccttgggcctttggcctaccagcctgtccccttcagtcagtcaggaaatccagttatgagtactgttgcttttttggcatctgtggtggaccctcgcgtggcatctgctgcagcaaaagcggctttggaggagttttctcgggtccgggaggaggtaccactggaattggttgaagctcatgtcaagaaagtacaagaagcagcacgagcctctgggaaagtggatcccacctacggtctggagagcagctgcattgcaggcacagggcccgatgagccagagaagcttggaatagccaggccagaagaaggaaggcctgtggtgagtgggacaggaaatgacatcaccaccccaccgaacaaggagctcccaccaagcccagagaagaaaacaaagcctttggccaccactcaacctgcaaagacttcaacatcgaaagccaaaacacagcccacttctctccctaagcagccagctcccaccaccattggtgggttgaataaaaaacccatgagccttgcttcaggcttagtgccagctgccccacccaaacgccctgccgtcgcctctgccaggccttccatcttaccttcaaaagacgtgaagccaaag

SEQ ID NO: 1096 - DNA, 4240 bp, Homo sapiens
aaaaaccggcgctcactagggcagaatgcagcctacggaggatggcggaagaggcggctgaggccgcaggacgtgctattccaagtatgttcatgcggatgctcctaccaataaaacactggctgggctggtggtgcagcttcttcagttccaggaagatgcctttgggaagcatgtcaccaacccggccttcaccaaactccctgcaaagtgtttcatggatttcaaagctggaggcgccttatgtcacattcttggggctgcttacaagtataaaaatgaacagggatggcggaggtttgacctacagaacccatctcgaatggatcgtaatgtggaaatgtttatgaacattgaaaaaacattggtgcagaacaattgtttgaccagacccaacatctacctcattccagacattgatctgaagttggctaacaaattgaaagatatcatcaaacgacatcagggaacatttacggatgagaagtcaaaagcttcccaccacatttacccatattcttcctcacaagacgatgaagaatggttgagaccggtgatgagaaaagagaagcaagtgttagtgcattggggcttttacccagacagctatgatacttgggtccatagtaatgatgttgatgctgaaattgaagatccaccaattccagaaaaaccatggaaggttcatgtgaaatggattttggacactgatattttcaatgaatggatgaatgaggaggattatgaggtggatgaaaataggaagcctgtgagttttcgtcagcggatttcaaccaagaatgaagagccagtcagaagtccagaaagaagagatagaaaagcatcagctaatgctcgaaagaggaaacattcgccttcgcctccccctccgacaccaacagaatcacggaagaagagtgggaagaaaggccaagctagcctttatgggaagcgcagaagtcagaaagaggaagatgagcaagaagatctaaccaaggatatggaagacccaacacctgtacccaatatagaagaagtagtacttcccaaaaatgtgaacctaaagaaagatagtgaaaatacacctgttaaaggaggaactgtagcggatctagatgagcaggatgaagaaacagtcacagcaggaggaaaggaagatgaagatcctgccaaaggtgatcagagtcgatcagttgaccttggggaagataatgtgacagagcagaccaatcacattattattcctagttatgcatcatggtttgattataactgtattcatgtgattgaacggcgtgctcttcctgagttcttcaatggaaaaaacaaatccaagactccagaaatatacttggcatatcgaaattttatgattgacacgtatcgtctaaacccccaagagtatttaactagcactgcttgtcggaggaacttgactggagatgtgtgtgctgtgatgagggtccatgcctttttagagcagtggggactcgttaattaccaagttgacccggaaagtagacccatggcaatgggacctcctcctactcctcattttaatgtattagctgataccccctctgggcttgtgcctctgcatcttcgatcacctcaggttcctgctgctcaacagatgctaaattttcctgagaaaaacaaggaaaaaccagttgatttgcagaactttggtctccgtactgacatttactccaagaaaacattagcaaagagtaaaggtgctagtgctggaagagaatggactgaacaggagacccttctactcctggaggccctggagatgtacaaggatgattggaacaaagtgtcggaacatgttggaagtcgtactcaggatgaatgcatcctccactttttgagacttcccattgaggacccataccttgagaattcagatgcttcccttgggcctttggcctaccagcctgtccccttcagtcagtcaggaaatccagttatgagtactgttgcttttttggcatctgtggtggaccctcgcgtggcatctgctgcagcaaaagcggctttggaggagttttctcgggtccgggaggaggtaccactggaattggttgaagctcatgtcaagaaagtacaagaagcagcacgagcctctgggaaagtggatcccacctacggtctggagagcagctgcattgcaggcacagggcccgatgagccagagaagcttgggtctccaactgaattccttgaagagaaaatggcctaccaggaatacccaaatagccagaactggccagaagataccaacttttgtttccaacctgagcaagtggtcgatcctatccagactgatccctttaagatgtaccatgatgatgacctggcagatttggtctttccctccagtgcgacagctgatacttcaatatttgcaggacaaaatgatcccttgaaagacagttacggtatgtctccctgcaacacagctgttgtacctcaggggtggtctgtggaagccttaaactctccacactcagagtcctttgtttccccagaggctgttgcagaacctcctcagccaacggcagttcccttagagctagccaaggagatagaaatggcatcagaagagaggccaccagcacaagcattggaaataatgatgggactgaagactactgacatggcaccatctaaagaaacagagatggccctcgccaaggacatggcactagctacaaaaaccgaggtggcattggctaaagatatggaatcacccaccaaattagatgtgacactggccaaggacatgcagccatccatggaatcagatatggccctagtcaaggacatggaactacccacagaaaaagaagtggccctggttaaggatgtcagatggcccacagaaacagatgtatcttcagccaagaatgtggtactgcccacagaaacagaggtagccccagccaaggatgtgacactgttgaaagaaacagagagggcatctcctataaaaatggacttagccccttccaaggacatgggaccacccaaagaaaacaagaaagaaacagagagggcatctcctataaaaatggacttggctccttccaaggacatgggaccacccaaagaaaacaagatagtcccagccaaggatttggtattactctcagaaatagaggtggcacaggctaatgacattatatcatccacagaaatatcctctgctgagaaggtggctttgtcctcagaaacagaggtagccctggccagggacatgacactgcccccggaaaccaacgtgatcttgaccaaggataaagcactacctttagaagcagaggtggccccagtcaaggacatggctcaactcccagaaacagaaatagccccggccaaggatgtggctccgtccacagtaaaagaagtgggcttgttgaaggacatgtctccactatcagaaacagaaatggctctgggcaaggatgtgactccacctccagaaacagaagtagttctcatcaagaacgtatgtctgcctccagaaatggaggtggccctgactgaggatcaggtcccagccctcaaaacagaagcacccctggctaaggatggggttctgaccctggccaacaatgtgactccagccaaagatgttccaccactctcagaaacagaggcaacaccagttccaattaaagacatggaaattgcacaaacacaaaaaggaataagtgaggattcccatttagaatctctgcaggatgtggggcagtcagctgcacctactttcatgatttcaccagaaaccgtcacaggaacggggaaaaagtgcagcttgccggccgaggaggattctgtgttagaaaaactaggggaaaggaaaccatgcaacagtcaaccttctgagctttcttcagagacctcaggaatagccaggccagaagaaggaaggcctgtggtgagtgggacaggaaatgacatcaccaccccaccgaacaaggagctcccaccaagcccagagaagaaaacaaagcctttggccaccactcaacctgcaaagacttcaacatcgaaagccaaaacacagcccacttctctccctaagcagccagctcccaccaccattggtgggttgaataaaaaacccatgagccttgcttcaggcttagtgccagctgccccacccaaacgccctgccgtcgcctctgccaggccttccatcttaccttcaaaagacgtgaagccaaag

SEQ ID NO: 1097 - DNA, 6240 bp, Homo sapiens
ctgggcggggccgggaagcggcagtggcggctacgcgcgcgggggtgcgcgcgggaacgaccgggaaacaccgcgagggccggggtgggccaggctgtggggacgacgggctgcgacgatggccgcagcggcgggcggcggcgggccggggacagcggtaggcgccacgggctcggggattgcggcggcagccgcaggcctagctgtttatcgacggaaggatgggggcccggccaccaagttttgggagagcccggagacggtgtcccagctggattcggtgcgggtctggctgggcaagcactacaagaagtatgttcatgcggatgctcctaccaataaaacactggctgggctggtggtgcagcttcttcagttccaggaagatgcctttgggaagcatgtcaccaacccggccttcaccaaactccctgcaaagtgtttcatggatttcaaagctggaggcgccttatgtcacattcttggggctgcttacaagtataaaaatgaacagggatggcggaggtttgacctacagaacccatctcgaatggatcgtaatgtggaaatgtttatgaacattgaaaaaacattggtgcagaacaattgtttgaccagacccaacatctacctcattccagacattgatctgaagttggctaacaaattgaaagatatcatcaaacgacatcagggaacatttacggatgagaagtcaaaagcttcccaccacatttacccatattcttcctcacaagacgatgaagaatggttgagaccggtgatgagaaaagagaagcaagtgttagtgcattggggcttttacccagacagctatgatacttgggtccatagtaatgatgttgatgctgaaattgaagatccaccaattccagaaaaaccatggaaggttcatgtgaaatggattttggacactgatattttcaatgaatggatgaatgaggaggattatgaggtggatgaaaataggaagcctgtgagttttcgtcagcggatttcaaccaagaatgaagagccagtcagaagtccagaaagaagagatagaaaagcatcagctaatgctcgaaagaggaaacattcgccttcgcctccccctccgacaccaacagaatcacggaagaagagtgggaagaaaggccaagctagcctttatgggaagcgcagaagtcagaaagaggaagatgagcaagaagatctaaccaaggatatggaagacccaacacctgtacccaatatagaagaagtagtacttcccaaaaatgtgaacctaaagaaagatagtgaaaatacacctgttaaaggaggaactgtagcggatctagatgagcaggatgaagaaacagtcacagcaggaggaaaggaagatgaagatcctgccaaaggtgatcagagtcgatcagttgaccttggggaagataatgtgacagagcagaccaatcacattattattcctagttatgcatcatggtttgattataactgtattcatgtgattgaacggcgtgctcttcctgagttcttcaatggaaaaaacaaatccaagactccagaaatatacttggcatatcgaaattttatgattgacacgtatcgtctaaacccccaagagtatttaactagcactgcttgtcggaggaacttgactggagatgtgtgtgctgtgatgagggtccatgcctttttagagcagtggggactcgttaattaccaagttgacccggaaagtagacccatggcaatgggacctcctcctactcctcattttaatgtattagctgataccccctctgggcttgtgcctctgcatcttcgatcacctcaggttcctgctgctcaacagatgctaaattttcctgagaaaaacaaggaaaaaccagttgatttgcagaactttggtctccgtactgacatttactccaagaaaacattagcaaagagtaaaggtgctagtgctggaagagaatggactgaacaggagacccttctactcctggaggccctggagatgtacaaggatgattggaacaaagtgtcggaacatgttggaagtcgtactcaggatgaatgcatcctccactttttgagacttcccattgaggacccataccttgagaattcagatgcttcccttgggcctttggcctaccagcctgtccccttcagtcagtcaggaaatccagttatgagtactgttgcttttttggcatctgtggtggaccctcgcgtggcatctgctgcagcaaaagcggctttggaggagttttctcgggtccgggaggaggtaccactggaattggttgaagctcatgtcaagaaagtacaagaagcagcacgagcctctgggaaagtggatcccacctacggtctggagagcagctgcattgcaggcacagggcccgatgagccagagaagcttggaatagccaggccagaagaaggaaggcctgtggtgagtgggacaggaaatgacatcaccaccccaccgaacaaggagctcccaccaagcccagagaagaaaacaaagcctttggccaccactcaacctgcaaagacttcaacatcgaaagccaaaacacagcccacttctctccctaagcagccagctcccaccaccattggtgggttgaataaaaaacccatgagccttgcttcaggcttagtgccagctgccccacccaaacgccctgccgtcgcctctgccaggccttccatcttaccttcaaaagacgtgaagccaaagcccattgcagatgcaaaggctcctgagaagcgggcctcaccatccaagccagcttctgccccagcctccagatctgggtccaagagcactcagactgttgcaaaaaccacaacagctgctgctgttgcctcaactggcccaagcagtaggagcccctccacgctcctgcccaagaagcccactgccattaagactgagggaaaacctgcagaagtcaagaagatgactgcaaagtctgtaccagctgacttgagtcgcccaaagagcacctccaccagttccatgaagaaaaccaccactctcagtgggacagcccccgctgcaggggtggttcccagccgagtcaaggccacacccatgccctcccggccctccacaactcctttcatagacaagaagcccacctcggccaaacccagctccaccaccccccggctcagccgcctggccaccaatacttctgctcctgatctgaagaatgtccgctccaaggttggctccacggaaaacatcaagcatcagcctggaggaggccgggccaaagtagagaaaaaaacagaggcagctgctacaacccgaaagcctgaatctaatgcagtcactaaaacagccggcccaattgcaagtgcacagaaacaacctgcggggaaagtccagatagtctccaaaaaagtgagctacagccatattcagtccaagtgtggttccaaggacaatattaagcatgtccctggaggtggtaatgttcagattcagaacaagaaagtggacatctctaaggtctcctccaagtgtgggtctaaggctaacatcaagcacaagcctggtggaggagatgtcaagattgaaagtcagaagttgaacttcaaggagaaggcccaggccaaggtgggatccctcgataatgtgggccacctacctgcaggaggtgctgtgaagactgagggcggtggcagcgaggctcctctgtgtccgggtccccctgctggggaggagccggccatctctgaggcagcgcctgaagctggcgcccccacttcagccagtggcctcaatggccaccccaccctgtcagggggtggtgaccaaagggaggcccagaccttggacagccagatccaggagacaagcatctaatgatgacattctggtctcgtcttccgtctcccccgtgttcccctcttgtctcccctgttcccctctcccttccctcctcccatgtcactgcagattgagacctacaggctgacgttccgggcaaatgccagggcccgcaccgaccacggggccgacattgtctcccgccccccacacttccctggcggccccaactcgggctcccgggtccttggccccctttcccgggctgtccactagaccagtgagcgcttgggcgccgtgctgggcagcccgctaggctcgccttccctcctgctttgcgtgcccggggcagcagcagccctgccccacacctcctctcactccccagcctgggcccatctccctgctttggtcttgccccatcactgcgccactgctccgtggaggaggttgggagggggttggggtggttgaggctaagttgggatctaggagaggagaaccagattctatcctcatctttttttggttctttggtccaaacccaaaagaaactgacatgccctcccttctccctggatctacctggagggaagagtggaggtggattccgagtggtgacaggacgctgaccgtggagcttaagccactgcctctccctctggtcccacaaatgggcgcccccccctccccatgcaggtggtgtcgggcccttcttgctgccctgccccaagttgggggtcagtgctgcctgtccccatgcttaacatacccgcctagctgctgtcacatttttcttgttttgtccttttatttttttctaataacctaaaaactggcaaaatagttctgcaggttgaagccatgtctacatgaaagtcctcagtaagtgttagagggaacagggcggagatatccttatgccacccccgctggaggatgtgggcagcttagggccctggaggcggtgcggcagggaagaggggtgcagaggctgtggctggtgagccggtcaggcacacaaggggcccttggagcgtggactggttggttttgccattttgttgtgtgtatgctgcttttcttttctaaccaagaggctggttttggcatctctgtcccattccctgggatctggtggtcagccctaggataaaaagccagggctggagaacaagaaagggccaggagatggaattccttcaggccggcacccacaccctaggacatgtaagccctcatgtccaagggagcctcatgcagatagtaggaaatcaggtctggaaatttaaaaataaaaggcatgagactaaggctatctgcttcccttatgccctgactggagaggggagggaggagaggcaaggcccacagagggcatcccagctaggccttgggatggctgcagtgaggagaaatcccgggaactgtattgacacaaagattcttattgcacttgtattttttgtattaaagtttgcatggtttctaataaaggattcaaacataagtttgtagtgaaatggcctgggagattccaagggcttctctggagggggattggctgcagtgtagatttgcctctgaggaggctgccccagacttggcctcctcatgccccctcctgacctctgcccttctctggtcctggcatccctggagaaggtaggggtcttgacctaagtttagatttgatctccatgtgcagggaggctgtcctgggcctgacaggtcctccccctttctgaggtagcagtgccttgtggaggtttgacaccatgtccctagctccccaagcacacaccaggaaactgcaggggctcacggaggaagtgctgcctgggccagggggaccagctttcctccgtagagaccatgtgcagaacacttctgctgtgccaagaacatgagggagccagtgttttgtcagcaggaagaaagggcctgctgggatgaaagtgggaaggaaacagggttgcgtagtcaggagacacctcaggggcaacagcacaggcccagagtacctgctgcctccactgcgtctgtcctggggtcatgaggatgctgaggttgacgacaggttccaggtcctttcactcctttggccaaaggttgggggtaggtggcccaagtggcgtgctctctaggtagacaacaggagtggtcagagttccctcaaaggatcctccactccagagcacctgagaaggccgggaccagaggccctgtgtgatgtgtactccgcagctgtttggggtgggacatttctgtacttctcgatttgcttatggctcagccattacctgtgtcagtccatgattctgttgtaacagttttaagagtaaataaataaagctgcctgatgtcccatcacgcag

SEQ ID NO: 1098 - DNA, 2877 bp, Homo sapiens
ctgggcggggccgggaagcggcagtggcggctacgcgcgcgggggtgcgcgcgggaacgaccgggaaacaccgcgagggccggggtgggccaggctgtggggacgacgggctgcgacgatggccgcagcggcgggcggcggcgggccggggacagcggtaggcgccacgggctcggggattgcggcggcagccgcaggcctagctgtttatcgacggaaggatgggggcccggccaccaagttttgggagagcccggagacggtgtcccagctggattcggtgcgggtctggctgggcaagcactacaagaagtatgttcatgcggatgctcctaccaataaaacactggctgggctggtggtgcagcttcttcagttccaggaagatgcctttgggaagcatgtcaccaacccggccttcaccaaactccctgttcagattcagaacaagaaagtggacatctctaaggtctcctccaagtgtgggtctaaggctaacatcaagcacaagcctggtggaggagatgtcaagattgaaagtcagaagttgaacttcaaggagaaggcccaggccaaggtgggatccctcgataatgtgggccacctacctgcaggaggtgctgtgaagattgagacctacaggctgacgttccgggcaaatgccagggcccgcaccgaccacggggccgacattgtctcccgccccccacacttccctggcggccccaactcgggctcccgggtccttggccccctttcccgggctgtccactagaccagtgagcgcttgggcgccgtgctgggcagcccgctaggctcgccttccctcctgctttgcgtgcccggggcagcagcagccctgccccacacctcctctcactccccagcctgggcccatctccctgctttggtcttgccccatcactgcgccactgctccgtggaggaggttgggagggggttggggtggttgaggctaagttgggatctaggagaggagaaccagattctatcctcatctttttttggttctttggtccaaacccaaaagaaactgacatgccctcccttctccctggatctacctggagggaagagtggaggtggattccgagtggtgacaggacgctgaccgtggagcttaagccactgcctctccctctggtcccacaaatgggcgcccccccctccccatgcaggtggtgtcgggcccttcttgctgccctgccccaagttgggggtcagtgctgcctgtccccatgcttaacatacccgcctagctgctgtcacatttttcttgttttgtccttttatttttttctaataacctaaaaactggcaaaatagttctgcaggttgaagccatgtctacatgaaagtcctcagtaagtgttagagggaacagggcggagatatccttatgccacccccgctggaggatgtgggcagcttagggccctggaggcggtgcggcagggaagaggggtgcagaggctgtggctggtgagccggtcaggcacacaaggggcccttggagcgtggactggttggttttgccattttgttgtgtgtatgctgcttttcttttctaaccaagaggctggttttggcatctctgtcccattccctgggatctggtggtcagccctaggataaaaagccagggctggagaacaagaaagggccaggagatggaattccttcaggccggcacccacaccctaggacatgtaagccctcatgtccaagggagcctcatgcagatagtaggaaatcaggtctggaaatttaaaaataaaaggcatgagactaaggctatctgcttcccttatgccctgactggagaggggagggaggagaggcaaggcccacagagggcatcccagctaggccttgggatggctgcagtgaggagaaatcccgggaactgtattgacacaaagattcttattgcacttgtattttttgtattaaagtttgcatggtttctaataaaggattcaaacataagtttgtagtgaaatggcctgggagattccaagggcttctctggagggggattggctgcagtgtagatttgcctctgaggaggctgccccagacttggcctcctcatgccccctcctgacctctgcccttctctggtcctggcatccctggagaaggtaggggtcttgacctaagtttagatttgatctccatgtgcagggaggctgtcctgggcctgacaggtcctccccctttctgaggtagcagtgccttgtggaggtttgacaccatgtccctagctccccaagcacacaccaggaaactgcaggggctcacggaggaagtgctgcctgggccagggggaccagctttcctccgtagagaccatgtgcagaacacttctgctgtgccaagaacatgagggagccagtgttttgtcagcaggaagaaagggcctgctgggatgaaagtgggaaggaaacagggttgcgtagtcaggagacacctcaggggcaacagcacaggcccagagtacctgctgcctccactgcgtctgtcctggggtcatgaggatgctgaggttgacgacaggttccaggtcctttcactcctttggccaaaggttgggggtaggtggcccaagtggcgtgctctctaggtagacaacaggagtggtcagagttccctcaaaggatcctccactccagagcacctgagaaggccgggaccagaggccctgtgtgatgtgtactccgcagctgtttggggtgggacatttctgtacttctcgatttgcttatggctcagccattacctgtgtcagtccatgattctgttgtaacagttttaagagtaaataaataaagctgcctgatgtcccatcacgcag

SEQ ID NO: 1099 - DNA, 3067 bp, Homo sapiens
ctgggcggggccgggaagcggcagtggcggctacgcgcgcgggggtgcgcgcgggaacgaccgggaaacaccgcgagggccggggtgggccaggctgtggggacgacgggctgcgacgatggccgcagcggcgggcggcggcgggccggggacagcggtaggcgccacgggctcggggattgcggcggcagccgcaggcctagctgtttatcgacggaaggatgggggcccggccaccaagttttgggagagcccggagacggtgtcccagctggattcggtgcgggtctggctgggcaagcactacaagaagtatgttcatgcggatgctcctaccaataaaacactggctgggctggtggtgcagcttcttcagttccaggaagatgcctttgggaagcatgtcaccaacccggccttcaccaaactccctgttcagattcagaacaagaaagtggacatctctaaggtctcctccaagtgtgggtctaaggctaacatcaagcacaagcctggtggaggagatgtcaagattgaaagtcagaagttgaacttcaaggagaaggcccaggccaaggtgggatccctcgataatgtgggccacctacctgcaggaggtgctgtgaagactgagggcggtggcagcgaggctcctctgtgtccgggtccccctgctggggaggagccggccatctctgaggcagcgcctgaagctggcgcccccacttcagccagtggcctcaatggccaccccaccctgtcagggggtggtgaccaaagggaggcccagaccttggacagccagatccaggagacaaattgagacctacaggctgacgttccgggcaaatgccagggcccgcaccgaccacggggccgacattgtctcccgccccccacacttccctggcggccccaactcgggctcccgggtccttggccccctttcccgggctgtccactagaccagtgagcgcttgggcgccgtgctgggcagcccgctaggctcgccttccctcctgctttgcgtgcccggggcagcagcagccctgccccacacctcctctcactccccagcctgggcccatctccctgctttggtcttgccccatcactgcgccactgctccgtggaggaggttgggagggggttggggtggttgaggctaagttgggatctaggagaggagaaccagattctatcctcatctttttttggttctttggtccaaacccaaaagaaactgacatgccctcccttctccctggatctacctggagggaagagtggaggtggattccgagtggtgacaggacgctgaccgtggagcttaagccactgcctctccctctggtcccacaaatgggcgcccccccctccccatgcaggtggtgtcgggcccttcttgctgccctgccccaagttgggggtcagtgctgcctgtccccatgcttaacatacccgcctagctgctgtcacatttttcttgttttgtccttttatttttttctaataacctaaaaactggcaaaatagttctgcaggttgaagccatgtctacatgaaagtcctcagtaagtgttagagggaacagggcggagatatccttatgccacccccgctggaggatgtgggcagcttagggccctggaggcggtgcggcagggaagaggggtgcagaggctgtggctggtgagccggtcaggcacacaaggggcccttggagcgtggactggttggttttgccattttgttgtgtgtatgctgcttttcttttctaaccaagaggctggttttggcatctctgtcccattccctgggatctggtggtcagccctaggataaaaagccagggctggagaacaagaaagggccaggagatggaattccttcaggccggcacccacaccctaggacatgtaagccctcatgtccaagggagcctcatgcagatagtaggaaatcaggtctggaaatttaaaaataaaaggcatgagactaaggctatctgcttcccttatgccctgactggagaggggagggaggagaggcaaggcccacagagggcatcccagctaggccttgggatggctgcagtgaggagaaatcccgggaactgtattgacacaaagattcttattgcacttgtattttttgtattaaagtttgcatggtttctaataaaggattcaaacataagtttgtagtgaaatggcctgggagattccaagggcttctctggagggggattggctgcagtgtagatttgcctctgaggaggctgccccagacttggcctcctcatgccccctcctgacctctgcccttctctggtcctggcatccctggagaaggtaggggtcttgacctaagtttagatttgatctccatgtgcagggaggctgtcctgggcctgacaggtcctccccctttctgaggtagcagtgccttgtggaggtttgacaccatgtccctagctccccaagcacacaccaggaaactgcaggggctcacggaggaagtgctgcctgggccagggggaccagctttcctccgtagagaccatgtgcagaacacttctgctgtgccaagaacatgagggagccagtgttttgtcagcaggaagaaagggcctgctgggatgaaagtgggaaggaaacagggttgcgtagtcaggagacacctcaggggcaacagcacaggcccagagtacctgctgcctccactgcgtctgtcctggggtcatgaggatgctgaggttgacgacaggttccaggtcctttcactcctttggccaaaggttgggggtaggtggcccaagtggcgtgctctctaggtagacaacaggagtggtcagagttccctcaaaggatcctccactccagagcacctgagaaggccgggaccagaggccctgtgtgatgtgtactccgcagctgtttggggtgggacatttctgtacttctcgatttgcttatggctcagccattacctgtgtcagtccatgattctgttgtaacagttttaagagtaaataaataaagctgcctgatgtcccatcacgcag

SEQ ID NO: 1100 - skipped

SEQ ID NO: 1101 - DNA, 5690 bp, Homo sapiens
ccgggagtccgggcagcgttcggcgcgccgggccggggtggcgggcggccccgggaccccggcagctggagaaggagccggagcccggccgggatgagaaggtgacgccgccgggggcgccactcgctttgtgggggaagatgctcgcctactgcgtgcaggatgccaccgtggtggacgtggagaagcggaggaacccctccaagcactacgtgaattttaagaaggacaccacttccaaggcaattcatagtatatttaagaatgctatacaactgctgcaggaaaaaggacttgttttccagaaagatgatggttttgataacctatactatgtaaccagagaagacaaagacctgcacagaaagatccaccggatcattcagcaggactgccagaaaccaaatcacatggagaagggctgtcacttcctgcacatcttggcctgtgctcgcctgagcatccgcccgggcctgagcgaggctgtgctgcagcaagttctggagctcctggaggaccagagtgacattgtcagcacaatggagcactactacacagcgttctgagcagagacacgcagaccagctgaggaggacaaagataaggtggcattcacccccaggctctgactttcagcatcatgcaggggcttatctgtctggaggcagttacctcataataaactataaaatatagtcatcttgggaatgggatttggcataaatgttgttggctcccttctgtccactatgtccttggtgtacaatgactttgatctcagccatgacacaacaagaaaaccctccctgttgagctcctggctggactgtgcgttgttcgcagagcagaatggggaggaaacagtgttggcagcttaactgatgtgtgtggttggagtctcttccatggcaaagggacaccacagggtagtgaacattcaggaactgaggggcatatggcctgatcacacagttctaagcttttcaaaacttcaggttatcagagaccttcctgtgggcctctcttgctggctaagaaccggtttaggggagtagttctccctggatgagtgcttacagtttctgtggctcagttaccagcagtggggttgagacctgggtcgatgctctttacaggcctgcccagagatgggaataaacagggatccacagcgtgactatgtgtttgtcattttccttttatttccttgggaatcgaaaggtgtcccagtacatttccctgcacttacagaggtgcatgactaaatacattgtccctcgatgcccctgaagatcacggaggcagtcagccaattgcctggcaggtggtagatgttattttcagggttgccgctgagtgtgcaggatgtgctgacaccatccagacaaagactcggtatgtgcccagacaggtgatggagtcatgcttttgctcagaatgacaaggtaaaggaaaaacatctgaggtatgttgtaggcctgttctgacagcaaaatgacaaatccagccagcaaaaataaagtgtggagaaagatttggagttaattacagtcatttcacagaaggcactgccttcgtctgctgcatttgctcttgatgtgataagctcttcgtggctcagctggagatcctttaggcctggagagttgctcctctctccgtggaaacaggacagtctttatacgcagaagtccgctgcagctcgatacgtcaggctgagagctagaaccagtagattgcctcctgtcatagacttttgtaatgatgcaaacctttgctgatttctaacagtgattatgtagtggctgccctgcatcttctctgtgtacagaagggtccctagcatagagtctgcctggaatgatgtcctgggcagttcttccttgaggtcagcagctgttccacgttgaatgcatctgattagtggggctgcccaggaaggagttcagaatcagaaggtaaaaagggcatacccttgcctatagcaactctgctcttaggggtttatctcaaggagatggctacacaagtgtgaaaggatggttgcacaaggtgttcattgctgtataatctagaattctatattggggaaaatacctatagggaaaaagttaattacggttcttgggcacaatgaaatactatgcagctatgaaaaaaatgatgaaagcagacagacagtgttgccatggcacactgtccctagtagatttagtgggaagtagatagagttatagatctgtttctatagtataacaccattatctacagctccctgtgtgtatgtatatatccgtagagagagtgtatatttctgcatggaggtctttataaatgtagcacatgtacatatatatatatatacacacacacagtcgaccactcccttctcctggaagtactttccgcgtttggctttcaggacaccaagctctctggttgctccttctcaggttcctttgttcagtgctctgcctccctgaggactcagtcccagacctcttttctatctggcttgctcactggggtgtctccagcagccacatggattataccatctacatgctgtctaacacctcagtttaaacccagaatgggcctcttccctgaactgcagacccctatattcagtttgctactgacatctccacttaggtctctaatggacatctcagatttcacaggcccaaagccaggctcccaattactcctgaccccaggcttgctcctgatagtgacatgaggcagccaaatgcctaggcagagaggggagggtcccaaatgaaaccccacgttcaagcaaagatcagcctgaaggctaaaagaccagattgctggtcctggatgaaacccaccacgcagagtgggaacttctgttcctgtttgcccaccctttcccaattgttctttctgaataacgccttaaccaatcgaatgttgccttttccagtaatacctacagcctgcccctccccccattctgagcccataaaaagacccagactcccccatattaaggggactttcctgcctttgggtagggggaccacccccacgtctcctctctgttgaaaactgtttcatcactcaataaaactcccagctttgctcactcttccactgtcagcacattctcattcttctttggtgctgggcaagaactcaaccagtgtggaagccatacttggcccaggcgggtgaagtgggcgggccgtctcctgcagcaggtagcatggtcaagcgaggcccaggtgggccgtcaccagccagaggtccctggcttgcaaagtgaccgagaaaaaaatcctgtgccactcctttggaaaatgtccctgattcaggaagaggtagctccatccagttgctcaaaccaaatccattggcttctttctttctatcatacctcacatccaatctgtctgcaagtcttttggctctaccttcagaatatctccagaatcttaactgcttcaccctcctccccggcctcctcagtcctctctgcttccgccctggcccctcttgggctgttcacagcacagcagctgttgccaccctgttaatgctcccactctcctacagccttcggtcttgccccaggtaggagcctgaggctgcacagaggtcagcacggccccgcttaccctgccctcccagcccagccgcacgggccttgcacacatgcctcggcatattcctgccttagggctggtgctcctgctatttcctcttcccaggtaaccatgtgaagtgcctccctctgccctctttccagcctttacttgagtgtcaccttctcagtgaggcctgccctcattcctctttcgctgtttgcaacccatctcctgtcccccttcccagaactccctttcctacttcgtttttcttcacagtacttgatactgcctaacacactccatggtttcttacttgccctgtttattattttcccccaatagacagaatgttccatgatggcagaattctctgttttgtttccttccatgtccccagcacctagaacagtgcctgacgcatctcctaagcaatacgaccaataagtatgtgtctggctgccttccggctgccagtgtctgcctctttcctaggggcagtggttgcgggggtgctttctcacatgtcttagtaggctgtgcaggctggaagtgctcagaagtcacacccccagggagcagcctcagccaacagcaccttggctgtaaatgccccagctccctcgccctcaggtaagcattgctgaggcacacgttccatactcttttccacagttcctccgtgggactgagcaccacccagccacccacaggagcagctaacctgataaccaccagcctcaccctccctgccttacttccccgctcccctttaccacatgctgacctcccagatgcatttcttgctttccggtctctgtctcaggattggctcctggatgaacacaaactaacactatgttcacaaatatatttgggaaatgctggatgaataattatacacatcagacagattactagaaattctcaccaaagggatgcacatgttacctctgcatggtgagatctcaggtgctttttaccccacatagctatcctttggcatttttataattagcaagtgctcactcttccactgtcagtacattctcattcttcttgggcgctggacaagaattcaaccggtgtgtaagccagactcggcccgggcagtctcaaactcctgactccttatataatttctacaaaaattataaagctatttcccactccccaccccacattcatgtaacctgaagcatgagtaaaccaagaatgaggtaggcctctgtcttctaagcaacatcagaactctaagaacatgagggactcttagaaaactctctggagctaaccacagctgggtcactgctcatgtactgaagaccagccagagggttcccctgaaaaggagggaaactgagcaaacattctccagttctcttagtgtgcacatgtttcaggaggtgtgaaccccacatgtagcttgtgtaggcaagaagacaaatagtgctactgtctggtcaaggatttgtttgaagagccatgattatgcccatatggtaagccaccagtgctccccatccctgtaagacacttctttctcattattttctcctctgatggtgtgccaggatgctggccaagagaagccaagtggaaagaaggctgttcagtgacaaggaacctaagacttagtgccaaggactgaaaccaagtaaacttgtaattttccatgatggaaacatctacactttctcattagtggcctctacagcagttgccccaaagaagcgtctcattgtttttttactacatttatgtgaagcatacaggcaaactcagaaagactgtgataaggctcgccagagatgcctgcacaggtgctgggggaaaagcaggaccatcctgaagggagatggtgtctgtggacaaagaactctgcagtggttcttatttgcatgatttctgctggtggaggctgtaaatgtgagctcaaactcccacataagtgagttttcattgtaatccagaatgtttttaaatcaccctacttctattgaacttgcactatcatctgttaacctctactgtatttattaaataaacctgaataggtaaatcacagtacagcaa

SEQ ID NO: 1102 - DNA, 5801 bp, Homo sapiens
ccgggagtccgggcagcgttcggcgcgccgggccggggtggcgggcggccccgggaccccggcagctggagaaggagccggagcccggccgggatgagaaggtgacgccgccgggggcgccactcgctttgtgggggaagatgctcgcctactgcgtgcaggatgccaccgtggtggacgtggagaagcggaggaacccctccaagcactacgtatacataatcaatgtgacctggtctgactccacctcccagactatctaccggaggtacagcaagttctttgacctgcagatgcagcttttggataagtttcccattgaaggtggccagaaggaccccaagcaaaggatcatccccttcctcccaggcaagatcctcttccgcagaagccacatccgggacgtagctgtgaagagactgaagcccatcgatgaatactgccgggtaaccagagaagacaaagacctgcacagaaagatccaccggatcattcagcaggactgccagaaaccaaatcacatggagaagggctgtcacttcctgcacatcttggcctgtgctcgcctgagcatccgcccgggcctgagcgaggctgtgctgcagcaagttctggagctcctggaggaccagagtgacattgtcagcacaatggagcactactacacagcgttctgagcagagacacgcagaccagctgaggaggacaaagataaggtggcattcacccccaggctctgactttcagcatcatgcaggggcttatctgtctggaggcagttacctcataataaactataaaatatagtcatcttgggaatgggatttggcataaatgttgttggctcccttctgtccactatgtccttggtgtacaatgactttgatctcagccatgacacaacaagaaaaccctccctgttgagctcctggctggactgtgcgttgttcgcagagcagaatggggaggaaacagtgttggcagcttaactgatgtgtgtggttggagtctcttccatggcaaagggacaccacagggtagtgaacattcaggaactgaggggcatatggcctgatcacacagttctaagcttttcaaaacttcaggttatcagagaccttcctgtgggcctctcttgctggctaagaaccggtttaggggagtagttctccctggatgagtgcttacagtttctgtggctcagttaccagcagtggggttgagacctgggtcgatgctctttacaggcctgcccagagatgggaataaacagggatccacagcgtgactatgtgtttgtcattttccttttatttccttgggaatcgaaaggtgtcccagtacatttccctgcacttacagaggtgcatgactaaatacattgtccctcgatgcccctgaagatcacggaggcagtcagccaattgcctggcaggtggtagatgttattttcagggttgccgctgagtgtgcaggatgtgctgacaccatccagacaaagactcggtatgtgcccagacaggtgatggagtcatgcttttgctcagaatgacaaggtaaaggaaaaacatctgaggtatgttgtaggcctgttctgacagcaaaatgacaaatccagccagcaaaaataaagtgtggagaaagatttggagttaattacagtcatttcacagaaggcactgccttcgtctgctgcatttgctcttgatgtgataagctcttcgtggctcagctggagatcctttaggcctggagagttgctcctctctccgtggaaacaggacagtctttatacgcagaagtccgctgcagctcgatacgtcaggctgagagctagaaccagtagattgcctcctgtcatagacttttgtaatgatgcaaacctttgctgatttctaacagtgattatgtagtggctgccctgcatcttctctgtgtacagaagggtccctagcatagagtctgcctggaatgatgtcctgggcagttcttccttgaggtcagcagctgttccacgttgaatgcatctgattagtggggctgcccaggaaggagttcagaatcagaaggtaaaaagggcatacccttgcctatagcaactctgctcttaggggtttatctcaaggagatggctacacaagtgtgaaaggatggttgcacaaggtgttcattgctgtataatctagaattctatattggggaaaatacctatagggaaaaagttaattacggttcttgggcacaatgaaatactatgcagctatgaaaaaaatgatgaaagcagacagacagtgttgccatggcacactgtccctagtagatttagtgggaagtagatagagttatagatctgtttctatagtataacaccattatctacagctccctgtgtgtatgtatatatccgtagagagagtgtatatttctgcatggaggtctttataaatgtagcacatgtacatatatatatatatacacacacacagtcgaccactcccttctcctggaagtactttccgcgtttggctttcaggacaccaagctctctggttgctccttctcaggttcctttgttcagtgctctgcctccctgaggactcagtcccagacctcttttctatctggcttgctcactggggtgtctccagcagccacatggattataccatctacatgctgtctaacacctcagtttaaacccagaatgggcctcttccctgaactgcagacccctatattcagtttgctactgacatctccacttaggtctctaatggacatctcagatttcacaggcccaaagccaggctcccaattactcctgaccccaggcttgctcctgatagtgacatgaggcagccaaatgcctaggcagagaggggagggtcccaaatgaaaccccacgttcaagcaaagatcagcctgaaggctaaaagaccagattgctggtcctggatgaaacccaccacgcagagtgggaacttctgttcctgtttgcccaccctttcccaattgttctttctgaataacgccttaaccaatcgaatgttgccttttccagtaatacctacagcctgcccctccccccattctgagcccataaaaagacccagactcccccatattaaggggactttcctgcctttgggtagggggaccacccccacgtctcctctctgttgaaaactgtttcatcactcaataaaactcccagctttgctcactcttccactgtcagcacattctcattcttctttggtgctgggcaagaactcaaccagtgtggaagccatacttggcccaggcgggtgaagtgggcgggccgtctcctgcagcaggtagcatggtcaagcgaggcccaggtgggccgtcaccagccagaggtccctggcttgcaaagtgaccgagaaaaaaatcctgtgccactcctttggaaaatgtccctgattcaggaagaggtagctccatccagttgctcaaaccaaatccattggcttctttctttctatcatacctcacatccaatctgtctgcaagtcttttggctctaccttcagaatatctccagaatcttaactgcttcaccctcctccccggcctcctcagtcctctctgcttccgccctggcccctcttgggctgttcacagcacagcagctgttgccaccctgttaatgctcccactctcctacagccttcggtcttgccccaggtaggagcctgaggctgcacagaggtcagcacggccccgcttaccctgccctcccagcccagccgcacgggccttgcacacatgcctcggcatattcctgccttagggctggtgctcctgctatttcctcttcccaggtaaccatgtgaagtgcctccctctgccctctttccagcctttacttgagtgtcaccttctcagtgaggcctgccctcattcctctttcgctgtttgcaacccatctcctgtcccccttcccagaactccctttcctacttcgtttttcttcacagtacttgatactgcctaacacactccatggtttcttacttgccctgtttattattttcccccaatagacagaatgttccatgatggcagaattctctgttttgtttccttccatgtccccagcacctagaacagtgcctgacgcatctcctaagcaatacgaccaataagtatgtgtctggctgccttccggctgccagtgtctgcctctttcctaggggcagtggttgcgggggtgctttctcacatgtcttagtaggctgtgcaggctggaagtgctcagaagtcacacccccagggagcagcctcagccaacagcaccttggctgtaaatgccccagctccctcgccctcaggtaagcattgctgaggcacacgttccatactcttttccacagttcctccgtgggactgagcaccacccagccacccacaggagcagctaacctgataaccaccagcctcaccctccctgccttacttccccgctcccctttaccacatgctgacctcccagatgcatttcttgctttccggtctctgtctcaggattggctcctggatgaacacaaactaacactatgttcacaaatatatttgggaaatgctggatgaataattatacacatcagacagattactagaaattctcaccaaagggatgcacatgttacctctgcatggtgagatctcaggtgctttttaccccacatagctatcctttggcatttttataattagcaagtgctcactcttccactgtcagtacattctcattcttcttgggcgctggacaagaattcaaccggtgtgtaagccagactcggcccgggcagtctcaaactcctgactccttatataatttctacaaaaattataaagctatttcccactccccaccccacattcatgtaacctgaagcatgagtaaaccaagaatgaggtaggcctctgtcttctaagcaacatcagaactctaagaacatgagggactcttagaaaactctctggagctaaccacagctgggtcactgctcatgtactgaagaccagccagagggttcccctgaaaaggagggaaactgagcaaacattctccagttctcttagtgtgcacatgtttcaggaggtgtgaaccccacatgtagcttgtgtaggcaagaagacaaatagtgctactgtctggtcaaggatttgtttgaagagccatgattatgcccatatggtaagccaccagtgctccccatccctgtaagacacttctttctcattattttctcctctgatggtgtgccaggatgctggccaagagaagccaagtggaaagaaggctgttcagtgacaaggaacctaagacttagtgccaaggactgaaaccaagtaaacttgtaattttccatgatggaaacatctacactttctcattagtggcctctacagcagttgccccaaagaagcgtctcattgtttttttactacatttatgtgaagcatacaggcaaactcagaaagactgtgataaggctcgccagagatgcctgcacaggtgctgggggaaaagcaggaccatcctgaagggagatggtgtctgtggacaaagaactctgcagtggttcttatttgcatgatttctgctggtggaggctgtaaatgtgagctcaaactcccacataagtgagttttcattgtaatccagaatgtttttaaatcaccctacttctattgaacttgcactatcatctgttaacctctactgtatttattaaataaacctgaataggtaaatcacagtacagcaa

SEQ ID NO: 1103-1104 - skipped (2 entries)

SEQ ID NO: 1105 - DNA, 2766 bp, Homo sapiens
gggggtgggggcgagctctctcgcgagagtgggtttgttcttgggctgcagccgctgccgccgcttctcgccagcgccgttgctgcgggggattgtgggagtctccgcgtcccgctcgctgggagagaggtacctctccttttccctctccctttccctaaggctggacgtaaagaaagaagtgatgcactcaattctgcaatagataaaatgaccaagaagaccagggacttgcgtagacagctccgcaaagctgtcatggaccacgtttcagattctttcctggaaaccaatgttccacttttggtattgattgaagctgcaaagaatggaaatgagaaagaagttaaggagtatgcccaagttttccgtgaacatgccaacaaattgattgaggttgccaacttggcctgttccatctcaaataatgaagaaggtgtaaagcttgttcgaatgtctgcaagccagttagaagccctctgtcctcaggttattaatgctgcactggctttagcagcaaaaccacagagtaaactggcccaagagaacatggatctttttaaagaacaatgggaaaaacaagtccgtgttctcacagatgctgtcgatgacattacttccattgatgacttcttggctgtctcagagaatcacattttggaagatgtgaacaaatgtgtcattgctctccaagagaaggatgtggatggcctggaccgcacagctggtgcaattcgaggccgggcagcccgggtcattcacgtagtcacctcagagatggacaactatgagccaggagtctacacagagaaggttctggaagccactaagctgctctccaacacagtcatgccacgttttactgagcaagtagaagcagccgtggaagccctcagctcggaccctgcccagcccatggatgagaatgagtttatcgatgcttcccgcctggtatatgatggcatccgggacatcaggaaagcagtgctgatgataaggacccctgaggagttggatgactctgactttgagacagaagattttgatgtcagaagcaggacgagcgtccagacagaagacgatcagctgatagctggccagagtgcccgggcgatcatggctcagcttccccaggagcaaaaagcgaagattgcggaacaggtggccagcttccaggaagaaaagagcaagctggatgctgaagtgtccaaatgggacgacagtggcaatgacatcattgtgctggccaagcagatgtgcatgattatgatggagatgacagactttacccgaggtaaaggaccactcaaaaatacatcggatgtcatcagtgctgccaagaaaattgctgaggcaggatccaggatggacaagcttggccgcaccattgcagaccattgccccgactcggcttgcaagcaggacctgctggcctacctgcaacgcatcgccctctactgccaccagctgaacatctgcagcaaggtcaaggccgaggtgcagaatctcggcggggagcttgttgtctctggggtggacagcgccatgtccctgatccaggcagccaagaacttgatgaatgctgtggtgcagacagtgaaggcatcctacgtcgcctctaccaaataccaaaagtcacagggtatggcttccctcaaccttcctgctgtgtcatggaagatgaaggcaccagagaaaaagccattggtgaagagagagaaacaggatgagacacagaccaagattaaacgggcatctcagaagaagcacgtgaacccggtgcaggccctcagcgagttcaaagctatggacagcatctaagtctgcccaggccggccgcccccacccctcggggctcctgaatatcagtcactgttcgtcactcaaatgaatttgctaaatacaacactgatactagattccacagggaaatgggcagactgaaccagtccaggtggtgaattttccaagaacatagtttaagttgattaaaaatgcttttagaatgcaggagcctacttctagctgtattttttgtatgcttaaataaaaataaaaattcataaccaaagagaatcccacattagcttgttagtaatgctctgaccaagccgagatgcccattctcttagtgatggcggcgttagggtttgagagaagggaatttggctcaacttcagttgagagggtgcagtccagacagcttgactgcttttaaatgaccaaagatgacctgtggtaagcaacctgggcatcttaggaagcagtccctggagaaggcatgttcccagaaaggtctctggagggacaaactcactcagtaaaacataatgtatcatgaagaaaactgattctctatgacatgaaatgaaaattttaatgcattgttataattactaatgtacgctgctgcaggacattaataaagttgcttttttaggctacagtgtctcgatgccataatcagaacacactttttttcctctttctcccagcttcaaatgcaaattcatcattgggctcacttctaataactgcagtgtttcccgccttgggcttgcagcagaaaaacctgacaacatagtgtttgctaaggcagtaatttagactttaccttatttgtgattactgtagtgattgattgattgattactattaactacaaggtataatttactatcaccttatttaaattttatgaattaatttgaatgttttttacactaactaacttttcccaataaagtccactatgaaaccacgaca

SEQ ID NO: 1106 - DNA, 3644 bp, Homo sapiens
gcgtcccgctcgctgggagagaggtacctctccttttccctctccctttccctaaggtaggcgtgaagcgggtaagagtcggggtcgggtggctgggggttctccgtgtccgccgggaggggacaacgacggcgacaggggctgcggggagccggcggcgcgcctttcttgctcgctcccgctctgcctccctccgcgttgcgtatgtgagccgcctgatcggcggccgccatgttaggagcgcagtggcggcgcaaccagccttctagggcggcggaggtgatttgatgaaggctgctgcaggagagttcgcagatgatccctgctcttctgtgaagcgaggcaacatggttcgggcagctcgagctttgctctctgctgttacccggttgctgattttggctgacatggcagatgtctacaaattacttgttcagctgaaagttgtggaagatggtatcttgaagttgaggaatgctggcaatgaacaagacttaggaatccagtataaagccctaaaacctgaagtggataagctgaacattatggcagccaaaagacaacaggaattgaaagatgttggccatcgtgatcagatggctgcagctagaggaatcctgcagaagaacgttccgatcctctatactgcatcccaggcatgcctacagcaccctgatgtcgcagcctataaggccaacagggacctgatatacaagcagctgcagcaggcggtcacaggcatttccaatgcagcccaggccactgcctcagacgatgcctcacagcaccagggtggaggaggaggagaactggcatatgcactcaataactttgacaaacaaatcattgtggaccccttgagcttcagcgaggagcgctttaggccttccctggaggagcgtctggaaagcatcattagtggggctgccttgatggccgactcgtcctgcacgcgtgatgaccgtcgtgagcgaattgtggcagagtgtaatgctgtccgccaggccctgcaggacctgctttcggagtacatgggcaatgctggacgtaaagaaagaagtgatgcactcaattctgcaatagataaaatgaccaagaagaccagggacttgcgtagacagctccgcaaagctgtcatggaccacgtttcagattctttcctggaaaccaatgttccacttttggtattgattgaagctgcaaagaatggaaatgagaaagaagttaaggagtatgcccaagttttccgtgaacatgccaacaaattgattgaggttgccaacttggcctgttccatctcaaataatgaagaaggtgtaaagcttgttcgaatgtctgcaagccagttagaagccctctgtcctcaggttattaatgctgcactggctttagcagcaaaaccacagagtaaactggcccaagagaacatggatctttttaaagaacaatgggaaaaacaagtccgtgttctcacagatgctgtcgatgacattacttccattgatgacttcttggctgtctcagagaatcacattttggaagatgtgaacaaatgtgtcattgctctccaagagaaggatgtggatggcctggaccgcacagctggtgcaattcgaggccgggcagcccgggtcattcacgtagtcacctcagagatggacaactatgagccaggagtctacacagagaaggttctggaagccactaagctgctctccaacacagtcatgccacgttttactgagcaagtagaagcagccgtggaagccctcagctcggaccctgcccagcccatggatgagaatgagtttatcgatgcttcccgcctggtatatgatggcatccgggacatcaggaaagcagtgctgatgataaggacccctgaggagttggatgactctgactttgagacagaagattttgatgtcagaagcaggacgagcgtccagacagaagacgatcagctgatagctggccagagtgcccgggcgatcatggctcagcttccccaggagcaaaaagcgaagattgcggaacaggtggccagcttccaggaagaaaagagcaagctggatgctgaagtgtccaaatgggacgacagtggcaatgacatcattgtgctggccaagcagatgtgcatgattatgatggagatgacagactttacccgaggtaaaggaccactcaaaaatacatcggatgtcatcagtgctgccaagaaaattgctgaggcaggatccaggatggacaagcttggccgcaccattgcagaccattgccccgactcggcttgcaagcaggacctgctggcctacctgcaacgcatcgccctctactgccaccagctgaacatctgcagcaaggtcaaggccgaggtgcagaatctcggcggggagcttgttgtctctggggtggacagcgccatgtccctgatccaggcagccaagaacttgatgaatgctgtggtgcagacagtgaaggcatcctacgtcgcctctaccaaataccaaaagtcacagggtatggcttccctcaaccttcctgctgtgtcatggaagatgaaggcaccagagaaaaagccattggtgaagagagagaaacaggatgagacacagaccaagattaaacgggcatctcagaagaagcacgtgaacccggtgcaggccctcagcgagttcaaagctatggacagcatctaagtctgcccaggccggccgcccccacccctcggggctcctgaatatcagtcactgttcgtcactcaaatgaatttgctaaatacaacactgatactagattccacagggaaatgggcagactgaaccagtccaggtggtgaattttccaagaacatagtttaagttgattaaaaatgcttttagaatgcaggagcctacttctagctgtattttttgtatgcttaaataaaaataaaaattcataaccaaagagaatcccacattagcttgttagtaatgctctgaccaagccgagatgcccattctcttagtgatggcggcgttagggtttgagagaagggaatttggctcaacttcagttgagagggtgcagtccagacagcttgactgcttttaaatgaccaaagatgacctgtggtaagcaacctgggcatcttaggaagcagtccctggagaaggcatgttcccagaaaggtctctggagggacaaactcactcagtaaaacataatgtatcatgaagaaaactgattctctatgacatgaaatgaaaattttaatgcattgttataattactaatgtacgctgctgcaggacattaataaagttgcttttttaggctacagtgtctcgatgccataatcagaacacactttttttcctctttctcccagcttcaaatgcaaattcatcattgggctcacttctaataactgcagtgtttcccgccttgggcttgcagcagaaaaacctgacaacatagtgtttgctaaggcagtaatttagactttaccttatttgtgattactgtagtgattgattgattgattactattaactacaaggtataatttactatcaccttatttaaattttatgaattaatttgaatgttttttacactaactaacttttcccaataaagtccactatgaaaccacgaca

SEQ ID NO: 1107-1115 - skipped (9 entries)

SEQ ID NO: 1116 - DNA, 2731 bp, Homo sapiens
aattactgggagatgtactcaaagatcggccccaggaagcagatggaatcgattcggtgattgtagtggacaatgtccctcaggtgggacccgaccgacttgagaaactcaaaaatgtcatccacaagatcttttccaagtttgggaaaatcacaaatgatttttatcctgaagaggatgggaagacaaaagggtatattttcctggagtacgcgtcccctgcccacgctgtggatgctgtgaagaacgccgacggctacaagcttgacaagcagcacacattccgggtcaacctctttacggattttgacaagtatatgacgatcagtgacgagtgggatattccagagaaacagcctttcaaagacctggggaacttacgttactggcttgaagaggcagaatgcagagatcagtacagtgtgatttttgagagtggagaccgcacttccatattctggaatgacgtaaaagaccctgtctcaattgaagaaagagcgagatggacagagacgtatgtgcgttggtctcctaagggcacctacctggctacctttcatcaaagaggcattgctctatgggggggagagaaattcaagcaaattcagagattcagccaccaaggggttcagcttattgacttctcaccttgtgaaaggtacctggtgacctttagccccctgatggacacgcaggatgaccctcaggccataatcatctgggacatccttacggggcacaagaagaggggttttcactgtgagagctcagcccattggcctatttttaagtggagccatgatggcaaattctttgccagaatgaccctggatacgcttagcatctatgaaactccttctatgggtcttttggacaagaagagtttgaagatctctgggataaaagacttttcttggtctcctggtggtaacataatcgccttctgggtgcctgaagacaaagatattccagccagggtaaccctgatgcagctccctaccaggcaagagatccgagtgaggaacctgttcaatgtggtggactgcaagctccattggcagaagaacggagactacttgtgtgtgaaagtagataggactccgaaaggcacccagggtgttgtcacaaattttgaaattttccgaatgagggagaaacaggtacctgtggatgtggtcgagatgaaagaaaccatcatagcctttgcctgggaaccaaatggaagtaagtttgctgtgctgcacggagaggctccgcggatatctgtgtctttctaccacgtcaaaaacaacgggaagattgaactcatcaagatgttcgacaagcagcaggcgaacaccatcttctggagcccccaaggacagttcgtggtgttggcgggcctgaggagtatgaacggtgccttagcgtttgtggacacttcggactgcacggtcatgaacatcgcagagcactacatggcttccgacgtcgaatgggatcctactgggcgctacgtcgtcacctctgtgtcctggtggagccataaggtggacaacgcgtactggctgtggactttccagggacgcctcctgcagaagaacaacaaggaccgcttctgccagctgctgtggcggccccggcctcccacactcctgagccaggaacagatcaaggctcagctgtcgcaggccctggaggagctgggaggccagaaacaaagagcagacatgctggagatggagctgaagatgctgaagtctcagtccagctctgccgaacagagcttcctgttctccagggaggaggcggacacgctcaggttgaaggtcgaggagctggaaggcgagcggagtcggctggaggaggaaaagaggatgctggaggcacagctggagcggcgagctctgcagggtgactatgaccagagcaggaccaaagtgctgcacatgagcctgaaccccaccagtgtggccaggcagcgcctgcgcgaggaccacagccagctgcaggcggagtgcgagcgactgcgcgggctcctgcgcgccatggagagaggaggcaccgtcccagccgaccttgaggctgccgccgcgagtctgccatcgtccaaggaggtggcagagctgaagaagcaggtggagagtgccgagctgaagaaccagcggctcaaggaggttttccagaccaagatccaggagttccgcaaggcctgctacacgctcaccggctaccagatcgacatcaccacggagaaccagtaccggctgacctcgctgtacgccgagcacccaggcgactgcctcatcttcaaggccaccagcccctcgggttccaagatgcagctactggagacagagttctcacacaccgtgggcgagctcatcgaggtgcacctgcggcgccaggacagcatccctgccttcctcagctcgctcaccctcgagctcttcagccgccagaccgtggcgtagcctgcaggctcgggggcatagccggagccactctgcttggcctgacctgcaggtcccctgccccgccagccacaggctgggtgcacgtcctgcctctccagccccacagggcagcagcatgactgacagacacgctgggacctacgtcgggcttcctgctggggcggccagcaccctctccacgtgcagaccccatgcgtcccggagcctggtgtgtgggcgtcggccaccagcctgggttcctcaccttgtgaaataaaatcttctcccctagacac

SEQ ID NO: 1117 - DNA, 2379 bp, Homo sapiens
aattactgggagatgtactcaaagatcggccccaggaagcagatggaatcgattcggtgattgtagtggacaatgtccctcaggtgggacccgaccgacttgagaaactcaaaaatgtcatccacaagatcttttccaagtttgggaaaatcacaaatgatttttatcctgaagaggatgggaagacaaaagggtatattttcctggagtacgcgtcccctgcccacgctgtggatgctgtgaagaacgccgacggctacaagcttgacaagcagcacacattccgggtcaacctctttacggattttgacaagtatatgacgatcagtgacgagtgggatattccagagaaacagcctttcaaagacctggggaacttacgttactggcttgaagaggcagaatgcagagatcagtacagtgtgatttttgagagtggagaccgcacttccatattctggaatgacgtaaaagaccctgtctcaattgaagaaagagcgagatggacagagacgtatgtgcgttggtctcctaagggcacctacctggctacctttcatcaaagaggcattgctctatgggggggagagaaattcaagcaaattcagagattcagccaccaaggggttcagcttattgacttctcaccttgtgaaaggtacctggtgacctttagccccctgatggacacgcaggatgaccctcaggccataatcatctgggacatccttacggggcacaagaagaggggttttcactgtgagagctcagcccattggcctatttttaagtggagccatgatggcaaattctttgccagaatgaccctggatacgcttagcatctatgaaactccttctatgggtcttttggacaagaagagtttgaagatctctgggataaaagacttttcttggtctcctggtggtaacataatcgccttctgggtgcctgaagacaaagatattccagccagggtaaccctgatgcagctccctaccaggcaagagatccgagtgaggaacctgttcaatgtggtggactgcaagctccattggcagaagaacggagactacttgtgtgtgaaagtagataggactccgaaaggcacccagggtgttgtcacaaattttgaaattttccgaatgagggagaaacaggtacctgtggatgtggtcgagatgaaagaaaccatcatagcctttgcctgggaaccaaatggaagtaagtttgctgtgctgcacggagaggctccgcggatatctgtgtctttctaccacgtcaaaaacaacgggaagattgaactcatcaagatgttcgacaagcagcaggcgaacaccatcttctggagcccccaaggacagttcgtggtgttggcgggcctgaggagtatgaacggtgccttagcgtttgtggacacttcggactgcacggtcatgaacatcgcagagcactacatggcttccgacgtcgaatgggatcctactgggcgctacgtcgtcacctctgtgtcctggtggagccataaggtggacaacgcgtactggctgtggactttccagggacgcctcctgcagaagaacaacaaggaccgcttctgccagctgctgtggcggccccggcctcccacactcctgagccaggaacagatcaaggctcagctgtcgcaggccctggaggagctgggaggccagaaacaaagagcagacatgctggagatggagctgaagatgctgaagtctcagtccagctctgccgaacagagcttcctgttctccagggaggaggcggacacgctcaggttgaaggtcgaggagctggaaggcgagcggagtcggctggaggaggaaaagaggatgctggaggcacagctggagcggcgagctctgcagggtgactatgaccagagcaggaccaaagtgctgcacatgagcctgaaccccaccagtgtggccaggcagcgcctgcgcgaggaccacagccagctgcaggcggagtgcgagcgactgcgcgggctcctgcgcgccatggagagaggaggcaccgtcccagccgaccttgaggctgccgccgcgagtctgccatcgtccaaggaggtggcagagctgaagaagcaggtggagagtgccgagctgaagaaccagcggctcaaggaggttttccagaccaagatccaggagttccgcaaggcctgctacacgctcaccggctaccagatcgacatcaccacggagaaccagtaccggctgacctcgctgtacgccgagcacccaggcgactgcctcatcttcaaggaagccgcactcagccacaagctgtgcggaaagctataggattatcaagatcaaaaggtcagccctccgcctcctctcctccacc

SEQ ID NO: 1118 - skipped

SEQ ID NO: 1119 - DNA, 2142 bp, Homo sapiens
aattactgggagatgtactcaaagatcggccccaggaagcagatggaatcgattcggtgattgtagtggacaatgtccctcaggtgggacccgaccgacttgagaaactcaaaaatgtcatccacaagatcttttccaagtttgggaaaatcacaaatgatttttatcctgaagaggatgggaagacaaaagggtatattttcctggagtacgcgtcccctgcccacgctgtggatgctgtgaagaacgccgacggctacaagcttgacaagcagcacacattccgggtcaacctctttacggattttgacaagtatatgacgatcagtgacgagtgggatattccagagaaacagcctttcaaagacctggggaacttacgttactggcttgaagaggcagaatgcagagatcagtacagtgtgatttttgagagtggagaccgcacttccatattctggaatgacgtaaaagaccctgtctcaattgaagaaagagcgagatggacagagacgtatgtgcgttggtctcctaagggcacctacctggctacctttcatcaaagaggcattgctctatgggggggagagaaattcaagcaaattcagagattcagccaccaaggggttcagcttattgacttctcaccttgtgaaaggtacctggtgacctttagccccctgatggacacgcaggatgaccctcaggccataatcatctgggacatccttacggggcacaagaagaggggttttcactgtgagagctcagcccattggcctatttttaagtggagccatgatggcaaattctttgccagaatgaccctggatacgcttagcatctatgaaactccttctatgggtcttttggacaagaagagtttgaagatctctgggataaaagacttttcttggtctcctggtggtaacataatcgccttctgggtgcctgaagacaaagatattccagccagggtaaccctgatgcagctccctaccaggcaagagatccgagtgaggaacctgttcaatgtggtggactgcaagctccattggcagaagaacggagactacttgtgtgtgaaagtagataggactccgaaaggcacccagggtgttgtcacaaattttgaaattttccgaatgagggagaaacaggtacctgtggatgtggtcgagatgaaagaaaccatcatagcctttgcctgggaaccaaatggaagtaagtttgctgtgctgcacggagaggctccgcggatatctgtgtctttctaccacgtcaaaaacaacgggaagattgaactcatcaagatgttcgacaagcagcaggcgaacaccatcttctggagcccccaaggacagttcgtggtgttggcgggcctgaggagtatgaacggtgccttagcgtttgtggacacttcggactgcacggtcatgaacatcgcagagcactacatggcttccgacgtcgaatgggatcctactgggcgctacgtcgtcacctctgtgtcctggtggagccataaggtggacaacgcgtactggctgtggactttccagggacgcctcctgcagaagaacaacaaggaccgcttctgccagctgctgtggcggccccggcctcccacactcctgagccaggaacagatcaagggtgactatgaccagagcaggaccaaagtgctgcacatgagcctgaaccccaccagtgtggccaggcagcgcctgcgcgaggaccacagccagctgcaggcggagtgcgagcgactgcgcgggctcctgcgcgccatggagagaggaggcaccgtcccagccgaccttgaggctgccgccgcgagtctgccatcgtccaaggaggtggcagagctgaagaagcaggtggagagtgccgagctgaagaaccagcggctcaaggaggttttccagaccaagatccaggagttccgcaaggcctgctacacgctcaccggctaccagatcgacatcaccacggagaaccagtaccggctgacctcgctgtacgccgagcacccaggcgactgcctcatcttcaaggaagccgcactcagccacaagctgtgcggaaagctataggattatcaagatcaaaaggtcagccctccgcctcctctcctccacc

SEQ ID NO: 1120 - skipped

SEQ ID NO: 1121 - DNA, 3387 bp, Homo sapiens
tagccgtcgcggcgcgcggtgcggcctgggagagtcggaagcgcggcggccgcggagccctgcgagtaggcagcgttgggcccatgcaggacgcggagaacgtggcggtgcccgaggcggccgaggagcgcgccgagcccggccagcagcagccggccgccgagccgccgccagccgaggggctgctgcggcccgcggggcccggcgctccggaggccgcggggaccgaggcctccagtgaggaggtggggatcgcggaggccgggccggagtccgaggtgaggaccgagccggcggccgaggcagaggcggcctccggcccgtccgagtcgccctcgccgccggccgccgaggagctgcccgggtcgcatgctgagccccctgtcccggcacagggcgaggccccaggagagcaggctcgggacgagcgctccgacagccgggcccaggcggtgtccgaggacgcgggaggaaacgagggcagagcggccgaggccgaaccccgggcgctggagaacggcgacgcggacgagccctccttcagcgaccccgaggacttcgtggacgacgtgagcgaggaagaattactgggagatgtactcaaagatcggccccaggaagcagatggaatcgattcggtgattgtagtggacaatgtccctcaggtgggacccgaccgacttgagaaactcaaaaatgtcatccacaagatcttttccaagtttgggaaaatcacaaatgatttttatcctgaagaggatgggaagacaaaagggtatattttcctggagtacgcgtcccctgcccacgctgtggatgctgtgaagaacgccgacggctacaagcttgacaagcagcacacattccgggtcaacctctttacggattttgacaagtatatgacgatcagtgacgagtgggatattccagagaaacagcctttcaaagacctggggaacttacgttactggcttgaagaggcagaatgcagagatcagtacagtgtgatttttgagagtggagaccgcacttccatattctggaatgacgtaaaagaccctgtctcaattgaagaaagagcgagatggacagagacgtatgtgcgttggtctcctaagggcacctacctggctacctttcatcaaagaggcattgctctatgggggggagagaaattcaagcaaattcagagattcagccaccaaggggttcagcttattgacttctcaccttgtgaaaggtacctggtgacctttagccccctgatggacacgcaggatgaccctcaggccataatcatctgggacatccttacggggcacaagaagaggggttttcactgtgagagctcagcccattggcctatttttaagtggagccatgatggcaaattctttgccagaatgaccctggatacgcttagcatctatgaaactccttctatgggtcttttggacaagaagagtttgaagatctctgggataaaagacttttcttggtctcctggtggtaacataatcgccttctgggtgcctgaagacaaagatattccagccagggtaaccctgatgcagctccctaccaggcaagagatccgagtgaggaacctgttcaatgtggtggactgcaagctccattggcagaagaacggagactacttgtgtgtgaaagtagataggactccgaaaggcacccagggtgttgtcacaaattttgaaattttccgaatgagggagaaacaggtacctgtggatgtggtcgagatgaaagaaaccatcatagcctttgcctgggaaccaaatggaagtaagtttgctgtgctgcacggagaggctccgcggatatctgtgtctttctaccacgtcaaaaacaacgggaagattgaactcatcaagatgttcgacaagcagcaggcgaacaccatcttctggagcccccaaggacagttcgtggtgttggcgggcctgaggagtatgaacggtgccttagcgtttgtggacacttcggactgcacggtcatgaacatcgcagagcactacatggcttccgacgtcgaatgggatcctactgggcgctacgtcgtcacctctgtgtcctggtggagccataaggtggacaacgcgtactggctgtggactttccagggacgcctcctgcagaagaacaacaaggaccgcttctgccagctgctgtggcggccccggcctcccacactcctgagccaggaacagatcaaggctcagctgtcgcaggccctggaggagctgggaggccagaaacaaagagcagacatgctggagatggagctgaagatgctgaagtctcagtccagctctgccgaacagagcttcctgttctccagggaggaggcggacacgctcaggttgaaggtcgaggagctggaaggcgagcggagtcggctggaggaggaaaagaggatgctggaggcacagctggagcggcgagctctgcagggtgactatgaccagagcaggaccaaagtgctgcacatgagcctgaaccccaccagtgtggccaggcagcgcctgcgcgaggaccacagccagctgcaggcggagtgcgagcgactgcgcgggctcctgcgcgccatggagagaggaggcaccgtcccagccgaccttgaggctgccgccgcgagtctgccatcgtccaaggaggtggcagagctgaagaagcaggtggagagtgccgagctgaagaaccagcggctcaaggaggttttccagaccaagatccaggagttccgcaaggcctgctacacgctcaccggctaccagatcgacatcaccacggagaaccagtaccggctgacctcgctgtacgccgagcacccaggcgactgcctcatcttcaaggtgggtcctgcgtgtgacggctctccggctgtctcgctctctgtctcctcctgtggggagatccgaccgtagccctcagcaaaggagcagcctcgcgtccaaaggggatggtgtggagggctgggcgggaaggaggtgcactggcccgtcctcgtcaccccctgaggcttctcagccttgggccaaccctatgtggctttgcagccctggacctcctgggtgcagaagaccctaggctgtccccctgactttctcagcctctgtctgtcgcaacttgggcttcgttccatgagggctgcggccgtaggcgtgtgtgtcagtgtgtccagaggcagtggtgcctggggaggactgaagtccgtgtggggccggggcaggggacgccttccaagatgccaggctgcgcagtgggacagcgcagtcccagaagccagcacagggcaaggtagacagactagaagaggaaaggagagccagccgcatctctacactcgcgtcctgcgagccagca

SEQ ID NO: 1122 - DNA, 3313 bp, Homo sapiens
tagccgtcgcggcgcgcggtgcggcctgggagagtcggaagcgcggcggccgcggagccctgcgagtaggcagcgttgggcccatgcaggacgcggagaacgtggcggtgcccgaggcggccgaggagcgcgccgagcccggccagcagcagccggccgccgagccgccgccagccgaggggctgctgcggcccgcggggcccggcgctccggaggccgcggggaccgaggcctccagtgaggaggtggggatcgcggaggccgggccggagtccgaggtgaggaccgagccggcggccgaggcagaggcggcctccggcccgtccgagtcgccctcgccgccggccgccgaggagctgcccgggtcgcatgctgagccccctgtcccggcacagggcgaggccccaggagagcaggctcgggacgagcgctccgacagccgggcccaggcggtgtccgaggacgcgggaggaaacgagggcagagcggccgaggccgaaccccgggcgctggagaacggcgacgcggacgagccctccttcagcgaccccgaggacttcgtggacgacgtgagcgaggaagaattactgggagatgtactcaaagatcggccccaggaagcagatggaatcgattcggtgattgtagtggacaatgtccctcaggtgggacccgaccgacttgagaaactcaaaaatgtcatccacaagatcttttccaagtttgggaaaatcacaaatgatttttatcctgaagaggatgggaagacaaaagggtatattttcctggagtacgcgtcccctgcccacgctgtggatgctgtgaagaacgccgacggctacaagcttgacaagcagcacacattccgggtcaacctctttacggattttgacaagtatatgacgatcagtgacgagtgggatattccagagaaacagcctttcaaagacctggggaacttacgttactggcttgaagaggcagaatgcagagatcagtacagtgtgatttttgagagtggagaccgcacttccatattctggaatgacgtaaaagaccctgtctcaattgaagaaagagcgagatggacagagacgtatgtgcgttggtctcctaagggcacctacctggctacctttcatcaaagaggcattgctctatgggggggagagaaattcaagcaaattcagagattcagccaccaaggggttcagcttattgacttctcaccttgtgaaaggtacctggtgacctttagccccctgatggacacgcaggatgaccctcaggccataatcatctgggacatccttacggggcacaagaagaggggttttcactgtgagagctcagcccattggcctatttttaagtggagccatgatggcaaattctttgccagaatgaccctggatacgcttagcatctatgaaactccttctatgggtcttttggacaagaagagtttgaagatctctgggataaaagacttttcttggtctcctggtggtaacataatcgccttctgggtgcctgaagacaaagatattccagccagggtaaccctgatgcagctccctaccaggcaagagatccgagtgaggaacctgttcaatgtggtggactgcaagctccattggcagaagaacggagactacttgtgtgtgaaagtagataggactccgaaaggcacccagggtgttgtcacaaattttgaaattttccgaatgagggagaaacaggtacctgtggatgtggtcgagatgaaagaaaccatcatagcctttgcctgggaaccaaatggaagtaagtttgctgtgctgcacggagaggctccgcggatatctgtgtctttctaccacgtcaaaaacaacgggaagattgaactcatcaagatgttcgacaagcagcaggcgaacaccatcttctggagcccccaaggacagttcgtggtgttggcgggcctgaggagtatgaacggtgccttagcgtttgtggacacttcggactgcacggtcatgaacatcgcagagcactacatggcttccgacgtcgaatgggatcctactgggcgctacgtcgtcacctctgtgtcctggtggagccataaggtggacaacgcgtactggctgtggactttccagggacgcctcctgcagaagaacaacaaggaccgcttctgccagctgctgtggcggccccggcctcccacactcctgagccaggaacagatcaaggctcagctgtcgcaggccctggaggagctgggaggccagaaacaaagagcagacatgctggagatggagctgaagatgctgaagtctcagtccagctctgccgaacagagcttcctgttctccagggaggaggcggacacgctcaggttgaaggtcgaggagctggaaggcgagcggagtcggctggaggaggaaaagaggatgctggaggcacagctggagcggcgagctctgcagggtgactatgaccagagcaggaccaaagtgctgcacatgagcctgaaccccaccagtgtggccaggcagcgcctgcgcgaggaccacagccagctgcaggcggagtgcgagcgactgcgcgggctcctgcgcgccatggagagaggaggcaccgtcccagccgaccttgaggctgccgccgcgagtctgccatcgtccaaggaggtggcagagctgaagaagcaggtggagagtgccgagctgaagaaccagcggctcaaggaggttttccagaccaagatccaggagttccgcaaggcctgctacacgctcaccggctaccagatcgacatcaccacggagaaccagtaccggctgacctcgctgtacgccgagcacccaggcgactgcctcatcttcaaggccaccagcccctcgggttccaagatgcagctactggagacagagttctcacacaccgtgggcgagctcatcgaggtgcacctgcggcgccaggacagcatccctgccttcctcagctcgctcaccctcgagctcttcagccgccagaccgtggcgtagcctgcaggctcgggggcatagccggagccactctgcttggcctgacctgcaggtcccctgccccgccagccacaggctgggtgcacgtcctgcctctccagccccacagggcagcagcatgactgacagacacgctgggacctacgtcgggcttcctgctggggcggccagcaccctctccacgtgcagaccccatgcgtcccggagcctggtgtgtgggcgtcggccaccagcctgggttcctcaccttgtgaaataaaatcttctcccctagacac

SEQ ID NO: 1123 - DNA, 2961 bp, Homo sapiens
tagccgtcgcggcgcgcggtgcggcctgggagagtcggaagcgcggcggccgcggagccctgcgagtaggcagcgttgggcccatgcaggacgcggagaacgtggcggtgcccgaggcggccgaggagcgcgccgagcccggccagcagcagccggccgccgagccgccgccagccgaggggctgctgcggcccgcggggcccggcgctccggaggccgcggggaccgaggcctccagtgaggaggtggggatcgcggaggccgggccggagtccgaggtgaggaccgagccggcggccgaggcagaggcggcctccggcccgtccgagtcgccctcgccgccggccgccgaggagctgcccgggtcgcatgctgagccccctgtcccggcacagggcgaggccccaggagagcaggctcgggacgagcgctccgacagccgggcccaggcggtgtccgaggacgcgggaggaaacgagggcagagcggccgaggccgaaccccgggcgctggagaacggcgacgcggacgagccctccttcagcgaccccgaggacttcgtggacgacgtgagcgaggaagaattactgggagatgtactcaaagatcggccccaggaagcagatggaatcgattcggtgattgtagtggacaatgtccctcaggtgggacccgaccgacttgagaaactcaaaaatgtcatccacaagatcttttccaagtttgggaaaatcacaaatgatttttatcctgaagaggatgggaagacaaaagggtatattttcctggagtacgcgtcccctgcccacgctgtggatgctgtgaagaacgccgacggctacaagcttgacaagcagcacacattccgggtcaacctctttacggattttgacaagtatatgacgatcagtgacgagtgggatattccagagaaacagcctttcaaagacctggggaacttacgttactggcttgaagaggcagaatgcagagatcagtacagtgtgatttttgagagtggagaccgcacttccatattctggaatgacgtaaaagaccctgtctcaattgaagaaagagcgagatggacagagacgtatgtgcgttggtctcctaagggcacctacctggctacctttcatcaaagaggcattgctctatgggggggagagaaattcaagcaaattcagagattcagccaccaaggggttcagcttattgacttctcaccttgtgaaaggtacctggtgacctttagccccctgatggacacgcaggatgaccctcaggccataatcatctgggacatccttacggggcacaagaagaggggttttcactgtgagagctcagcccattggcctatttttaagtggagccatgatggcaaattctttgccagaatgaccctggatacgcttagcatctatgaaactccttctatgggtcttttggacaagaagagtttgaagatctctgggataaaagacttttcttggtctcctggtggtaacataatcgccttctgggtgcctgaagacaaagatattccagccagggtaaccctgatgcagctccctaccaggcaagagatccgagtgaggaacctgttcaatgtggtggactgcaagctccattggcagaagaacggagactacttgtgtgtgaaagtagataggactccgaaaggcacccagggtgttgtcacaaattttgaaattttccgaatgagggagaaacaggtacctgtggatgtggtcgagatgaaagaaaccatcatagcctttgcctgggaaccaaatggaagtaagtttgctgtgctgcacggagaggctccgcggatatctgtgtctttctaccacgtcaaaaacaacgggaagattgaactcatcaagatgttcgacaagcagcaggcgaacaccatcttctggagcccccaaggacagttcgtggtgttggcgggcctgaggagtatgaacggtgccttagcgtttgtggacacttcggactgcacggtcatgaacatcgcagagcactacatggcttccgacgtcgaatgggatcctactgggcgctacgtcgtcacctctgtgtcctggtggagccataaggtggacaacgcgtactggctgtggactttccagggacgcctcctgcagaagaacaacaaggaccgcttctgccagctgctgtggcggccccggcctcccacactcctgagccaggaacagatcaaggctcagctgtcgcaggccctggaggagctgggaggccagaaacaaagagcagacatgctggagatggagctgaagatgctgaagtctcagtccagctctgccgaacagagcttcctgttctccagggaggaggcggacacgctcaggttgaaggtcgaggagctggaaggcgagcggagtcggctggaggaggaaaagaggatgctggaggcacagctggagcggcgagctctgcagggtgactatgaccagagcaggaccaaagtgctgcacatgagcctgaaccccaccagtgtggccaggcagcgcctgcgcgaggaccacagccagctgcaggcggagtgcgagcgactgcgcgggctcctgcgcgccatggagagaggaggcaccgtcccagccgaccttgaggctgccgccgcgagtctgccatcgtccaaggaggtggcagagctgaagaagcaggtggagagtgccgagctgaagaaccagcggctcaaggaggttttccagaccaagatccaggagttccgcaaggcctgctacacgctcaccggctaccagatcgacatcaccacggagaaccagtaccggctgacctcgctgtacgccgagcacccaggcgactgcctcatcttcaaggaagccgcactcagccacaagctgtgcggaaagctataggattatcaagatcaaaaggtcagccctccgcctcctctcctccacc

SEQ ID NO: 1124 - DNA, 2724 bp, Homo sapiens
tagccgtcgcggcgcgcggtgcggcctgggagagtcggaagcgcggcggccgcggagccctgcgagtaggcagcgttgggcccatgcaggacgcggagaacgtggcggtgcccgaggcggccgaggagcgcgccgagcccggccagcagcagccggccgccgagccgccgccagccgaggggctgctgcggcccgcggggcccggcgctccggaggccgcggggaccgaggcctccagtgaggaggtggggatcgcggaggccgggccggagtccgaggtgaggaccgagccggcggccgaggcagaggcggcctccggcccgtccgagtcgccctcgccgccggccgccgaggagctgcccgggtcgcatgctgagccccctgtcccggcacagggcgaggccccaggagagcaggctcgggacgagcgctccgacagccgggcccaggcggtgtccgaggacgcgggaggaaacgagggcagagcggccgaggccgaaccccgggcgctggagaacggcgacgcggacgagccctccttcagcgaccccgaggacttcgtggacgacgtgagcgaggaagaattactgggagatgtactcaaagatcggccccaggaagcagatggaatcgattcggtgattgtagtggacaatgtccctcaggtgggacccgaccgacttgagaaactcaaaaatgtcatccacaagatcttttccaagtttgggaaaatcacaaatgatttttatcctgaagaggatgggaagacaaaagggtatattttcctggagtacgcgtcccctgcccacgctgtggatgctgtgaagaacgccgacggctacaagcttgacaagcagcacacattccgggtcaacctctttacggattttgacaagtatatgacgatcagtgacgagtgggatattccagagaaacagcctttcaaagacctggggaacttacgttactggcttgaagaggcagaatgcagagatcagtacagtgtgatttttgagagtggagaccgcacttccatattctggaatgacgtaaaagaccctgtctcaattgaagaaagagcgagatggacagagacgtatgtgcgttggtctcctaagggcacctacctggctacctttcatcaaagaggcattgctctatgggggggagagaaattcaagcaaattcagagattcagccaccaaggggttcagcttattgacttctcaccttgtgaaaggtacctggtgacctttagccccctgatggacacgcaggatgaccctcaggccataatcatctgggacatccttacggggcacaagaagaggggttttcactgtgagagctcagcccattggcctatttttaagtggagccatgatggcaaattctttgccagaatgaccctggatacgcttagcatctatgaaactccttctatgggtcttttggacaagaagagtttgaagatctctgggataaaagacttttcttggtctcctggtggtaacataatcgccttctgggtgcctgaagacaaagatattccagccagggtaaccctgatgcagctccctaccaggcaagagatccgagtgaggaacctgttcaatgtggtggactgcaagctccattggcagaagaacggagactacttgtgtgtgaaagtagataggactccgaaaggcacccagggtgttgtcacaaattttgaaattttccgaatgagggagaaacaggtacctgtggatgtggtcgagatgaaagaaaccatcatagcctttgcctgggaaccaaatggaagtaagtttgctgtgctgcacggagaggctccgcggatatctgtgtctttctaccacgtcaaaaacaacgggaagattgaactcatcaagatgttcgacaagcagcaggcgaacaccatcttctggagcccccaaggacagttcgtggtgttggcgggcctgaggagtatgaacggtgccttagcgtttgtggacacttcggactgcacggtcatgaacatcgcagagcactacatggcttccgacgtcgaatgggatcctactgggcgctacgtcgtcacctctgtgtcctggtggagccataaggtggacaacgcgtactggctgtggactttccagggacgcctcctgcagaagaacaacaaggaccgcttctgccagctgctgtggcggccccggcctcccacactcctgagccaggaacagatcaagggtgactatgaccagagcaggaccaaagtgctgcacatgagcctgaaccccaccagtgtggccaggcagcgcctgcgcgaggaccacagccagctgcaggcggagtgcgagcgactgcgcgggctcctgcgcgccatggagagaggaggcaccgtcccagccgaccttgaggctgccgccgcgagtctgccatcgtccaaggaggtggcagagctgaagaagcaggtggagagtgccgagctgaagaaccagcggctcaaggaggttttccagaccaagatccaggagttccgcaaggcctgctacacgctcaccggctaccagatcgacatcaccacggagaaccagtaccggctgacctcgctgtacgccgagcacccaggcgactgcctcatcttcaaggaagccgcactcagccacaagctgtgcggaaagctataggattatcaagatcaaaaggtcagccctccgcctcctctcctccacc

SEQ ID NO: 1125 - DNA, 1940 bp, Homo sapiens
gatggaggcactgatacttgaactagtccatgccaatagagcctgtgaaaccaaacgcgggtaattttgtttaatgagatacagaatttgtaggaatatcaacttcccaaatgttactgcaagtgtctagagttagaaatcttcgcattcgaatcaggatatgttgatcacagcctgtgtccaggtatgttcagatgtcactgcggtggggcctgccttgacacttgaaatcactttaggccaggcacagtggctcacacctgtaatcccagcacttcaggaggcagaggtagaaaaatcacttgaacccaggagtttgagactagcctgagcaacatagcgaaaccctagccccattaaaaaaaaaaaaaaaaaaaagactttttaagctgttgaccactctccttgagttatgaacacttagcttccaaaatgccggcctgcaacaaggagtttatgctgagtgccagtgaaggcgccctccttcatgagagaggcctgccatgaggagagcggaactaggcggcgtgtagtgatgcagttagcttacatccagcacagggctccgcacagctcacacccggcccagggctcagcagtgagtagtgctatgcagttagcttacgtttggcacagggttcagtccagtttaaatccagcacggggttcagcggcgcagtagtgaggcagttagcttacatccagcatggggttcttattgccagccagaatgtgcaggcctgtgctgtgatgagcgctgctccagctgctccgtgccccgcactccgggtcggttgcataatggaggtgtcttgcattgactgcccacctaccctgctgtcagctcagcacaggcagagctttgtttgcttcacacgtgtccccgatacccaggaccttgttcagcaagtgacatagtcacggttgtggctctctgacccctctgtgtcctggtgtgtccctgccctggcctaggtggacaacgcgtactggctgtggactttccagggacgcctcctgcagaagaacaacaaggaccgcttctgccagctgctgtggcggccccggcctcccacactcctgagccaggaacagatcaagggtgactatgaccagagcaggaccaaagtgctgcacatgagcctgaaccccaccagtgtggccaggcagcgcctgcgcgaggaccacagccagctgcaggcggagtgcgagcgactgcgcgggctcctgcgcgccatggagagaggaggcaccgtcccagccgaccttgaggctgccgccgcgagtctgccatcgtccaaggaggtggcagagctgaagaagcaggtggagagtgccgagctgaagaaccagcggctcaaggaggttttccagaccaagatccaggagttccgcaaggcctgctacacgctcaccggctaccagatcgacatcaccacggagaaccagtaccggctgacctcgctgtacgccgagcacccaggcgactgcctcatcttcaaggccaccagcccctcgggttccaagatgcagctactggagacagagttctcacacaccgtgggcgagctcatcgaggtgcacctgcggcgccaggacagcatccctgccttcctcagctcgctcaccctcgagctcttcagccgccagaccgtggcgtagcctgcaggctcgggggcatagccggagccactctgcttggcctgacctgcaggtcccctgccccgccagccacaggctgggtgcacgtcctgcctctccagccccacagggcagcagcatgactgacagacacgctgggacctacgtcgggcttcctgctggggcggccagcaccctctccacgtgcagaccccatgcgtcccggagcctggtgtgtgggcgtcggccaccagcctgggttcctcaccttgtgaaataaaatcttctcccctagacac

SEQ ID NO: 1126 - DNA, 2092 bp, Homo sapiens
aattactgggagatgtactcaaagatcggccccaggaagcagatggaatcgattcggtgattgtagtggacaatgtccctcaggtgggacccgaccgacttgagaaactcaaaaatgtcatccacaagatcttttccaagtttgggaaaatcacaaatgatttttatcctgaagaggatgggaagacaaaagggtatattttcctggagtacgcgtcccctgcccacgctgtggatgctgtgaagaacgccgacggctacaagcttgacaagcagcacacattccgggtcaacctctttacggattttgacaagtatatgacgatcagtgacgagtgggatattccagagaaacagcctttcaaagacctggggaacttacgttactggcttgaagaggcagaatgcagagatcagtacagtgtgatttttgagagtggagaccgcacttccatattctggaatgacgtaaaagaccctgtctcaattgaagaaagagcgagatggacagagacgtatgtgcgttggtctcctaagggcacctacctggctacctttcatcaaagaggcattgctctatgggggggagagaaattcaagcaaattcagagattcagccaccaaggggttcagcttattgacttctcaccttgtgaaaggtacctggtgacctttagccccctgatggacacgcaggatgaccctcaggccataatcatctgggacatccttacggggcacaagaagaggggttttcactgtgagagctcagcccattggcctatttttaagtggagccatgatggcaaattctttgccagaatgaccctggatacgcttagcatctatgaaactccttctatgggtcttttggacaagaagagtttgaagatctctgggataaaagacttttcttggtctcctggtggtaacataatcgccttctgggtgcctgaagacaaagatattccagccagggtaaccctgatgcagctccctaccaggcaagagatccgagtgaggaacctgttcaatgtggtggactgcaagctccattggcagaagaacggagactacttgtgtgtgaaagtagataggactccgaaaggcacccagggtgttgtcacaaattttgaaattttccgaatgagggagaaacaggtacctgtggatgtggtcgagatgaaagaaaccatcatagcctttgcctgggaaccaaatggaagtaagtttgctgtgctgcacggagaggctccgcggatatctgtgtctttctaccacgtcaaaaacaacgggaagattgaactcatcaagatgttcgacaagcagcaggcgaacaccatcttctggagcccccaaggacagttcgtggtgttggcgggcctgaggagtatgaacggtgccttagcgtttgtggacacttcggactgcacggtcatgaacatcgcagagcactacatggcttccgacgtcgaatgggatcctactgggcgctacgtcgtcacctctgtgtcctggtggagccataaggtggacaacgcgtactggctgtggactttccagggacgcctcctgcagaagaacaacaaggaccgcttctgccagctgctgtggcggccccggcctcccacactcctgagccaggaacagatcaaggccaccagcccctcgggttccaagatgcagctactggagacagagttctcacacaccgtgggcgagctcatcgaggtgcacctgcggcgccaggacagcatccctgccttcctcagctcgctcaccctcgagctcttcagccgccagaccgtggcgtagcctgcaggctcgggggcatagccggagccactctgcttggcctgacctgcaggtcccctgccccgccagccacaggctgggtgcacgtcctgcctctccagccccacagggcagcagcatgactgacagacacgctgggacctacgtcgggcttcctgctggggcggccagcaccctctccacgtgcagaccccatgcgtcccggagcctggtgtgtgggcgtcggccaccagcctgggttcctcaccttgtgaaataaaatcttctcccctagacac

SEQ ID NO: 1127 - DNA, 2674 bp, Homo sapiens
tagccgtcgcggcgcgcggtgcggcctgggagagtcggaagcgcggcggccgcggagccctgcgagtaggcagcgttgggcccatgcaggacgcggagaacgtggcggtgcccgaggcggccgaggagcgcgccgagcccggccagcagcagccggccgccgagccgccgccagccgaggggctgctgcggcccgcggggcccggcgctccggaggccgcggggaccgaggcctccagtgaggaggtggggatcgcggaggccgggccggagtccgaggtgaggaccgagccggcggccgaggcagaggcggcctccggcccgtccgagtcgccctcgccgccggccgccgaggagctgcccgggtcgcatgctgagccccctgtcccggcacagggcgaggccccaggagagcaggctcgggacgagcgctccgacagccgggcccaggcggtgtccgaggacgcgggaggaaacgagggcagagcggccgaggccgaaccccgggcgctggagaacggcgacgcggacgagccctccttcagcgaccccgaggacttcgtggacgacgtgagcgaggaagaattactgggagatgtactcaaagatcggccccaggaagcagatggaatcgattcggtgattgtagtggacaatgtccctcaggtgggacccgaccgacttgagaaactcaaaaatgtcatccacaagatcttttccaagtttgggaaaatcacaaatgatttttatcctgaagaggatgggaagacaaaagggtatattttcctggagtacgcgtcccctgcccacgctgtggatgctgtgaagaacgccgacggctacaagcttgacaagcagcacacattccgggtcaacctctttacggattttgacaagtatatgacgatcagtgacgagtgggatattccagagaaacagcctttcaaagacctggggaacttacgttactggcttgaagaggcagaatgcagagatcagtacagtgtgatttttgagagtggagaccgcacttccatattctggaatgacgtaaaagaccctgtctcaattgaagaaagagcgagatggacagagacgtatgtgcgttggtctcctaagggcacctacctggctacctttcatcaaagaggcattgctctatgggggggagagaaattcaagcaaattcagagattcagccaccaaggggttcagcttattgacttctcaccttgtgaaaggtacctggtgacctttagccccctgatggacacgcaggatgaccctcaggccataatcatctgggacatccttacggggcacaagaagaggggttttcactgtgagagctcagcccattggcctatttttaagtggagccatgatggcaaattctttgccagaatgaccctggatacgcttagcatctatgaaactccttctatgggtcttttggacaagaagagtttgaagatctctgggataaaagacttttcttggtctcctggtggtaacataatcgccttctgggtgcctgaagacaaagatattccagccagggtaaccctgatgcagctccctaccaggcaagagatccgagtgaggaacctgttcaatgtggtggactgcaagctccattggcagaagaacggagactacttgtgtgtgaaagtagataggactccgaaaggcacccagggtgttgtcacaaattttgaaattttccgaatgagggagaaacaggtacctgtggatgtggtcgagatgaaagaaaccatcatagcctttgcctgggaaccaaatggaagtaagtttgctgtgctgcacggagaggctccgcggatatctgtgtctttctaccacgtcaaaaacaacgggaagattgaactcatcaagatgttcgacaagcagcaggcgaacaccatcttctggagcccccaaggacagttcgtggtgttggcgggcctgaggagtatgaacggtgccttagcgtttgtggacacttcggactgcacggtcatgaacatcgcagagcactacatggcttccgacgtcgaatgggatcctactgggcgctacgtcgtcacctctgtgtcctggtggagccataaggtggacaacgcgtactggctgtggactttccagggacgcctcctgcagaagaacaacaaggaccgcttctgccagctgctgtggcggccccggcctcccacactcctgagccaggaacagatcaaggccaccagcccctcgggttccaagatgcagctactggagacagagttctcacacaccgtgggcgagctcatcgaggtgcacctgcggcgccaggacagcatccctgccttcctcagctcgctcaccctcgagctcttcagccgccagaccgtggcgtagcctgcaggctcgggggcatagccggagccactctgcttggcctgacctgcaggtcccctgccccgccagccacaggctgggtgcacgtcctgcctctccagccccacagggcagcagcatgactgacagacacgctgggacctacgtcgggcttcctgctggggcggccagcaccctctccacgtgcagaccccatgcgtcccggagcctggtgtgtgggcgtcggccaccagcctgggttcctcaccttgtgaaataaaatcttctcccctagacac

SEQ ID NO: 1128 - DNA, 2494 bp, Homo sapiens
aattactgggagatgtactcaaagatcggccccaggaagcagatggaatcgattcggtgattgtagtggacaatgtccctcaggtgggacccgaccgacttgagaaactcaaaaatgtcatccacaagatcttttccaagtttgggaaaatcacaaatgatttttatcctgaagaggatgggaagacaaaagggtatattttcctggagtacgcgtcccctgcccacgctgtggatgctgtgaagaacgccgacggctacaagcttgacaagcagcacacattccgggtcaacctctttacggattttgacaagtatatgacgatcagtgacgagtgggatattccagagaaacagcctttcaaagacctggggaacttacgttactggcttgaagaggcagaatgcagagatcagtacagtgtgatttttgagagtggagaccgcacttccatattctggaatgacgtaaaagaccctgtctcaattgaagaaagagcgagatggacagagacgtatgtgcgttggtctcctaagggcacctacctggctacctttcatcaaagaggcattgctctatgggggggagagaaattcaagcaaattcagagattcagccaccaaggggttcagcttattgacttctcaccttgtgaaaggtacctggtgacctttagccccctgatggacacgcaggatgaccctcaggccataatcatctgggacatccttacggggcacaagaagaggggttttcactgtgagagctcagcccattggcctatttttaagtggagccatgatggcaaattctttgccagaatgaccctggatacgcttagcatctatgaaactccttctatgggtcttttggacaagaagagtttgaagatctctgggataaaagacttttcttggtctcctggtggtaacataatcgccttctgggtgcctgaagacaaagatattccagccagggtaaccctgatgcagctccctaccaggcaagagatccgagtgaggaacctgttcaatgtggtggactgcaagctccattggcagaagaacggagactacttgtgtgtgaaagtagataggactccgaaaggcacccagggtgttgtcacaaattttgaaattttccgaatgagggagaaacaggtacctgtggatgtggtcgagatgaaagaaaccatcatagcctttgcctgggaaccaaatggaagtaagtttgctgtgctgcacggagaggctccgcggatatctgtgtctttctaccacgtcaaaaacaacgggaagattgaactcatcaagatgttcgacaagcagcaggcgaacaccatcttctggagcccccaaggacagttcgtggtgttggcgggcctgaggagtatgaacggtgccttagcgtttgtggacacttcggactgcacggtcatgaacatcgcagagcactacatggcttccgacgtcgaatgggatcctactgggcgctacgtcgtcacctctgtgtcctggtggagccataaggtggacaacgcgtactggctgtggactttccagggacgcctcctgcagaagaacaacaaggaccgcttctgccagctgctgtggcggccccggcctcccacactcctgagccaggaacagatcaagggtgactatgaccagagcaggaccaaagtgctgcacatgagcctgaaccccaccagtgtggccaggcagcgcctgcgcgaggaccacagccagctgcaggcggagtgcgagcgactgcgcgggctcctgcgcgccatggagagaggaggcaccgtcccagccgaccttgaggctgccgccgcgagtctgccatcgtccaaggaggtggcagagctgaagaagcaggtggagagtgccgagctgaagaaccagcggctcaaggaggttttccagaccaagatccaggagttccgcaaggcctgctacacgctcaccggctaccagatcgacatcaccacggagaaccagtaccggctgacctcgctgtacgccgagcacccaggcgactgcctcatcttcaaggccaccagcccctcgggttccaagatgcagctactggagacagagttctcacacaccgtgggcgagctcatcgaggtgcacctgcggcgccaggacagcatccctgccttcctcagctcgctcaccctcgagctcttcagccgccagaccgtggcgtagcctgcaggctcgggggcatagccggagccactctgcttggcctgacctgcaggtcccctgccccgccagccacaggctgggtgcacgtcctgcctctccagccccacagggcagcagcatgactgacagacacgctgggacctacgtcgggcttcctgctggggcggccagcaccctctccacgtgcagaccccatgcgtcccggagcctggtgtgtgggcgtcggccaccagcctgggttcctcaccttgtgaaataaaatcttctcccctagacac

SEQ ID NO: 1129 - DNA, 3150 bp, Homo sapiens
tagccgtcgcggcgcgcggtgcggcctgggagagtcggaagcgcggcggccgcggagccctgcgagtaggcagcgttgggcccatgcaggacgcggagaacgtggcggtgcccgaggcggccgaggagcgcgccgagcccggccagcagcagccggccgccgagccgccgccagccgaggggctgctgcggcccgcggggcccggcgctccggaggccgcggggaccgaggcctccagtgaggaggtggggatcgcggaggccgggccggagtccgaggtgaggaccgagccggcggccgaggcagaggcggcctccggcccgtccgagtcgccctcgccgccggccgccgaggagctgcccgggtcgcatgctgagccccctgtcccggcacagggcgaggccccaggagagcaggctcgggacgagcgctccgacagccgggcccaggcggtgtccgaggacgcgggaggaaacgagggcagagcggccgaggccgaaccccgggcgctggagaacggcgacgcggacgagccctccttcagcgaccccgaggacttcgtggacgacgtgagcgaggaagaattactgggagatgtactcaaagatcggccccaggaagcagatggaatcgattcggtgattgtagtggacaatgtccctcaggtgggacccgaccgacttgagaaactcaaaaatgtcatccacaagatcttttccaagtttgggaaaatcacaaatgatttttatcctgaagaggatgggaagacaaaagggtatattttcctggagtacgcgtcccctgcccacgctgtggatgctgtgaagaacgccgacggctacaagcttgacaagcagcacacattccgggtcaacctctttacggattttgacaagtatatgacgatcagtgacgagtgggatattccagagaaacagcctttcaaagacctggggaacttacgttactggcttgaagaggcagaatgcagagatcagtacagtgtgatttttgagagtggagaccgcacttccatattctggaatgacgtaaaagaccctgtctcaattgaagaaagagcgagatggacagagacgtatgtgcgttggtctcctaagggcacctacctggctacctttcatcaaagaggcattgctctatgggggggagagaaattcaagcaaattcagagattcagccaccaaggggttcagcttattgacttctcaccttgtgaaaggtacctggtgacctttagccccctgatggacacgcaggatgaccctcaggccataatcatctgggacatccttacggggcacaagaagaggggttttcactgtgagagctcagcccattggcctatttttaagtggagccatgatggcaaattctttgccagaatgaccctggatacgcttagcatctatgaaactccttctatgggtcttttggacaagaagagtttgaagatctctgggataaaagacttttcttggtctcctggtggtaacataatcgccttctgggtgcctgaagacaaagatattccagccagggtaaccctgatgcagctccctaccaggcaagagatccgagtgaggaacctgttcaatgtggtggactgcaagctccattggcagaagaacggagactacttgtgtgtgaaagtagataggactccgaaaggcacccagggtgttgtcacaaattttgaaattttccgaatgagggagaaacaggtacctgtggatgtggtcgagatgaaagaaaccatcatagcctttgcctgggaaccaaatggaagtaagtttgctgtgctgcacggagaggctccgcggatatctgtgtctttctaccacgtcaaaaacaacgggaagattgaactcatcaagatgttcgacaagcagcaggcgaacaccatcttctggagcccccaaggacagttcgtggtgttggcgggcctgaggagtatgaacggtgccttagcgtttgtggacacttcggactgcacggtcatgaacatcgcagagcactacatggcttccgacgtcgaatgggatcctactgggcgctacgtcgtcacctctgtgtcctggtggagccataaggtggacaacgcgtactggctgtggactttccagggacgcctcctgcagaagaacaacaaggaccgcttctgccagctgctgtggcggccccggcctcccacactcctgagccaggaacagatcaagggtgactatgaccagagcaggaccaaagtgctgcacatgagcctgaaccccaccagtgtggccaggcagcgcctgcgcgaggaccacagccagctgcaggcggagtgcgagcgactgcgcgggctcctgcgcgccatggagagaggaggcaccgtcccagccgaccttgaggctgccgccgcgagtctgccatcgtccaaggaggtggcagagctgaagaagcaggtggagagtgccgagctgaagaaccagcggctcaaggaggttttccagaccaagatccaggagttccgcaaggcctgctacacgctcaccggctaccagatcgacatcaccacggagaaccagtaccggctgacctcgctgtacgccgagcacccaggcgactgcctcatcttcaaggtgggtcctgcgtgtgacggctctccggctgtctcgctctctgtctcctcctgtggggagatccgaccgtagccctcagcaaaggagcagcctcgcgtccaaaggggatggtgtggagggctgggcgggaaggaggtgcactggcccgtcctcgtcaccccctgaggcttctcagccttgggccaaccctatgtggctttgcagccctggacctcctgggtgcagaagaccctaggctgtccccctgactttctcagcctctgtctgtcgcaacttgggcttcgttccatgagggctgcggccgtaggcgtgtgtgtcagtgtgtccagaggcagtggtgcctggggaggactgaagtccgtgtggggccggggcaggggacgccttccaagatgccaggctgcgcagtgggacagcgcagtcccagaagccagcacagggcaaggtagacagactagaagaggaaaggagagccagccgcatctctacactcgcgtcctgcgagccagca

SEQ ID NO: 1130 - DNA, 2568 bp, Homo sapiens
aattactgggagatgtactcaaagatcggccccaggaagcagatggaatcgattcggtgattgtagtggacaatgtccctcaggtgggacccgaccgacttgagaaactcaaaaatgtcatccacaagatcttttccaagtttgggaaaatcacaaatgatttttatcctgaagaggatgggaagacaaaagggtatattttcctggagtacgcgtcccctgcccacgctgtggatgctgtgaagaacgccgacggctacaagcttgacaagcagcacacattccgggtcaacctctttacggattttgacaagtatatgacgatcagtgacgagtgggatattccagagaaacagcctttcaaagacctggggaacttacgttactggcttgaagaggcagaatgcagagatcagtacagtgtgatttttgagagtggagaccgcacttccatattctggaatgacgtaaaagaccctgtctcaattgaagaaagagcgagatggacagagacgtatgtgcgttggtctcctaagggcacctacctggctacctttcatcaaagaggcattgctctatgggggggagagaaattcaagcaaattcagagattcagccaccaaggggttcagcttattgacttctcaccttgtgaaaggtacctggtgacctttagccccctgatggacacgcaggatgaccctcaggccataatcatctgggacatccttacggggcacaagaagaggggttttcactgtgagagctcagcccattggcctatttttaagtggagccatgatggcaaattctttgccagaatgaccctggatacgcttagcatctatgaaactccttctatgggtcttttggacaagaagagtttgaagatctctgggataaaagacttttcttggtctcctggtggtaacataatcgccttctgggtgcctgaagacaaagatattccagccagggtaaccctgatgcagctccctaccaggcaagagatccgagtgaggaacctgttcaatgtggtggactgcaagctccattggcagaagaacggagactacttgtgtgtgaaagtagataggactccgaaaggcacccagggtgttgtcacaaattttgaaattttccgaatgagggagaaacaggtacctgtggatgtggtcgagatgaaagaaaccatcatagcctttgcctgggaaccaaatggaagtaagtttgctgtgctgcacggagaggctccgcggatatctgtgtctttctaccacgtcaaaaacaacgggaagattgaactcatcaagatgttcgacaagcagcaggcgaacaccatcttctggagcccccaaggacagttcgtggtgttggcgggcctgaggagtatgaacggtgccttagcgtttgtggacacttcggactgcacggtcatgaacatcgcagagcactacatggcttccgacgtcgaatgggatcctactgggcgctacgtcgtcacctctgtgtcctggtggagccataaggtggacaacgcgtactggctgtggactttccagggacgcctcctgcagaagaacaacaaggaccgcttctgccagctgctgtggcggccccggcctcccacactcctgagccaggaacagatcaagggtgactatgaccagagcaggaccaaagtgctgcacatgagcctgaaccccaccagtgtggccaggcagcgcctgcgcgaggaccacagccagctgcaggcggagtgcgagcgactgcgcgggctcctgcgcgccatggagagaggaggcaccgtcccagccgaccttgaggctgccgccgcgagtctgccatcgtccaaggaggtggcagagctgaagaagcaggtggagagtgccgagctgaagaaccagcggctcaaggaggttttccagaccaagatccaggagttccgcaaggcctgctacacgctcaccggctaccagatcgacatcaccacggagaaccagtaccggctgacctcgctgtacgccgagcacccaggcgactgcctcatcttcaaggtgggtcctgcgtgtgacggctctccggctgtctcgctctctgtctcctcctgtggggagatccgaccgtagccctcagcaaaggagcagcctcgcgtccaaaggggatggtgtggagggctgggcgggaaggaggtgcactggcccgtcctcgtcaccccctgaggcttctcagccttgggccaaccctatgtggctttgcagccctggacctcctgggtgcagaagaccctaggctgtccccctgactttctcagcctctgtctgtcgcaacttgggcttcgttccatgagggctgcggccgtaggcgtgtgtgtcagtgtgtccagaggcagtggtgcctggggaggactgaagtccgtgtggggccggggcaggggacgccttccaagatgccaggctgcgcagtgggacagcgcagtcccagaagccagcacagggcaaggtagacagactagaagaggaaaggagagccagccgcatctctacactcgcgtcctgcgagccagca

SEQ ID NO: 1131 - DNA, 2805 bp, Homo sapiens
aattactgggagatgtactcaaagatcggccccaggaagcagatggaatcgattcggtgattgtagtggacaatgtccctcaggtgggacccgaccgacttgagaaactcaaaaatgtcatccacaagatcttttccaagtttgggaaaatcacaaatgatttttatcctgaagaggatgggaagacaaaagggtatattttcctggagtacgcgtcccctgcccacgctgtggatgctgtgaagaacgccgacggctacaagcttgacaagcagcacacattccgggtcaacctctttacggattttgacaagtatatgacgatcagtgacgagtgggatattccagagaaacagcctttcaaagacctggggaacttacgttactggcttgaagaggcagaatgcagagatcagtacagtgtgatttttgagagtggagaccgcacttccatattctggaatgacgtaaaagaccctgtctcaattgaagaaagagcgagatggacagagacgtatgtgcgttggtctcctaagggcacctacctggctacctttcatcaaagaggcattgctctatgggggggagagaaattcaagcaaattcagagattcagccaccaaggggttcagcttattgacttctcaccttgtgaaaggtacctggtgacctttagccccctgatggacacgcaggatgaccctcaggccataatcatctgggacatccttacggggcacaagaagaggggttttcactgtgagagctcagcccattggcctatttttaagtggagccatgatggcaaattctttgccagaatgaccctggatacgcttagcatctatgaaactccttctatgggtcttttggacaagaagagtttgaagatctctgggataaaagacttttcttggtctcctggtggtaacataatcgccttctgggtgcctgaagacaaagatattccagccagggtaaccctgatgcagctccctaccaggcaagagatccgagtgaggaacctgttcaatgtggtggactgcaagctccattggcagaagaacggagactacttgtgtgtgaaagtagataggactccgaaaggcacccagggtgttgtcacaaattttgaaattttccgaatgagggagaaacaggtacctgtggatgtggtcgagatgaaagaaaccatcatagcctttgcctgggaaccaaatggaagtaagtttgctgtgctgcacggagaggctccgcggatatctgtgtctttctaccacgtcaaaaacaacgggaagattgaactcatcaagatgttcgacaagcagcaggcgaacaccatcttctggagcccccaaggacagttcgtggtgttggcgggcctgaggagtatgaacggtgccttagcgtttgtggacacttcggactgcacggtcatgaacatcgcagagcactacatggcttccgacgtcgaatgggatcctactgggcgctacgtcgtcacctctgtgtcctggtggagccataaggtggacaacgcgtactggctgtggactttccagggacgcctcctgcagaagaacaacaaggaccgcttctgccagctgctgtggcggccccggcctcccacactcctgagccaggaacagatcaaggctcagctgtcgcaggccctggaggagctgggaggccagaaacaaagagcagacatgctggagatggagctgaagatgctgaagtctcagtccagctctgccgaacagagcttcctgttctccagggaggaggcggacacgctcaggttgaaggtcgaggagctggaaggcgagcggagtcggctggaggaggaaaagaggatgctggaggcacagctggagcggcgagctctgcagggtgactatgaccagagcaggaccaaagtgctgcacatgagcctgaaccccaccagtgtggccaggcagcgcctgcgcgaggaccacagccagctgcaggcggagtgcgagcgactgcgcgggctcctgcgcgccatggagagaggaggcaccgtcccagccgaccttgaggctgccgccgcgagtctgccatcgtccaaggaggtggcagagctgaagaagcaggtggagagtgccgagctgaagaaccagcggctcaaggaggttttccagaccaagatccaggagttccgcaaggcctgctacacgctcaccggctaccagatcgacatcaccacggagaaccagtaccggctgacctcgctgtacgccgagcacccaggcgactgcctcatcttcaaggtgggtcctgcgtgtgacggctctccggctgtctcgctctctgtctcctcctgtggggagatccgaccgtagccctcagcaaaggagcagcctcgcgtccaaaggggatggtgtggagggctgggcgggaaggaggtgcactggcccgtcctcgtcaccccctgaggcttctcagccttgggccaaccctatgtggctttgcagccctggacctcctgggtgcagaagaccctaggctgtccccctgactttctcagcctctgtctgtcgcaacttgggcttcgttccatgagggctgcggccgtaggcgtgtgtgtcagtgtgtccagaggcagtggtgcctggggaggactgaagtccgtgtggggccggggcaggggacgccttccaagatgccaggctgcgcagtgggacagcgcagtcccagaagccagcacagggcaaggtagacagactagaagaggaaaggagagccagccgcatctctacactcgcgtcctgcgagccagca

SEQ ID NO: 1132 - DNA, 3076 bp, Homo sapiens
tagccgtcgcggcgcgcggtgcggcctgggagagtcggaagcgcggcggccgcggagccctgcgagtaggcagcgttgggcccatgcaggacgcggagaacgtggcggtgcccgaggcggccgaggagcgcgccgagcccggccagcagcagccggccgccgagccgccgccagccgaggggctgctgcggcccgcggggcccggcgctccggaggccgcggggaccgaggcctccagtgaggaggtggggatcgcggaggccgggccggagtccgaggtgaggaccgagccggcggccgaggcagaggcggcctccggcccgtccgagtcgccctcgccgccggccgccgaggagctgcccgggtcgcatgctgagccccctgtcccggcacagggcgaggccccaggagagcaggctcgggacgagcgctccgacagccgggcccaggcggtgtccgaggacgcgggaggaaacgagggcagagcggccgaggccgaaccccgggcgctggagaacggcgacgcggacgagccctccttcagcgaccccgaggacttcgtggacgacgtgagcgaggaagaattactgggagatgtactcaaagatcggccccaggaagcagatggaatcgattcggtgattgtagtggacaatgtccctcaggtgggacccgaccgacttgagaaactcaaaaatgtcatccacaagatcttttccaagtttgggaaaatcacaaatgatttttatcctgaagaggatgggaagacaaaagggtatattttcctggagtacgcgtcccctgcccacgctgtggatgctgtgaagaacgccgacggctacaagcttgacaagcagcacacattccgggtcaacctctttacggattttgacaagtatatgacgatcagtgacgagtgggatattccagagaaacagcctttcaaagacctggggaacttacgttactggcttgaagaggcagaatgcagagatcagtacagtgtgatttttgagagtggagaccgcacttccatattctggaatgacgtaaaagaccctgtctcaattgaagaaagagcgagatggacagagacgtatgtgcgttggtctcctaagggcacctacctggctacctttcatcaaagaggcattgctctatgggggggagagaaattcaagcaaattcagagattcagccaccaaggggttcagcttattgacttctcaccttgtgaaaggtacctggtgacctttagccccctgatggacacgcaggatgaccctcaggccataatcatctgggacatccttacggggcacaagaagaggggttttcactgtgagagctcagcccattggcctatttttaagtggagccatgatggcaaattctttgccagaatgaccctggatacgcttagcatctatgaaactccttctatgggtcttttggacaagaagagtttgaagatctctgggataaaagacttttcttggtctcctggtggtaacataatcgccttctgggtgcctgaagacaaagatattccagccagggtaaccctgatgcagctccctaccaggcaagagatccgagtgaggaacctgttcaatgtggtggactgcaagctccattggcagaagaacggagactacttgtgtgtgaaagtagataggactccgaaaggcacccagggtgttgtcacaaattttgaaattttccgaatgagggagaaacaggtacctgtggatgtggtcgagatgaaagaaaccatcatagcctttgcctgggaaccaaatggaagtaagtttgctgtgctgcacggagaggctccgcggatatctgtgtctttctaccacgtcaaaaacaacgggaagattgaactcatcaagatgttcgacaagcagcaggcgaacaccatcttctggagcccccaaggacagttcgtggtgttggcgggcctgaggagtatgaacggtgccttagcgtttgtggacacttcggactgcacggtcatgaacatcgcagagcactacatggcttccgacgtcgaatgggatcctactgggcgctacgtcgtcacctctgtgtcctggtggagccataaggtggacaacgcgtactggctgtggactttccagggacgcctcctgcagaagaacaacaaggaccgcttctgccagctgctgtggcggccccggcctcccacactcctgagccaggaacagatcaagggtgactatgaccagagcaggaccaaagtgctgcacatgagcctgaaccccaccagtgtggccaggcagcgcctgcgcgaggaccacagccagctgcaggcggagtgcgagcgactgcgcgggctcctgcgcgccatggagagaggaggcaccgtcccagccgaccttgaggctgccgccgcgagtctgccatcgtccaaggaggtggcagagctgaagaagcaggtggagagtgccgagctgaagaaccagcggctcaaggaggttttccagaccaagatccaggagttccgcaaggcctgctacacgctcaccggctaccagatcgacatcaccacggagaaccagtaccggctgacctcgctgtacgccgagcacccaggcgactgcctcatcttcaaggccaccagcccctcgggttccaagatgcagctactggagacagagttctcacacaccgtgggcgagctcatcgaggtgcacctgcggcgccaggacagcatccctgccttcctcagctcgctcaccctcgagctcttcagccgccagaccgtggcgtagcctgcaggctcgggggcatagccggagccactctgcttggcctgacctgcaggtcccctgccccgccagccacaggctgggtgcacgtcctgcctctccagccccacagggcagcagcatgactgacagacacgctgggacctacgtcgggcttcctgctggggcggccagcaccctctccacgtgcagaccccatgcgtcccggagcctggtgtgtgggcgtcggccaccagcctgggttcctcaccttgtgaaataaaatcttctcccctagacac

SEQ ID NO: 1133 - DNA, 2144 bp, Homo sapiens
tttggagataaaaatgacaaaggagaacctcctgaacagcatccagtttgcttttagctttagccatctctctgacctcagtgctgctggactcagttccaagatctaactgtcaaatgctttaggggaaacgggaagagaagtccctggagtaacccatgtgcgcagcctggcactgttttcacttgcctttggaaatgaaggtgcagaaaccatgggaggatcgtctgttttttgtgatggagtttgtgaatgggggtgacttgatgttccacattcagaagtctcgtcgttttgatgaagcacgagctcgcttctatgctgcagaaatcatttcggctctcatgttcctccatgataaaggaatcatctatagagatctgaaactggacaatgtcctgttggaccacgagggtcactgtaaactggcagacttcggaatgtgcaaggaggggatttgcaatggtgtcaccacggccacattctgtggcacgccagactatatcgctccagagatcctccaggaaatgctgtacgggcctgcagtagactggtgggcaatgggcgtgttgctctatgagatgctctgtggtcacgcgccttttgaggcagagaacgaagatgacctctttgaggccatactgaatgatgaggtggtctaccctacctggctccatgaagatgccacagggatcctaaaatctttcatgaccaagaaccccaccatgcgcttgggcagcctgactcagggaggcgagcacgccatcttgagacatcctttttttaaggaaatcgactgggcccagctgaaccatcgccaaatagaaccgcctttcagacccagaatcaaatcccgagaagatgtcagtaattttgaccctgacttcataaaggaagagccagttttaactccaattgatgagggacatcttccaatgattaaccaggatgagtttagaaacttttcctatgtgtctccagaattgcaaccatagccttatggggagtgagagagagggcacgagaacccaaagggaatagagattctccaggaatttcctctatgggaccttcccagcatcagccttagaacaagaaccttaccttcaaggagcaagtgaagaactctgtgaaggatggaactttcagatatcaactatttagagtccagagggagccatggcactagaaatagttgataatgaaatgagattttatgaagtataccgctccacctatgagcgtctgtctctgtgggcttgggatgttaacaggagccaaaaggagggaaagtgtgaagaataaagtagatctgagaaattctgagccaatcaggcttcttaattcaagagacaaaccaagacgttctgtcaactgtgctgtgctcttctttaagccaatgaaccccaattcctggcagtctacaagaagtctcttaatgctaatgaagaatttaaaggtctttttaaggaaatgaagggctttccaaatagaatgatttactctgaagaaacaaacaatggtatctctgaaactcacaacctaaagcccaatcttgaaaatatgttgtgcaccaagacgactgcttcagcttcttctcttatccttactttctttaatagatatttattaaactgtccagtgaaaaggtgccacaatgcccagtattgtaaacaacaggtttgcattcatgaagctttcattcattctggagtctactaatttacctgaatggtgtttgcattctgtgaaatgcctctccacgttgcatatgtcacacttttgtctgcacataactcttttttcacaagaagggtcactgccacaacagcacagtcagcgggtgaattacaggtgcctgctgcctgcctacctgggtaatctgatcttgtctgtatcgccgtgtgctcatcactgaagaattgcaggccactcatgtcagtgaccagatttgtggcttataaacattagcagtttatttatgttttaagatgcaaagatgtgtgtttgatattcactttaataattagaaatggatcttgtaaacagggcatatatcaaagatgaccttataatatgtacccgaatatacagttcaagaattttgtctgactggaaataaatgcattttgtagcaaaaggaa

SEQ ID NO: 1134 - DNA, 2995 bp, Homo sapiens
tttggagataaaaatgacaaaggagaacctcctgaacagcatccagtttgcttttagctttagccatctctctgacctcagtgctgctggactcagttccaagatctaactgtcaaatgctttaggggaaacgggaagagaagtccctggagtaacccatgtgcgcagcctggcactgttttcacttgcctttggaaatgaaggtgcagaaaccatgggagctactctccagagagaccggatcttcaaacattttaccaggaagcgccaaagggctatgcgaaggcgagtccaccagatcaatggacacaagttcatggccacgtatctgaggcagcccacctactgctctcactgcagggagtttatctggggagtgtttgggaaacagggttatcagtgccaagtgtgcacctgtgtcgtccataaacgctgccatcatctaattgttacagcctgtacttgccaaaacaatattaacaaagtggattcaaagattgcagaacagaggttcgggatcaacatcccacacaagttcagcatccacaactacaaagtgccaacattctgcgatcactgtggctcactgctctggggaataatgcgacaaggacttcagtgtaaaatatgtaaaatgaatgtgcatattcgatgtcaagcgaacgtggcccctaactgtggggtaaatgcggtggaacttgccaagaccctggcagggatgggtctccaacccggaaatatttctccaacctcgaaactcgtttccagatcgaccctaagacgacagggaaaggagagcagcaaagaaggaaatgggattggggttaattcttccaaccgacttggtatcgacaactttgagttcatccgagtgttggggaaggggagttttgggaaggtgatgcttgcaagagtaaaagaaacaggagacctctatgctgtgaaggtgctgaagaaggacgtgattctgcaggatgatgatgtggaatgcaccatgaccgagaaaaggatcctgtctctggcccgcaatcaccccttcctcactcagttgttctgctgctttcagacccccgatcgtctgttttttgtgatggagtttgtgaatgggggtgacttgatgttccacattcagaagtctcgtcgttttgatgaagcacgagctcgcttctatgctgcagaaatcatttcggctctcatgttcctccatgataaaggaatcatctatagagatctgaaactggacaatgtcctgttggaccacgagggtcactgtaaactggcagacttcggaatgtgcaaggaggggatttgcaatggtgtcaccacggccacattctgtggcacgccagactatatcgctccagagatcctccaggaaatgctgtacgggcctgcagtagactggtgggcaatgggcgtgttgctctatgagatgctctgtggtcacgcgccttttgaggcagagaacgaagatgacctctttgaggccatactgaatgatgaggtggtctaccctacctggctccatgaagatgccacagggatcctaaaatctttcatgaccaagaaccccaccatgcgcttgggcagcctgactcagggaggcgagcacgccatcttgagacatcctttttttaaggaaatcgactgggcccagctgaaccatcgccaaatagaaccgcctttcagacccagaatcaaatcccgagaagatgtcagtaattttgaccctgacttcataaaggaagagccagttttaactccaattgatgagggacatcttccaatgattaaccaggatgagtttagaaacttttcctatgtgtctccagaattgcaaccatagccttatggggagtgagagagagggcacgagaacccaaagggaatagagattctccaggaatttcctctatgggaccttcccagcatcagccttagaacaagaaccttaccttcaaggagcaagtgaagaactctgtgaaggatggaactttcagatatcaactatttagagtccagagggagccatggcactagaaatagttgataatgaaatgagattttatgaagtataccgctccacctatgagcgtctgtctctgtgggcttgggatgttaacaggagccaaaaggagggaaagtgtgaagaataaagtagatctgagaaattctgagccaatcaggcttcttaattcaagagacaaaccaagacgttctgtcaactgtgctgtgctcttctttaagccaatgaaccccaattcctggcagtctacaagaagtctcttaatgctaatgaagaatttaaaggtctttttaaggaaatgaagggctttccaaatagaatgatttactctgaagaaacaaacaatggtatctctgaaactcacaacctaaagcccaatcttgaaaatatgttgtgcaccaagacgactgcttcagcttcttctcttatccttactttctttaatagatatttattaaactgtccagtgaaaaggtgccacaatgcccagtattgtaaacaacaggtttgcattcatgaagctttcattcattctggagtctactaatttacctgaatggtgtttgcattctgtgaaatgcctctccacgttgcatatgtcacacttttgtctgcacataactcttttttcacaagaagggtcactgccacaacagcacagtcagcgggtgaattacaggtgcctgctgcctgcctacctgggtaatctgatcttgtctgtatcgccgtgtgctcatcactgaagaattgcaggccactcatgtcagtgaccagatttgtggcttataaacattagcagtttatttatgttttaagatgcaaagatgtgtgtttgatattcactttaataattagaaatggatcttgtaaacagggcatatatcaaagatgaccttataatatgtacccgaatatacagttcaagaattttgtctgactggaaataaatgcattttgtagcaaaaggaa

SEQ ID NO: 1135 - skipped

SEQ ID NO: 1136 - DNA, 904 bp, Homo sapiens
agataaccacctagctattgctaaatgtgatctcactcagttgaaaaagaaacaatcagaagtgagcaatgggagccgtgaaaccatctcaatgaagacttgttgccaacatggagatagaggatattggtctacagggtactattggagaggtaactgtgaggcttttacacccagacagcccttctgtgcatggcaagttttactgaactcctcgagatttagggccaattaattcatctgttttaagatgaattcatcggggggtcctgatgacaacttaattgaaggtggaggaacaaaatttgtctgcaaacctggagccagaaacattaccgtcatattccacccattactaagactaaagcaagccaaagagctggaccgagagagggctgctgccaatgagcagttaaccagagccatccttcgggagaggatatgtagcgaggaggaacgcgctaaggcaaagcacctgataaaagtggagctgctctgggtgaaacctggagtgttgactgcttagcctccacttcggccttcctagaaacccagatgttactcctcggaacctttagtcctcattggagcacagttgggaactcactggacagggaaaatgggaccatggaatggagaactttgaactgaagagtgagggggattttcctagttcactaggcaattgggaaacactaaaactttctaagaagaaggctcatttctagtctctcccattctttaccttagtcacttctctgaaagaccaacccatgaccagctgcaaacagagaacatgaaaggaagtccatgcgtaatgaatcagtttcttcagtgacaaatctggggtcccggttgcatgggcaaatagtgaagccagaatagaggtggtagaccaagaaag

SEQ ID NO: 1137 - DNA, 2772 bp, Homo sapiens
ttccttggagcctagcggctctccccgcgtccaagatggcggcagaagcagctggtgggaaatacagaagcacagtcagcaaaagcaaagacccctcggggctgctcatctctgtgatcaggactctgtctactagtgacgatgtcgaagacagggaaaatgaaaagggtcgccttgaagaagcctacgagaaatgtgaccgtgacctggatgaattgattgtacagcactacacagaattgacgacagccattcgcacataccagagcatcacagagcgcatcactaactcccgaaataaaataaagcaggtaaaagagaacctgctttcatgcaagatgctgctgcactgcaaacgggatgagcttcggaaactgtggattgaaggaattgagcataagcatgtcctgaacttgttggatgaaattgagaatatcaagcaagtgcctcaaaagctggaacagtgcatggccagcaagcactatctcagtgccactgacatgttggtgtcagcagttgagtctttggagggccccctgctccaggtggaaggactgagtgaccttcgactagagcttcacagcaagaagatgaaccttcacttggttctcatagatgaactacaccggcacctgtacatcaaatcgactagccgagttgtgcagcgtaacaaggaaaaagggaaaatcagctccctcgtgaaagatgcttctgttcctctgattgatgttacaaacctccctactcctcgaaaattccttgatacctctcactattctactgctggaagctcaagtgtgagggagataaatctgcaggacatcaaggaagatttagaattggatccagaggaaaacagcaccctgtttatgggtatcctcattaagggcttggcgaaactgaagaagatcccagaaacagttaaggcaatcatagagcgcttggagcaggagttgaagcaaattgtgaagaggtctacaacccaggtggcagacagtggctatcagcggggggagaacgttactgtggagaaccaaccaaggttgcttctagaactgctggagttactgtttgacaagtttaatgctgtagccgctgcacactctgtggtcctgggatacctgcaggacactgtagtgactccactgactcagcaggaagatatcaaactgtatgatatggcagatgtatgggtgaagatccaagatgttctacagatgctattaactgagtacttggatatgaaaaatactcgtacggcctctgaaccatcagctcaactaagctatgccagcactggacgagagtttgcagccttttttgccaagaagaaacctcaaaggccaaaaaattctcttttcaagttcgaatcgtcctcccatgccatcagtatgagcgcctatctgcgagaacagagaagggagctctatagtcggagtggagaactgcaagggggtcctgatgacaacttaattgaaggtggaggaacaaaatttgtctgcaaacctggagccagaaacattaccgtcatattccacccattactaagactaaagcaagccaaagagctggaccgagagagggctgctgccaatgagcagttaaccagagccatccttcgggagaggatatgtagcgaggaggaacgcgctaaggcaaagcacctggatattgaagacaaagctaggcagctggaagagaaagaccgagtgctaaagaagcaggatgcattctacaaagaacagctggctagactggaggagaggagctcagagttctacagagtcaccactgaacaatatcagaaagctgctgaagaggtggaagcaaagttcaagcgatatgagtctcatccagtctgtgctgatctgcaggccaaaattcttcagtgttaccgtgagaacacccaccagaccctcaaatgctccgctctggccacccagtatatgcactgtgtcaatcatgccaaacagagcatgcttgagaagggaggataaaaactttcagaatgagcaaaacaccatcaacgttaattccagagatggaacattttttttcctagtgagaaaacaacccatttgaagagaagaccactaatgagaagaccactaaagagagacatcaagaatggattcagcagaatcatttcacgttttgaacagcagcagtttgaagggccaaagccttgatcagggatcagtcattaaaggacactcttgagtattagtaaaccctcttatgatgattaaaagagaagggcagccctctccaccttttggtactttctattcaacttgcactgaccataaaatgtttctcttctgaacaagccccatcatttggtgaacctccaccctaacaaagtaggatggggttgggggctaaattaattggagtggggcgaggagagagccagaaaacatagatccgagggcagcagtgctgggtggagagagccagaaaacagatctggaggcagcagtgctggatggaattgtctaggctgtggcatgttggttttgtctttcttttctcctttgattatgtaagagctatttcattataacttattatggtgattatacaggcaagaagacaaaaaggagagaaaatgtacctcttctactggaataatgtttatgattacaagtgagataaggtatttttatcaatatgaaggcaaccttggctgataaaacctctatagtgaatactcacatctttacttcactcactatcaataataaatatattttctgacaaagactggca

SEQ ID NO: 1138 - skipped

SEQ ID NO: 1139 - DNA, 1568 bp, Homo sapiens
agataaccacctagctattgctaaatgtgatctcactcagttgaaaaagaaacaatcagaagtgagcaatgggagccgtgaaaccatctcaatgaagacttgttgccaacatggagatagaggatattggtctacagggtactattggagaggtaactgtgaggcttttacacccagacagcccttctgtgcatggcaagttttactgaactcctcgagatttagggccaattaattcatctgttttaagatgaattcatcggggggtcctgatgacaacttaattgaaggtggaggaacaaaatttgtctgcaaacctggagccagaaacattaccgtcatattccacccattactaagactaaagcaagccaaagagctggaccgagagagggctgctgccaatgagcagttaaccagagccatccttcgggagaggatatgtagcgaggaggaacgcgctaaggcaaagcacctggctaggcagctggaagagaaagaccgagtgctaaagaagcaggatgcattctacaaagaacagctggctagactggaggagaggagctcagagttctacagagtcaccactgaacaatatcagaaagctgctgaagaggtggaagcaaagttcaagcgatatgagtctcatccagtctgtgctgatctgcaggccaaaattcttcagtgttaccgtgagaacacccaccagaccctcaaatgctccgctctggccacccagtatatgcactgtgtcaatcatgccaaacagagcatgcttgagaagggaggataaaaactttcagaatgagcaaaacaccatcaacgttaattccagagatggaacattttttttcctagtgagaaaacaacccatttgaagagaagaccactaatgagaagaccactaaagagagacatcaagaatggattcagcagaatcatttcacgttttgaacagcagcagtttgaagggccaaagccttgatcagggatcagtcattaaaggacactcttgagtattagtaaaccctcttatgatgattaaaagagaagggcagccctctccaccttttggtactttctattcaacttgcactgaccataaaatgtttctcttctgaacaagccccatcatttggtgaacctccaccctaacaaagtaggatggggttgggggctaaattaattggagtggggcgaggagagagccagaaaacatagatccgagggcagcagtgctgggtggagagagccagaaaacagatctggaggcagcagtgctggatggaattgtctaggctgtggcatgttggttttgtctttcttttctcctttgattatgtaagagctatttcattataacttattatggtgattatacaggcaagaagacaaaaaggagagaaaatgtacctcttctactggaataatgtttatgattacaagtgagataaggtatttttatcaatatgaaggcaaccttggctgataaaacctctatagtgaatactcacatctttacttcactcactatcaataataaatatattttctgacaaagactggca

SEQ ID NO: 1140 - DNA, 1605 bp, Homo sapiens
tttatagagggcatctgtcggttgcatttgatttatttaaaacgttttcttacatggccaatttagtaacagcaagcaaaaccaaaatgagcaaaggagaggatcccaataatcccagatctataaagcggatttctcaagggggtagagataaccacctagctattgctaaatgtgatctcactcagttgaaaaagaaacaatcagaagtgagcaatgggagccgtgaaaccatctcaatgaagacttgttgccaacatggagatagaggatattggtctacagggtactattggagagggggtcctgatgacaacttaattgaaggtggaggaacaaaatttgtctgcaaacctggagccagaaacattaccgtcatattccacccattactaagactaaagcaagccaaagagctggaccgagagagggctgctgccaatgagcagttaaccagagccatccttcgggagaggatatgtagcgaggaggaacgcgctaaggcaaagcacctggctaggcagctggaagagaaagaccgagtgctaaagaagcaggatgcattctacaaagaacagctggctagactggaggagaggagctcagagttctacagagtcaccactgaacaatatcagaaagctgctgaagaggtggaagcaaagttcaagcgatatgagtctcatccagtctgtgctgatctgcaggccaaaattcttcagtgttaccgtgagaacacccaccagaccctcaaatgctccgctctggccacccagtatatgcactgtgtcaatcatgccaaacagagcatgcttgagaagggaggataaaaactttcagaatgagcaaaacaccatcaacgttaattccagagatggaacattttttttcctagtgagaaaacaacccatttgaagagaagaccactaatgagaagaccactaaagagagacatcaagaatggattcagcagaatcatttcacgttttgaacagcagcagtttgaagggccaaagccttgatcagggatcagtcattaaaggacactcttgagtattagtaaaccctcttatgatgattaaaagagaagggcagccctctccaccttttggtactttctattcaacttgcactgaccataaaatgtttctcttctgaacaagccccatcatttggtgaacctccaccctaacaaagtaggatggggttgggggctaaattaattggagtggggcgaggagagagccagaaaacatagatccgagggcagcagtgctgggtggagagagccagaaaacagatctggaggcagcagtgctggatggaattgtctaggctgtggcatgttggttttgtctttcttttctcctttgattatgtaagagctatttcattataacttattatggtgattatacaggcaagaagacaaaaaggagagaaaatgtacctcttctactggaataatgtttatgattacaagtgagataaggtatttttatcaatatgaaggcaaccttggctgataaaacctctatagtgaatactcacatctttacttcactcactatcaataataaatatattttctgacaaagactggca

SEQ ID NO: 1141 - skipped

SEQ ID NO: 1142 - DNA, 2780 bp, Homo sapiens
tttttctggggttagctatagagagaggagccccgcctcagtcttttctttaggggcagcaccttctattacagtctcgggaccccaaagcacgctatttgggtttggtagagaaaaccaggtgtaaaggactctgtctactagtgacgatgtcgaagacagggaaaatgaaaagggtcgccttgaagaagcctacgagaaatgtgaccgtgacctggatgaattgattgtacagcactacacagaattgacgacagccattcgcacataccagagcatcacagagcgcatcactaactcccgaaataaaataaagcaggtaaaagagaacctgctttcatgcaagatgctgctgcactgcaaacgggatgagcttcggaaactgtggattgaaggaattgagcataagcatgtcctgaacttgttggatgaaattgagaatatcaagcaagtgcctcaaaagctggaacagtgcatggccagcaagcactatctcagtgccactgacatgttggtgtcagcagttgagtctttggagggccccctgctccaggtggaaggactgagtgaccttcgactagagcttcacagcaagaagatgaaccttcacttggttctcatagatgaactacaccggcacctgtacatcaaatcgactagccgagttgtgcagcgtaacaaggaaaaagggaaaatcagctccctcgtgaaagatgcttctgttcctctgattgatgttacaaacctccctactcctcgaaaattccttgatacctctcactattctactgctggaagctcaagtgtgagggagataaatctgcaggacatcaaggaagatttagaattggatccagaggaaaacagcaccctgtttatgggtatcctcattaagggcttggcgaaactgaagaagatcccagaaacagttaaggcaatcatagagcgcttggagcaggagttgaagcaaattgtgaagaggtctacaacccaggtggcagacagtggctatcagcggggggagaacgttactgtggagaaccaaccaaggttgcttctagaactgctggagttactgtttgacaagtttaatgctgtagccgctgcacactctgtggtcctgggatacctgcaggacactgtagtgactccactgactcagcaggaagatatcaaactgtatgatatggcagatgtatgggtgaagatccaagatgttctacagatgctattaactgagtacttggatatgaaaaatactcgtacggcctctgaaccatcagctcaactaagctatgccagcactggacgagagtttgcagccttttttgccaagaagaaacctcaaaggccaaaaaattctcttttcaagttcgaatcgtcctcccatgccatcagtatgagcgcctatctgcgagaacagagaagggagctctatagtcggagtggagaactgcaagggggtcctgatgacaacttaattgaaggtggaggaacaaaatttgtctgcaaacctggagccagaaacattaccgtcatattccacccattactaagactaaagcaagccaaagagctggaccgagagagggctgctgccaatgagcagttaaccagagccatccttcgggagaggatatgtagcgaggaggaacgcgctaaggcaaagcacctggatattgaagacaaagctaggcagctggaagagaaagaccgagtgctaaagaagcaggatgcattctacaaagaacagctggctagactggaggagaggagctcagagttctacagagtcaccactgaacaatatcagaaagctgctgaagaggtggaagcaaagttcaagcgatatgagtctcatccagtctgtgctgatctgcaggccaaaattcttcagtgttaccgtgagaacacccaccagaccctcaaatgctccgctctggccacccagtatatgcactgtgtcaatcatgccaaacagagcatgcttgagaagggaggataaaaactttcagaatgagcaaaacaccatcaacgttaattccagagatggaacattttttttcctagtgagaaaacaacccatttgaagagaagaccactaatgagaagaccactaaagagagacatcaagaatggattcagcagaatcatttcacgttttgaacagcagcagtttgaagggccaaagccttgatcagggatcagtcattaaaggacactcttgagtattagtaaaccctcttatgatgattaaaagagaagggcagccctctccaccttttggtactttctattcaacttgcactgaccataaaatgtttctcttctgaacaagccccatcatttggtgaacctccaccctaacaaagtaggatggggttgggggctaaattaattggagtggggcgaggagagagccagaaaacatagatccgagggcagcagtgctgggtggagagagccagaaaacagatctggaggcagcagtgctggatggaattgtctaggctgtggcatgttggttttgtctttcttttctcctttgattatgtaagagctatttcattataacttattatggtgattatacaggcaagaagacaaaaaggagagaaaatgtacctcttctactggaataatgtttatgattacaagtgagataaggtatttttatcaatatgaaggcaaccttggctgataaaacctctatagtgaatactcacatctttacttcactcactatcaataataaatatattttctgacaaagactggca

SEQ ID NO: 1143 - DNA, 2603 bp, Homo sapiens
tttttctggggttagctatagagagaggagccccgcctcagtcttttctttaggggcagcaccttctattacagtctcgggaccccaaagcacgctatttgggtttggtagagaaaaccaggtgtaaaggactctgtctactagtgacgatgtcgaagacagggaaaatgaaaagggtcgccttgaagaagcctacgagaaatgtgaccgtgacctggatgaattgattgtacagcactacacagaattgacgacagccattcgcacataccagagcatcacagagcgcatcactaactcccgaaataaaataaagcaggtaaaagagaacctgctttcatgcaagatgctgctgcactgcaaacgggatgagcttcggaaactgtggattgaaggaattgagcataagcatgtcctgaacttgttggatgaaattgagaatatcaagcaagtgcctcaaaagctggaacagtgcatggccagcaagcactatctcagtgccactgacatgttggtgtcagcagttgagtctttggagggccccctgctccaggtggaaggactgagtgaccttcgactagagcttcacagcaagaagatgaaccttcacttggttctcatagatgaactacaccggcacctgtacatcaaatcgactagccgagttgtgcagcgtaacaaggaaaaagggaaaatcagctccctcgtgaaagatgcttctgttcctctgattgatgttacaaacctccctactcctcgaaaattccttgatacctctcactattctactgctggaagctcaagtgtgagggagataaatctgcaggacatcaaggaagatttagaattggatccagaggaaaacagcaccctgtttatgggtatcctcattaagggcttggcgaaactgaagaagatcccagaaacagttaaggcaatcatagagcgcttggagcaggagttgaagcaaattgtgaagaggtctacaacccaggtggcagacagtggctatcagcggggggagaacgttactgtggagaaccaaccaaggttgcttctagaactgctggagttactgtttgacaagtttaatgctgtagccgctgcacactctgtggtcctgggatacctgcaggacactgtagtgactccactgactcagcaggaagatatcaaactgtatgatatggcagatgtatgggtgaagatccaagatgttctacagctttcggaaaatgtgattgatcgaatgaaggaatcctctccatctggttcgaagtctcagcggtattctggtgcttatggtgcctcagtttctgatgaagaattgaaaagaagagtagctgaggagctggcattggagcaagccaagaaagaatccgaagatcagaaacgactaaagcaagccaaagagctggaccgagagagggctgctgccaatgagcagttaaccagagccatccttcgggagaggatatgtagcgaggaggaacgcgctaaggcaaagcacctggctaggcagctggaagagaaagaccgagtgctaaagaagcaggatgcattctacaaagaacagctggctagactggaggagaggagctcagagttctacagagtcaccactgaacaatatcagaaagctgctgaagaggtggaagcaaagttcaagcgatatgagtctcatccagtctgtgctgatctgcaggccaaaattcttcagtgttaccgtgagaacacccaccagaccctcaaatgctccgctctggccacccagtatatgcactgtgtcaatcatgccaaacagagcatgcttgagaagggaggataaaaactttcagaatgagcaaaacaccatcaacgttaattccagagatggaacattttttttcctagtgagaaaacaacccatttgaagagaagaccactaatgagaagaccactaaagagagacatcaagaatggattcagcagaatcatttcacgttttgaacagcagcagtttgaagggccaaagccttgatcagggatcagtcattaaaggacactcttgagtattagtaaaccctcttatgatgattaaaagagaagggcagccctctccaccttttggtactttctattcaacttgcactgaccataaaatgtttctcttctgaacaagccccatcatttggtgaacctccaccctaacaaagtaggatggggttgggggctaaattaattggagtggggcgaggagagagccagaaaacatagatccgagggcagcagtgctgggtggagagagccagaaaacagatctggaggcagcagtgctggatggaattgtctaggctgtggcatgttggttttgtctttcttttctcctttgattatgtaagagctatttcattataacttattatggtgattatacaggcaagaagacaaaaaggagagaaaatgtacctcttctactggaataatgtttatgattacaagtgagataaggtatttttatcaatatgaaggcaaccttggctgataaaacctctatagtgaatactcacatctttacttcactcactatcaataataaatatattttctgacaaagactggca

SEQ ID NO: 1144 - DNA, 2757 bp, Homo sapiens
ttccttggagcctagcggctctccccgcgtccaagatggcggcagaagcagctggtgggaaatacagaagcacagtcagcaaaagcaaagacccctcggggctgctcatctctgtgatcaggactctgtctactagtgacgatgtcgaagacagggaaaatgaaaagggtcgccttgaagaagcctacgagaaatgtgaccgtgacctggatgaattgattgtacagcactacacagaattgacgacagccattcgcacataccagagcatcacagagcgcatcactaactcccgaaataaaataaagcaggtaaaagagaacctgctttcatgcaagatgctgctgcactgcaaacgggatgagcttcggaaactgtggattgaaggaattgagcataagcatgtcctgaacttgttggatgaaattgagaatatcaagcaagtgcctcaaaagctggaacagtgcatggccagcaagcactatctcagtgccactgacatgttggtgtcagcagttgagtctttggagggccccctgctccaggtggaaggactgagtgaccttcgactagagcttcacagcaagaagatgaaccttcacttggttctcatagatgaactacaccggcacctgtacatcaaatcgactagccgagttgtgcagcgtaacaaggaaaaagggaaaatcagctccctcgtgaaagatgcttctgttcctctgattgatgttacaaacctccctactcctcgaaaattccttgatacctctcactattctactgctggaagctcaagtgtgagggagataaatctgcaggacatcaaggaagatttagaattggatccagaggaaaacagcaccctgtttatgggtatcctcattaagggcttggcgaaactgaagaagatcccagaaacagttaaggcaatcatagagcgcttggagcaggagttgaagcaaattgtgaagaggtctacaacccaggtggcagacagtggctatcagcggggggagaacgttactgtggagaaccaaccaaggttgcttctagaactgctggagttactgtttgacaagtttaatgctgtagccgctgcacactctgtggtcctgggatacctgcaggacactgtagtgactccactgactcagcaggaagatatcaaactgtatgatatggcagatgtatgggtgaagatccaagatgttctacagatgctattaactgagtacttggatatgaaaaatactcgtacggcctctgaaccatcagctcaactaagctatgccagcactggacgagagtttgcagccttttttgccaagaagaaacctcaaaggccaaaaaattctcttttcaagttcgaatcgtcctcccatgccatcagtatgagcgcctatctgcgagaacagagaagggagctctatagtcggagtggagaactgcaagggggtcctgatgacaacttaattgaaggtggaggaacaaaatttgtctgcaaacctggagccagaaacattaccgtcatattccacccattactaagactaaagcaagccaaagagctggaccgagagagggctgctgccaatgagcagttaaccagagccatccttcgggagaggatatgtagcgaggaggaacgcgctaaggcaaagcacctggctaggcagctggaagagaaagaccgagtgctaaagaagcaggatgcattctacaaagaacagctggctagactggaggagaggagctcagagttctacagagtcaccactgaacaatatcagaaagctgctgaagaggtggaagcaaagttcaagcgatatgagtctcatccagtctgtgctgatctgcaggccaaaattcttcagtgttaccgtgagaacacccaccagaccctcaaatgctccgctctggccacccagtatatgcactgtgtcaatcatgccaaacagagcatgcttgagaagggaggataaaaactttcagaatgagcaaaacaccatcaacgttaattccagagatggaacattttttttcctagtgagaaaacaacccatttgaagagaagaccactaatgagaagaccactaaagagagacatcaagaatggattcagcagaatcatttcacgttttgaacagcagcagtttgaagggccaaagccttgatcagggatcagtcattaaaggacactcttgagtattagtaaaccctcttatgatgattaaaagagaagggcagccctctccaccttttggtactttctattcaacttgcactgaccataaaatgtttctcttctgaacaagccccatcatttggtgaacctccaccctaacaaagtaggatggggttgggggctaaattaattggagtggggcgaggagagagccagaaaacatagatccgagggcagcagtgctgggtggagagagccagaaaacagatctggaggcagcagtgctggatggaattgtctaggctgtggcatgttggttttgtctttcttttctcctttgattatgtaagagctatttcattataacttattatggtgattatacaggcaagaagacaaaaaggagagaaaatgtacctcttctactggaataatgtttatgattacaagtgagataaggtatttttatcaatatgaaggcaaccttggctgataaaacctctatagtgaatactcacatctttacttcactcactatcaataataaatatattttctgacaaagactggca

SEQ ID NO: 1145 - DNA, 2231 bp, Homo sapiens
tttttctggggttagctatagagagaggagccccgcctcagtcttttctttaggggcagcaccttctattacagtctcgggaccccaaagcacgctatttgggtttggtagagaaaaccaggtgtaaaggactctgtctactagtgacgatgtcgaagacagggaaaatgaaaagggtcgccttgaagaagcctacgagaaatgtgaccgtgacctggatgaattgattgtacagcactacacagaattgacgacagccattcgcacataccagagcatcacagagcgcatcactaactcccgaaataaaataaagcaggtaaaagagaacctgctttcatgcaagatgctgctgcactgcaaacgggatgagcttcggaaactgtggattgaaggaattgagcataagcatgtcctgaacttgttggatgaaattgagaatatcaagcaagtgcctcaaaagctggaacagtgcatggccagcaagcactatctcagtgccactgacatgttggtgtcagcagttgagtctttggagggccccctgctccaggtggaaggactgagtgaccttcgactagagcttcacagcaagaagatgaaccttcacttggttctcatagatgaactacaccggcacctgtacatcaaatcgactagccgagttgtgcagcgtaacaaggaaaaagggaaaatcagctccctcgtgaaagatgcttctgttcctctgattgatgttacaaacctccctactcctcgaaaattccttgatacctctcactattctactgctggaagctcaagtgtgagggagataaatctgcaggacatcaaggaagatttagaattggatccagaggaaaacagcaccctgtttatgggtatcctcattaagggcttggcgaaactgaagaagatcccagaaacagttaaggcaatcatagagcgcttggagcaggagttgaagcaaattgtgaagaggtctacaacccaggtggcagacagtggctatcagcggggggagaacgttactgtggagaaccaaccaaggttgcttctagaactgctggagttactgtttgacaagtttaatgctgtagccgctgcacactctgtggtcctgggatacctgcaggacactgtagtgactccactgactcagcaggaagatatcaaactgtatgatatggcagatgtatgggtgaagatccaagatgttctacagagctcagagttctacagagtcaccactgaacaatatcagaaagctgctgaagaggtggaagcaaagttcaagcgatatgagtctcatccagtctgtgctgatctgcaggccaaaattcttcagtgttaccgtgagaacacccaccagaccctcaaatgctccgctctggccacccagtatatgcactgtgtcaatcatgccaaacagagcatgcttgagaagggaggataaaaactttcagaatgagcaaaacaccatcaacgttaattccagagatggaacattttttttcctagtgagaaaacaacccatttgaagagaagaccactaatgagaagaccactaaagagagacatcaagaatggattcagcagaatcatttcacgttttgaacagcagcagtttgaagggccaaagccttgatcagggatcagtcattaaaggacactcttgagtattagtaaaccctcttatgatgattaaaagagaagggcagccctctccaccttttggtactttctattcaacttgcactgaccataaaatgtttctcttctgaacaagccccatcatttggtgaacctccaccctaacaaagtaggatggggttgggggctaaattaattggagtggggcgaggagagagccagaaaacatagatccgagggcagcagtgctgggtggagagagccagaaaacagatctggaggcagcagtgctggatggaattgtctaggctgtggcatgttggttttgtctttcttttctcctttgattatgtaagagctatttcattataacttattatggtgattatacaggcaagaagacaaaaaggagagaaaatgtacctcttctactggaataatgtttatgattacaagtgagataaggtatttttatcaatatgaaggcaaccttggctgataaaacctctatagtgaatactcacatctttacttcactcactatcaataataaatatattttctgacaaagactggca

SEQ ID NO: 1146 - DNA, 1939 bp, Homo sapiens
tttttctggggttagctatagagagaggagccccgcctcagtcttttctttaggggcagcaccttctattacagtctcgggaccccaaagcacgctatttgggtttggtagagaaaaccaggtgtaaaggactctgtctactagtgacgatgtcgaagacagggaaaatgaaaagggtcgccttgaagaagcctacgagaaatgtgaccgtgacctggatgaattgattgtacagcactacacagaattgacgacagccattcgcacataccagagcatcacagagcgcatcactaactcccgaaataaaataaagcaggtaaaagagaacctgctttcatgcaagatgctgctgcactgcaaacgggatgagcttcggaaactgtggattgaaggaattgagcataagcatgtcctgaacttgttggatgaaattgagaatatcaagcaagtgcctcaaaagctggaacagtgcatggccagcaagcactatctcagtgccactgacatgttggtgtcagcagttgagtctttggagggccccctgctccaggtggaaggactgagtgaccttcgactagagcttcacagcaagaagatgaaccttcacttggttctcatagatgaactacaccggcacctgtacatcaaatcgactagccgagttgtgcagcgtaacaaggaaaaagggaaaatcagctccctcgtgaaagatgcttctgttcctctgattgatgttacaaacctccctactcctcgaaaattccttgatacctctcactattctactgctggaagctcaagtgtgagggagataaatctgcaggacatcaaggaagatttagaattggatccagaggaaaacagcaccctgtttatgggtatcctcattaagggcttggcgaaactgaagaagatcccagaaacagttaaggcaatcatagagcgcttggagcaggagttgaagcaaattgtgaagaggtctacaacccaggtggcagacagtggctatcagcggggggagaacgttactgtggagaaccaaccaaggttgcttctagaactgctggagttactgtttgacaagtttaatgctgtagccgctgcacactctgtggtcctgggatacctgcaggacactgtagtgactccactgactcagcaggaagatatcaaactgtatgatatggcagatgtatgggtgaagatccaagatgttctacagctttcggaaaatgtgattgatcgaatgaaggaatcctctccatctggttcgaagtctcagcggtattctggtgcttatggtgcctcagtttctgatgaagaattgaaaagaagagtagctgaggagctggcattggagcaagccaagaaagaatccgaagatcagaaacgactaaagcaagccaaagagctggaccgagagagggctgctgccaatgagcagttaaccagagccatccttcgggagaggatatgtagcgaggaggaacgcgctaaggcaaagcacctgataaaagtggagctgctctgggtgaaacctggagtgttgactgcttagcctccacttcggccttcctagaaacccagatgttactcctcggaacctttagtcctcattggagcacagttgggaactcactggacagggaaaatgggaccatggaatggagaactttgaactgaagagtgagggggattttcctagttcactaggcaattgggaaacactaaaactttctaagaagaaggctcatttctagtctctcccattctttaccttagtcacttctctgaaagaccaacccatgaccagctgcaaacagagaacatgaaaggaagtccatgcgtaatgaatcagtttcttcagtgacaaatctggggtcccggttgcatgggcaaatagtgaagccagaatagaggtggtagaccaagaaag

SEQ ID NO: 1147 - DNA, 2101 bp, Homo sapiens
tttttctggggttagctatagagagaggagccccgcctcagtcttttctttaggggcagcaccttctattacagtctcgggaccccaaagcacgctatttgggtttggtagagaaaaccaggtgtaaaggactctgtctactagtgacgatgtcgaagacagggaaaatgaaaagggtcgccttgaagaagcctacgagaaatgtgaccgtgacctggatgaattgattgtacagcactacacagaattgacgacagccattcgcacataccagagcatcacagagcgcatcactaactcccgaaataaaataaagcaggtaaaagagaacctgctttcatgcaagatgctgctgcactgcaaacgggatgagcttcggaaactgtggattgaaggaattgagcataagcatgtcctgaacttgttggatgaaattgagaatatcaagcaagtgcctcaaaagctggaacagtgcatggccagcaagcactatctcagtgccactgacatgttggtgtcagcagttgagtctttggagggccccctgctccaggtggaaggactgagtgaccttcgactagagcttcacagcaagaagatgaaccttcacttggttctcatagatgaactacaccggcacctgtacatcaaatcgactagccgagttgtgcagcgtaacaaggaaaaagggaaaatcagctccctcgtgaaagatgcttctgttcctctgattgatgttacaaacctccctactcctcgaaaattccttgatacctctcactattctactgctggaagctcaagtgtgagggagataaatctgcaggacatcaaggaagatttagaattggatccagaggaaaacagcaccctgtttatgggtatcctcattaagggcttggcgaaactgaagaagatcccagaaacagttaaggcaatcatagagcgcttggagcaggagttgaagcaaattgtgaagaggtctacaacccaggtggcagacagtggctatcagcggggggagaacgttactgtggagaaccaaccaaggttgcttctagaactgctggagttactgtttgacaagtttaatgctgtagccgctgcacactctgtggtcctgggatacctgcaggacactgtagtgactccactgactcagcaggaagatatcaaactgtatgatatggcagatgtatgggtgaagatccaagatgttctacagatgctattaactgagtacttggatatgaaaaatactcgtacggcctctgaaccatcagctcaactaagctatgccagcactggacgagagtttgcagccttttttgccaagaagaaacctcaaaggccaaaaaattctcttttcaagttcgaatcgtcctcccatgccatcagtatgagcgcctatctgcgagaacagagaagggagctctatagtcggagtggagaactgcaagggggtcctgatgacaacttaattgaaggtggaggaacaaaatttgtctgcaaacctggagccagaaacattaccgtcatattccacccattactaagactaaagcaagccaaagagctggaccgagagagggctgctgccaatgagcagttaaccagagccatccttcgggagaggatatgtagcgaggaggaacgcgctaaggcaaagcacctgataaaagtggagctgctctgggtgaaacctggagtgttgactgcttagcctccacttcggccttcctagaaacccagatgttactcctcggaacctttagtcctcattggagcacagttgggaactcactggacagggaaaatgggaccatggaatggagaactttgaactgaagagtgagggggattttcctagttcactaggcaattgggaaacactaaaactttctaagaagaaggctcatttctagtctctcccattctttaccttagtcacttctctgaaagaccaacccatgaccagctgcaaacagagaacatgaaaggaagtccatgcgtaatgaatcagtttcttcagtgacaaatctggggtcccggttgcatgggcaaatagtgaagccagaatagaggtggtagaccaagaaag

SEQ ID NO: 1148 - DNA, 2315 bp, Homo sapiens
tttttctggggttagctatagagagaggagccccgcctcagtcttttctttaggggcagcaccttctattacagtctcgggaccccaaagcacgctatttgggtttggtagagaaaaccaggtgtaaaggactctgtctactagtgacgatgtcgaagacagggaaaatgaaaagggtcgccttgaagaagcctacgagaaatgtgaccgtgacctggatgaattgattgtacagcactacacagaattgacgacagccattcgcacataccagagcatcacagagcgcatcactaactcccgaaataaaataaagcaggtaaaagagaacctgctttcatgcaagatgctgctgcactgcaaacgggatgagcttcggaaactgtggattgaaggaattgagcataagcatgtcctgaacttgttggatgaaattgagaatatcaagcaagtgcctcaaaagctggaacagtgcatggccagcaagcactatctcagtgccactgacatgttggtgtcagcagttgagtctttggagggccccctgctccaggtggaaggactgagtgaccttcgactagagcttcacagcaagaagatgaaccttcacttggttctcatagatgaactacaccggcacctgtacatcaaatcgactagccgagttgtgcagcgtaacaaggaaaaagggaaaatcagctccctcgtgaaagatgcttctgttcctctgattgatgttacaaacctccctactcctcgaaaattccttgatacctctcactattctactgctggaagctcaagtgtgagggagataaatctgcaggacatcaaggaagatttagaattggatccagaggaaaacagcaccctgtttatgggtatcctcattaagggcttggcgaaactgaagaagatcccagaaacagttaaggcaatcatagagcgcttggagcaggagttgaagcaaattgtgaagaggtctacaacccaggtggcagacagtggctatcagcggggggagaacgttactgtggagaaccaaccaaggttgcttctagaactgctggagttactgtttgacaagtttaatgctgtagccgctgcacactctgtggtcctgggatacctgcaggacactgtagtgactccactgactcagcaggaagatatcaaactgtatgatatggcagatgtatgggtgaagatccaagatgttctacaggctaggcagctggaagagaaagaccgagtgctaaagaagcaggatgcattctacaaagaacagctggctagactggaggagaggagctcagagttctacagagtcaccactgaacaatatcagaaagctgctgaagaggtggaagcaaagttcaagcgatatgagtctcatccagtctgtgctgatctgcaggccaaaattcttcagtgttaccgtgagaacacccaccagaccctcaaatgctccgctctggccacccagtatatgcactgtgtcaatcatgccaaacagagcatgcttgagaagggaggataaaaactttcagaatgagcaaaacaccatcaacgttaattccagagatggaacattttttttcctagtgagaaaacaacccatttgaagagaagaccactaatgagaagaccactaaagagagacatcaagaatggattcagcagaatcatttcacgttttgaacagcagcagtttgaagggccaaagccttgatcagggatcagtcattaaaggacactcttgagtattagtaaaccctcttatgatgattaaaagagaagggcagccctctccaccttttggtactttctattcaacttgcactgaccataaaatgtttctcttctgaacaagccccatcatttggtgaacctccaccctaacaaagtaggatggggttgggggctaaattaattggagtggggcgaggagagagccagaaaacatagatccgagggcagcagtgctgggtggagagagccagaaaacagatctggaggcagcagtgctggatggaattgtctaggctgtggcatgttggttttgtctttcttttctcctttgattatgtaagagctatttcattataacttattatggtgattatacaggcaagaagacaaaaaggagagaaaatgtacctcttctactggaataatgtttatgattacaagtgagataaggtatttttatcaatatgaaggcaaccttggctgataaaacctctatagtgaatactcacatctttacttcactcactatcaataataaatatattttctgacaaagactggca

SEQ ID NO: 1149 - DNA, 2307 bp, Homo sapiens
ttccttggagcctagcggctctccccgcgtccaagatggcggcagaagcagctggtgggaaatacagaagcacagtcagcaaaagcaaagacccctcggggctgctcatctctgtgatcaggactctgtctactagtgacgatgtcgaagacagggaaaatgaaaagggtcgccttgaagaagcctacgagaaatgtgaccgtgacctggatgaattgattgtacagcactacacagaattgacgacagccattcgcacataccagagcatcacagagcgcatcactaactcccgaaataaaataaagcaggtaaaagagaacctgctttcatgcaagatgctgctgcactgcaaacgggatgagcttcggaaactgtggattgaaggaattgagcataagcatgtcctgaacttgttggatgaaattgagaatatcaagcaagtgcctcaaaagctggaacagtgcatggccagcaagcactatctcagtgccactgacatgttggtgtcagcagttgagtctttggagggccccctgctccaggtggaaggactgagtgaccttcgactagagcttcacagcaagaagatgaaccttcacttggttctcatagatgaactacaccggcacctgtacatcaaatcgactagccgagttgtgcagcgtaacaaggaaaaagggaaaatcagctccctcgtgaaagatgcttctgttcctctgattgatgttacaaacctccctactcctcgaaaattccttgatacctctcactattctactgctggaagctcaagtgtgagggagataaatctgcaggacatcaaggaagatttagaattggatccagaggaaaacagcaccctgtttatgggtatcctcattaagggcttggcgaaactgaagaagatcccagaaacagttaaggcaatcatagagcgcttggagcaggagttgaagcaaattgtgaagaggtctacaacccaggtggcagacagtggctatcagcggggggagaacgttactgtggagaaccaaccaaggttgcttctagaactgctggagttactgtttgacaagtttaatgctgtagccgctgcacactctgtggtcctgggatacctgcaggacactgtagtgactccactgactcagcaggaagatatcaaactgtatgatatggcagatgtatgggtgaagatccaagatgttctacaggctaggcagctggaagagaaagaccgagtgctaaagaagcaggatgcattctacaaagaacagctggctagactggaggagaggagctcagagttctacagagtcaccactgaacaatatcagaaagctgctgaagaggtggaagcaaagttcaagcgatatgagtctcatccagtctgtgctgatctgcaggccaaaattcttcagtgttaccgtgagaacacccaccagaccctcaaatgctccgctctggccacccagtatatgcactgtgtcaatcatgccaaacagagcatgcttgagaagggaggataaaaactttcagaatgagcaaaacaccatcaacgttaattccagagatggaacattttttttcctagtgagaaaacaacccatttgaagagaagaccactaatgagaagaccactaaagagagacatcaagaatggattcagcagaatcatttcacgttttgaacagcagcagtttgaagggccaaagccttgatcagggatcagtcattaaaggacactcttgagtattagtaaaccctcttatgatgattaaaagagaagggcagccctctccaccttttggtactttctattcaacttgcactgaccataaaatgtttctcttctgaacaagccccatcatttggtgaacctccaccctaacaaagtaggatggggttgggggctaaattaattggagtggggcgaggagagagccagaaaacatagatccgagggcagcagtgctgggtggagagagccagaaaacagatctggaggcagcagtgctggatggaattgtctaggctgtggcatgttggttttgtctttcttttctcctttgattatgtaagagctatttcattataacttattatggtgattatacaggcaagaagacaaaaaggagagaaaatgtacctcttctactggaataatgtttatgattacaagtgagataaggtatttttatcaatatgaaggcaaccttggctgataaaacctctatagtgaatactcacatctttacttcactcactatcaataataaatatattttctgacaaagactggca

SEQ ID NO: 1150 - DNA, 2223 bp, Homo sapiens
ttccttggagcctagcggctctccccgcgtccaagatggcggcagaagcagctggtgggaaatacagaagcacagtcagcaaaagcaaagacccctcggggctgctcatctctgtgatcaggactctgtctactagtgacgatgtcgaagacagggaaaatgaaaagggtcgccttgaagaagcctacgagaaatgtgaccgtgacctggatgaattgattgtacagcactacacagaattgacgacagccattcgcacataccagagcatcacagagcgcatcactaactcccgaaataaaataaagcaggtaaaagagaacctgctttcatgcaagatgctgctgcactgcaaacgggatgagcttcggaaactgtggattgaaggaattgagcataagcatgtcctgaacttgttggatgaaattgagaatatcaagcaagtgcctcaaaagctggaacagtgcatggccagcaagcactatctcagtgccactgacatgttggtgtcagcagttgagtctttggagggccccctgctccaggtggaaggactgagtgaccttcgactagagcttcacagcaagaagatgaaccttcacttggttctcatagatgaactacaccggcacctgtacatcaaatcgactagccgagttgtgcagcgtaacaaggaaaaagggaaaatcagctccctcgtgaaagatgcttctgttcctctgattgatgttacaaacctccctactcctcgaaaattccttgatacctctcactattctactgctggaagctcaagtgtgagggagataaatctgcaggacatcaaggaagatttagaattggatccagaggaaaacagcaccctgtttatgggtatcctcattaagggcttggcgaaactgaagaagatcccagaaacagttaaggcaatcatagagcgcttggagcaggagttgaagcaaattgtgaagaggtctacaacccaggtggcagacagtggctatcagcggggggagaacgttactgtggagaaccaaccaaggttgcttctagaactgctggagttactgtttgacaagtttaatgctgtagccgctgcacactctgtggtcctgggatacctgcaggacactgtagtgactccactgactcagcaggaagatatcaaactgtatgatatggcagatgtatgggtgaagatccaagatgttctacagagctcagagttctacagagtcaccactgaacaatatcagaaagctgctgaagaggtggaagcaaagttcaagcgatatgagtctcatccagtctgtgctgatctgcaggccaaaattcttcagtgttaccgtgagaacacccaccagaccctcaaatgctccgctctggccacccagtatatgcactgtgtcaatcatgccaaacagagcatgcttgagaagggaggataaaaactttcagaatgagcaaaacaccatcaacgttaattccagagatggaacattttttttcctagtgagaaaacaacccatttgaagagaagaccactaatgagaagaccactaaagagagacatcaagaatggattcagcagaatcatttcacgttttgaacagcagcagtttgaagggccaaagccttgatcagggatcagtcattaaaggacactcttgagtattagtaaaccctcttatgatgattaaaagagaagggcagccctctccaccttttggtactttctattcaacttgcactgaccataaaatgtttctcttctgaacaagccccatcatttggtgaacctccaccctaacaaagtaggatggggttgggggctaaattaattggagtggggcgaggagagagccagaaaacatagatccgagggcagcagtgctgggtggagagagccagaaaacagatctggaggcagcagtgctggatggaattgtctaggctgtggcatgttggttttgtctttcttttctcctttgattatgtaagagctatttcattataacttattatggtgattatacaggcaagaagacaaaaaggagagaaaatgtacctcttctactggaataatgtttatgattacaagtgagataaggtatttttatcaatatgaaggcaaccttggctgataaaacctctatagtgaatactcacatctttacttcactcactatcaataataaatatattttctgacaaagactggca

SEQ ID NO: 1151 - DNA, 1583 bp, Homo sapiens
agataaccacctagctattgctaaatgtgatctcactcagttgaaaaagaaacaatcagaagtgagcaatgggagccgtgaaaccatctcaatgaagacttgttgccaacatggagatagaggatattggtctacagggtactattggagaggtaactgtgaggcttttacacccagacagcccttctgtgcatggcaagttttactgaactcctcgagatttagggccaattaattcatctgttttaagatgaattcatcggggggtcctgatgacaacttaattgaaggtggaggaacaaaatttgtctgcaaacctggagccagaaacattaccgtcatattccacccattactaagactaaagcaagccaaagagctggaccgagagagggctgctgccaatgagcagttaaccagagccatccttcgggagaggatatgtagcgaggaggaacgcgctaaggcaaagcacctggatattgaagacaaagctaggcagctggaagagaaagaccgagtgctaaagaagcaggatgcattctacaaagaacagctggctagactggaggagaggagctcagagttctacagagtcaccactgaacaatatcagaaagctgctgaagaggtggaagcaaagttcaagcgatatgagtctcatccagtctgtgctgatctgcaggccaaaattcttcagtgttaccgtgagaacacccaccagaccctcaaatgctccgctctggccacccagtatatgcactgtgtcaatcatgccaaacagagcatgcttgagaagggaggataaaaactttcagaatgagcaaaacaccatcaacgttaattccagagatggaacattttttttcctagtgagaaaacaacccatttgaagagaagaccactaatgagaagaccactaaagagagacatcaagaatggattcagcagaatcatttcacgttttgaacagcagcagtttgaagggccaaagccttgatcagggatcagtcattaaaggacactcttgagtattagtaaaccctcttatgatgattaaaagagaagggcagccctctccaccttttggtactttctattcaacttgcactgaccataaaatgtttctcttctgaacaagccccatcatttggtgaacctccaccctaacaaagtaggatggggttgggggctaaattaattggagtggggcgaggagagagccagaaaacatagatccgagggcagcagtgctgggtggagagagccagaaaacagatctggaggcagcagtgctggatggaattgtctaggctgtggcatgttggttttgtctttcttttctcctttgattatgtaagagctatttcattataacttattatggtgattatacaggcaagaagacaaaaaggagagaaaatgtacctcttctactggaataatgtttatgattacaagtgagataaggtatttttatcaatatgaaggcaaccttggctgataaaacctctatagtgaatactcacatctttacttcactcactatcaataataaatatattttctgacaaagactggca

SEQ ID NO: 1152 - DNA, 2595 bp, Homo sapiens
ttccttggagcctagcggctctccccgcgtccaagatggcggcagaagcagctggtgggaaatacagaagcacagtcagcaaaagcaaagacccctcggggctgctcatctctgtgatcaggactctgtctactagtgacgatgtcgaagacagggaaaatgaaaagggtcgccttgaagaagcctacgagaaatgtgaccgtgacctggatgaattgattgtacagcactacacagaattgacgacagccattcgcacataccagagcatcacagagcgcatcactaactcccgaaataaaataaagcaggtaaaagagaacctgctttcatgcaagatgctgctgcactgcaaacgggatgagcttcggaaactgtggattgaaggaattgagcataagcatgtcctgaacttgttggatgaaattgagaatatcaagcaagtgcctcaaaagctggaacagtgcatggccagcaagcactatctcagtgccactgacatgttggtgtcagcagttgagtctttggagggccccctgctccaggtggaaggactgagtgaccttcgactagagcttcacagcaagaagatgaaccttcacttggttctcatagatgaactacaccggcacctgtacatcaaatcgactagccgagttgtgcagcgtaacaaggaaaaagggaaaatcagctccctcgtgaaagatgcttctgttcctctgattgatgttacaaacctccctactcctcgaaaattccttgatacctctcactattctactgctggaagctcaagtgtgagggagataaatctgcaggacatcaaggaagatttagaattggatccagaggaaaacagcaccctgtttatgggtatcctcattaagggcttggcgaaactgaagaagatcccagaaacagttaaggcaatcatagagcgcttggagcaggagttgaagcaaattgtgaagaggtctacaacccaggtggcagacagtggctatcagcggggggagaacgttactgtggagaaccaaccaaggttgcttctagaactgctggagttactgtttgacaagtttaatgctgtagccgctgcacactctgtggtcctgggatacctgcaggacactgtagtgactccactgactcagcaggaagatatcaaactgtatgatatggcagatgtatgggtgaagatccaagatgttctacagctttcggaaaatgtgattgatcgaatgaaggaatcctctccatctggttcgaagtctcagcggtattctggtgcttatggtgcctcagtttctgatgaagaattgaaaagaagagtagctgaggagctggcattggagcaagccaagaaagaatccgaagatcagaaacgactaaagcaagccaaagagctggaccgagagagggctgctgccaatgagcagttaaccagagccatccttcgggagaggatatgtagcgaggaggaacgcgctaaggcaaagcacctggctaggcagctggaagagaaagaccgagtgctaaagaagcaggatgcattctacaaagaacagctggctagactggaggagaggagctcagagttctacagagtcaccactgaacaatatcagaaagctgctgaagaggtggaagcaaagttcaagcgatatgagtctcatccagtctgtgctgatctgcaggccaaaattcttcagtgttaccgtgagaacacccaccagaccctcaaatgctccgctctggccacccagtatatgcactgtgtcaatcatgccaaacagagcatgcttgagaagggaggataaaaactttcagaatgagcaaaacaccatcaacgttaattccagagatggaacattttttttcctagtgagaaaacaacccatttgaagagaagaccactaatgagaagaccactaaagagagacatcaagaatggattcagcagaatcatttcacgttttgaacagcagcagtttgaagggccaaagccttgatcagggatcagtcattaaaggacactcttgagtattagtaaaccctcttatgatgattaaaagagaagggcagccctctccaccttttggtactttctattcaacttgcactgaccataaaatgtttctcttctgaacaagccccatcatttggtgaacctccaccctaacaaagtaggatggggttgggggctaaattaattggagtggggcgaggagagagccagaaaacatagatccgagggcagcagtgctgggtggagagagccagaaaacagatctggaggcagcagtgctggatggaattgtctaggctgtggcatgttggttttgtctttcttttctcctttgattatgtaagagctatttcattataacttattatggtgattatacaggcaagaagacaaaaaggagagaaaatgtacctcttctactggaataatgtttatgattacaagtgagataaggtatttttatcaatatgaaggcaaccttggctgataaaacctctatagtgaatactcacatctttacttcactcactatcaataataaatatattttctgacaaagactggca

SEQ ID NO: 1153 - DNA, 2610 bp, Homo sapiens
ttccttggagcctagcggctctccccgcgtccaagatggcggcagaagcagctggtgggaaatacagaagcacagtcagcaaaagcaaagacccctcggggctgctcatctctgtgatcaggactctgtctactagtgacgatgtcgaagacagggaaaatgaaaagggtcgccttgaagaagcctacgagaaatgtgaccgtgacctggatgaattgattgtacagcactacacagaattgacgacagccattcgcacataccagagcatcacagagcgcatcactaactcccgaaataaaataaagcaggtaaaagagaacctgctttcatgcaagatgctgctgcactgcaaacgggatgagcttcggaaactgtggattgaaggaattgagcataagcatgtcctgaacttgttggatgaaattgagaatatcaagcaagtgcctcaaaagctggaacagtgcatggccagcaagcactatctcagtgccactgacatgttggtgtcagcagttgagtctttggagggccccctgctccaggtggaaggactgagtgaccttcgactagagcttcacagcaagaagatgaaccttcacttggttctcatagatgaactacaccggcacctgtacatcaaatcgactagccgagttgtgcagcgtaacaaggaaaaagggaaaatcagctccctcgtgaaagatgcttctgttcctctgattgatgttacaaacctccctactcctcgaaaattccttgatacctctcactattctactgctggaagctcaagtgtgagggagataaatctgcaggacatcaaggaagatttagaattggatccagaggaaaacagcaccctgtttatgggtatcctcattaagggcttggcgaaactgaagaagatcccagaaacagttaaggcaatcatagagcgcttggagcaggagttgaagcaaattgtgaagaggtctacaacccaggtggcagacagtggctatcagcggggggagaacgttactgtggagaaccaaccaaggttgcttctagaactgctggagttactgtttgacaagtttaatgctgtagccgctgcacactctgtggtcctgggatacctgcaggacactgtagtgactccactgactcagcaggaagatatcaaactgtatgatatggcagatgtatgggtgaagatccaagatgttctacagctttcggaaaatgtgattgatcgaatgaaggaatcctctccatctggttcgaagtctcagcggtattctggtgcttatggtgcctcagtttctgatgaagaattgaaaagaagagtagctgaggagctggcattggagcaagccaagaaagaatccgaagatcagaaacgactaaagcaagccaaagagctggaccgagagagggctgctgccaatgagcagttaaccagagccatccttcgggagaggatatgtagcgaggaggaacgcgctaaggcaaagcacctggatattgaagacaaagctaggcagctggaagagaaagaccgagtgctaaagaagcaggatgcattctacaaagaacagctggctagactggaggagaggagctcagagttctacagagtcaccactgaacaatatcagaaagctgctgaagaggtggaagcaaagttcaagcgatatgagtctcatccagtctgtgctgatctgcaggccaaaattcttcagtgttaccgtgagaacacccaccagaccctcaaatgctccgctctggccacccagtatatgcactgtgtcaatcatgccaaacagagcatgcttgagaagggaggataaaaactttcagaatgagcaaaacaccatcaacgttaattccagagatggaacattttttttcctagtgagaaaacaacccatttgaagagaagaccactaatgagaagaccactaaagagagacatcaagaatggattcagcagaatcatttcacgttttgaacagcagcagtttgaagggccaaagccttgatcagggatcagtcattaaaggacactcttgagtattagtaaaccctcttatgatgattaaaagagaagggcagccctctccaccttttggtactttctattcaacttgcactgaccataaaatgtttctcttctgaacaagccccatcatttggtgaacctccaccctaacaaagtaggatggggttgggggctaaattaattggagtggggcgaggagagagccagaaaacatagatccgagggcagcagtgctgggtggagagagccagaaaacagatctggaggcagcagtgctggatggaattgtctaggctgtggcatgttggttttgtctttcttttctcctttgattatgtaagagctatttcattataacttattatggtgattatacaggcaagaagacaaaaaggagagaaaatgtacctcttctactggaataatgtttatgattacaagtgagataaggtatttttatcaatatgaaggcaaccttggctgataaaacctctatagtgaatactcacatctttacttcactcactatcaataataaatatattttctgacaaagactggca

SEQ ID NO: 1154 - DNA, 941 bp, Homo sapiens
tttatagagggcatctgtcggttgcatttgatttatttaaaacgttttcttacatggccaatttagtaacagcaagcaaaaccaaaatgagcaaaggagaggatcccaataatcccagatctataaagcggatttctcaagggggtagagataaccacctagctattgctaaatgtgatctcactcagttgaaaaagaaacaatcagaagtgagcaatgggagccgtgaaaccatctcaatgaagacttgttgccaacatggagatagaggatattggtctacagggtactattggagagggggtcctgatgacaacttaattgaaggtggaggaacaaaatttgtctgcaaacctggagccagaaacattaccgtcatattccacccattactaagactaaagcaagccaaagagctggaccgagagagggctgctgccaatgagcagttaaccagagccatccttcgggagaggatatgtagcgaggaggaacgcgctaaggcaaagcacctgataaaagtggagctgctctgggtgaaacctggagtgttgactgcttagcctccacttcggccttcctagaaacccagatgttactcctcggaacctttagtcctcattggagcacagttgggaactcactggacagggaaaatgggaccatggaatggagaactttgaactgaagagtgagggggattttcctagttcactaggcaattgggaaacactaaaactttctaagaagaaggctcatttctagtctctcccattctttaccttagtcacttctctgaaagaccaacccatgaccagctgcaaacagagaacatgaaaggaagtccatgcgtaatgaatcagtttcttcagtgacaaatctggggtcccggttgcatgggcaaatagtgaagccagaatagaggtggtagaccaagaaag

SEQ ID NO: 1155 - DNA, 1931 bp, Homo sapiens
ttccttggagcctagcggctctccccgcgtccaagatggcggcagaagcagctggtgggaaatacagaagcacagtcagcaaaagcaaagacccctcggggctgctcatctctgtgatcaggactctgtctactagtgacgatgtcgaagacagggaaaatgaaaagggtcgccttgaagaagcctacgagaaatgtgaccgtgacctggatgaattgattgtacagcactacacagaattgacgacagccattcgcacataccagagcatcacagagcgcatcactaactcccgaaataaaataaagcaggtaaaagagaacctgctttcatgcaagatgctgctgcactgcaaacgggatgagcttcggaaactgtggattgaaggaattgagcataagcatgtcctgaacttgttggatgaaattgagaatatcaagcaagtgcctcaaaagctggaacagtgcatggccagcaagcactatctcagtgccactgacatgttggtgtcagcagttgagtctttggagggccccctgctccaggtggaaggactgagtgaccttcgactagagcttcacagcaagaagatgaaccttcacttggttctcatagatgaactacaccggcacctgtacatcaaatcgactagccgagttgtgcagcgtaacaaggaaaaagggaaaatcagctccctcgtgaaagatgcttctgttcctctgattgatgttacaaacctccctactcctcgaaaattccttgatacctctcactattctactgctggaagctcaagtgtgagggagataaatctgcaggacatcaaggaagatttagaattggatccagaggaaaacagcaccctgtttatgggtatcctcattaagggcttggcgaaactgaagaagatcccagaaacagttaaggcaatcatagagcgcttggagcaggagttgaagcaaattgtgaagaggtctacaacccaggtggcagacagtggctatcagcggggggagaacgttactgtggagaaccaaccaaggttgcttctagaactgctggagttactgtttgacaagtttaatgctgtagccgctgcacactctgtggtcctgggatacctgcaggacactgtagtgactccactgactcagcaggaagatatcaaactgtatgatatggcagatgtatgggtgaagatccaagatgttctacagctttcggaaaatgtgattgatcgaatgaaggaatcctctccatctggttcgaagtctcagcggtattctggtgcttatggtgcctcagtttctgatgaagaattgaaaagaagagtagctgaggagctggcattggagcaagccaagaaagaatccgaagatcagaaacgactaaagcaagccaaagagctggaccgagagagggctgctgccaatgagcagttaaccagagccatccttcgggagaggatatgtagcgaggaggaacgcgctaaggcaaagcacctgataaaagtggagctgctctgggtgaaacctggagtgttgactgcttagcctccacttcggccttcctagaaacccagatgttactcctcggaacctttagtcctcattggagcacagttgggaactcactggacagggaaaatgggaccatggaatggagaactttgaactgaagagtgagggggattttcctagttcactaggcaattgggaaacactaaaactttctaagaagaaggctcatttctagtctctcccattctttaccttagtcacttctctgaaagaccaacccatgaccagctgcaaacagagaacatgaaaggaagtccatgcgtaatgaatcagtttcttcagtgacaaatctggggtcccggttgcatgggcaaatagtgaagccagaatagaggtggtagaccaagaaag

SEQ ID NO: 1156 - DNA, 1620 bp, Homo sapiens
tttatagagggcatctgtcggttgcatttgatttatttaaaacgttttcttacatggccaatttagtaacagcaagcaaaaccaaaatgagcaaaggagaggatcccaataatcccagatctataaagcggatttctcaagggggtagagataaccacctagctattgctaaatgtgatctcactcagttgaaaaagaaacaatcagaagtgagcaatgggagccgtgaaaccatctcaatgaagacttgttgccaacatggagatagaggatattggtctacagggtactattggagagggggtcctgatgacaacttaattgaaggtggaggaacaaaatttgtctgcaaacctggagccagaaacattaccgtcatattccacccattactaagactaaagcaagccaaagagctggaccgagagagggctgctgccaatgagcagttaaccagagccatccttcgggagaggatatgtagcgaggaggaacgcgctaaggcaaagcacctggatattgaagacaaagctaggcagctggaagagaaagaccgagtgctaaagaagcaggatgcattctacaaagaacagctggctagactggaggagaggagctcagagttctacagagtcaccactgaacaatatcagaaagctgctgaagaggtggaagcaaagttcaagcgatatgagtctcatccagtctgtgctgatctgcaggccaaaattcttcagtgttaccgtgagaacacccaccagaccctcaaatgctccgctctggccacccagtatatgcactgtgtcaatcatgccaaacagagcatgcttgagaagggaggataaaaactttcagaatgagcaaaacaccatcaacgttaattccagagatggaacattttttttcctagtgagaaaacaacccatttgaagagaagaccactaatgagaagaccactaaagagagacatcaagaatggattcagcagaatcatttcacgttttgaacagcagcagtttgaagggccaaagccttgatcagggatcagtcattaaaggacactcttgagtattagtaaaccctcttatgatgattaaaagagaagggcagccctctccaccttttggtactttctattcaacttgcactgaccataaaatgtttctcttctgaacaagccccatcatttggtgaacctccaccctaacaaagtaggatggggttgggggctaaattaattggagtggggcgaggagagagccagaaaacatagatccgagggcagcagtgctgggtggagagagccagaaaacagatctggaggcagcagtgctggatggaattgtctaggctgtggcatgttggttttgtctttcttttctcctttgattatgtaagagctatttcattataacttattatggtgattatacaggcaagaagacaaaaaggagagaaaatgtacctcttctactggaataatgtttatgattacaagtgagataaggtatttttatcaatatgaaggcaaccttggctgataaaacctctatagtgaatactcacatctttacttcactcactatcaataataaatatattttctgacaaagactggca

SEQ ID NO: 1157 - skipped

SEQ ID NO: 1158 - DNA, 2093 bp, Homo sapiens
ttccttggagcctagcggctctccccgcgtccaagatggcggcagaagcagctggtgggaaatacagaagcacagtcagcaaaagcaaagacccctcggggctgctcatctctgtgatcaggactctgtctactagtgacgatgtcgaagacagggaaaatgaaaagggtcgccttgaagaagcctacgagaaatgtgaccgtgacctggatgaattgattgtacagcactacacagaattgacgacagccattcgcacataccagagcatcacagagcgcatcactaactcccgaaataaaataaagcaggtaaaagagaacctgctttcatgcaagatgctgctgcactgcaaacgggatgagcttcggaaactgtggattgaaggaattgagcataagcatgtcctgaacttgttggatgaaattgagaatatcaagcaagtgcctcaaaagctggaacagtgcatggccagcaagcactatctcagtgccactgacatgttggtgtcagcagttgagtctttggagggccccctgctccaggtggaaggactgagtgaccttcgactagagcttcacagcaagaagatgaaccttcacttggttctcatagatgaactacaccggcacctgtacatcaaatcgactagccgagttgtgcagcgtaacaaggaaaaagggaaaatcagctccctcgtgaaagatgcttctgttcctctgattgatgttacaaacctccctactcctcgaaaattccttgatacctctcactattctactgctggaagctcaagtgtgagggagataaatctgcaggacatcaaggaagatttagaattggatccagaggaaaacagcaccctgtttatgggtatcctcattaagggcttggcgaaactgaagaagatcccagaaacagttaaggcaatcatagagcgcttggagcaggagttgaagcaaattgtgaagaggtctacaacccaggtggcagacagtggctatcagcggggggagaacgttactgtggagaaccaaccaaggttgcttctagaactgctggagttactgtttgacaagtttaatgctgtagccgctgcacactctgtggtcctgggatacctgcaggacactgtagtgactccactgactcagcaggaagatatcaaactgtatgatatggcagatgtatgggtgaagatccaagatgttctacagatgctattaactgagtacttggatatgaaaaatactcgtacggcctctgaaccatcagctcaactaagctatgccagcactggacgagagtttgcagccttttttgccaagaagaaacctcaaaggccaaaaaattctcttttcaagttcgaatcgtcctcccatgccatcagtatgagcgcctatctgcgagaacagagaagggagctctatagtcggagtggagaactgcaagggggtcctgatgacaacttaattgaaggtggaggaacaaaatttgtctgcaaacctggagccagaaacattaccgtcatattccacccattactaagactaaagcaagccaaagagctggaccgagagagggctgctgccaatgagcagttaaccagagccatccttcgggagaggatatgtagcgaggaggaacgcgctaaggcaaagcacctgataaaagtggagctgctctgggtgaaacctggagtgttgactgcttagcctccacttcggccttcctagaaacccagatgttactcctcggaacctttagtcctcattggagcacagttgggaactcactggacagggaaaatgggaccatggaatggagaactttgaactgaagagtgagggggattttcctagttcactaggcaattgggaaacactaaaactttctaagaagaaggctcatttctagtctctcccattctttaccttagtcacttctctgaaagaccaacccatgaccagctgcaaacagagaacatgaaaggaagtccatgcgtaatgaatcagtttcttcagtgacaaatctggggtcccggttgcatgggcaaatagtgaagccagaatagaggtggtagaccaagaaag

SEQ ID NO: 1159 - DNA, 2765 bp, Homo sapiens
tttttctggggttagctatagagagaggagccccgcctcagtcttttctttaggggcagcaccttctattacagtctcgggaccccaaagcacgctatttgggtttggtagagaaaaccaggtgtaaaggactctgtctactagtgacgatgtcgaagacagggaaaatgaaaagggtcgccttgaagaagcctacgagaaatgtgaccgtgacctggatgaattgattgtacagcactacacagaattgacgacagccattcgcacataccagagcatcacagagcgcatcactaactcccgaaataaaataaagcaggtaaaagagaacctgctttcatgcaagatgctgctgcactgcaaacgggatgagcttcggaaactgtggattgaaggaattgagcataagcatgtcctgaacttgttggatgaaattgagaatatcaagcaagtgcctcaaaagctggaacagtgcatggccagcaagcactatctcagtgccactgacatgttggtgtcagcagttgagtctttggagggccccctgctccaggtggaaggactgagtgaccttcgactagagcttcacagcaagaagatgaaccttcacttggttctcatagatgaactacaccggcacctgtacatcaaatcgactagccgagttgtgcagcgtaacaaggaaaaagggaaaatcagctccctcgtgaaagatgcttctgttcctctgattgatgttacaaacctccctactcctcgaaaattccttgatacctctcactattctactgctggaagctcaagtgtgagggagataaatctgcaggacatcaaggaagatttagaattggatccagaggaaaacagcaccctgtttatgggtatcctcattaagggcttggcgaaactgaagaagatcccagaaacagttaaggcaatcatagagcgcttggagcaggagttgaagcaaattgtgaagaggtctacaacccaggtggcagacagtggctatcagcggggggagaacgttactgtggagaaccaaccaaggttgcttctagaactgctggagttactgtttgacaagtttaatgctgtagccgctgcacactctgtggtcctgggatacctgcaggacactgtagtgactccactgactcagcaggaagatatcaaactgtatgatatggcagatgtatgggtgaagatccaagatgttctacagatgctattaactgagtacttggatatgaaaaatactcgtacggcctctgaaccatcagctcaactaagctatgccagcactggacgagagtttgcagccttttttgccaagaagaaacctcaaaggccaaaaaattctcttttcaagttcgaatcgtcctcccatgccatcagtatgagcgcctatctgcgagaacagagaagggagctctatagtcggagtggagaactgcaagggggtcctgatgacaacttaattgaaggtggaggaacaaaatttgtctgcaaacctggagccagaaacattaccgtcatattccacccattactaagactaaagcaagccaaagagctggaccgagagagggctgctgccaatgagcagttaaccagagccatccttcgggagaggatatgtagcgaggaggaacgcgctaaggcaaagcacctggctaggcagctggaagagaaagaccgagtgctaaagaagcaggatgcattctacaaagaacagctggctagactggaggagaggagctcagagttctacagagtcaccactgaacaatatcagaaagctgctgaagaggtggaagcaaagttcaagcgatatgagtctcatccagtctgtgctgatctgcaggccaaaattcttcagtgttaccgtgagaacacccaccagaccctcaaatgctccgctctggccacccagtatatgcactgtgtcaatcatgccaaacagagcatgcttgagaagggaggataaaaactttcagaatgagcaaaacaccatcaacgttaattccagagatggaacattttttttcctagtgagaaaacaacccatttgaagagaagaccactaatgagaagaccactaaagagagacatcaagaatggattcagcagaatcatttcacgttttgaacagcagcagtttgaagggccaaagccttgatcagggatcagtcattaaaggacactcttgagtattagtaaaccctcttatgatgattaaaagagaagggcagccctctccaccttttggtactttctattcaacttgcactgaccataaaatgtttctcttctgaacaagccccatcatttggtgaacctccaccctaacaaagtaggatggggttgggggctaaattaattggagtggggcgaggagagagccagaaaacatagatccgagggcagcagtgctgggtggagagagccagaaaacagatctggaggcagcagtgctggatggaattgtctaggctgtggcatgttggttttgtctttcttttctcctttgattatgtaagagctatttcattataacttattatggtgattatacaggcaagaagacaaaaaggagagaaaatgtacctcttctactggaataatgtttatgattacaagtgagataaggtatttttatcaatatgaaggcaaccttggctgataaaacctctatagtgaatactcacatctttacttcactcactatcaataataaatatattttctgacaaagactggca

SEQ ID NO: 1160 - skipped

SEQ ID NO: 1161 - DNA, 8165 bp, Homo sapiens
gcagccgcagctcgggggcggtgcctgccttgcagcctcccctcggcgatcgcgcagccccatctttgtccggcctccgcgctttgttctcggcgcccgggccttggccagcctggccagccgccgagcagcccccacgccgcgctggcgtcgtcctcgcctccctcgccgccgccccccgcgcgcggccgggccttgccccccatggtgtcccggccagagcccgagggcgaggccatggacgccgagctggcggtagcgccgccgggctgctcgcacctgggcagcttcaaggtggacaactggaagcagaacctgcgggccatctaccagtgcttcgtgtggagcggcacggctgaggcccgcaagcgcaaggccaagtcctgtatctgccatgtctgtggcgtccacctcaacaggctgcattcctgcctctactgtgtcttcttcggctgtttcacaaagaagcatattcacgagcatgcgaaggcgaagcggcacaacctggccattgatctgatgtacggaggcatctactgttttctgtgccaggactacatctatgacaaagacatggaaataatcgccaaggaggagcagcgaaaagcttggaaaatgcaaggcgttggagagaagttttcaacttgggaaccaaccaaacgggagcttgaactgctgaagcacaacccgaaaaggagaaagatcacctcgaactgcaccataggtctgcgtgggctgatcaaccttgggaacacatgcttcatgaactgcatcgtgcaggccctgacccacacgccacttctgcgggacttcttcctgtctgacaggcaccgctgtgagatgcagagccccagctcctgtctggtctgtgagatgtcctcactgtttcaggagacttattctggactcttctgtgtagttataaacccttacaagaatcttccaatttactctgagaatattattgaaatgtacagagggaagaagcgtcatgagatgcctccacacatctatgctatatctgaatctgcttacagatgcatgcttcaagatcgtgaggaccagtcaattctttgcacgggtgagtcaggtgctgggaagacagaaaatacaaagaaagttattcagtaccttgcccatgttgcttcttcacataaaggaagaaaggaccataatattcctcaggaatcgcctaaaccagtgaaacaccagggggaacttgaacggcagcttttgcaagcaaatccaattctggaatcatttggaaatgcgaagactgtgaaaaatgataactcatctcgttttggcaaatttattcggatcaactttgatgtaactggctatatcgttggggccaacattgaaacataccttctggaaaagtctcgtgctgttcgtcaagcaaaagatgaacgtacttttcatatcttttaccagttgttatctggagcaggagaacacctaaagtctgatttgcttcttgaaggatttaataactacaggtttctctccaatggctatattcctattccgggacagcaagacaaagataatttccaggagaccatggaagcaatgcacataatgggcttctcccatgaagagattctgtcaatgcttaaagtagtatcttcagtgctacagtttggaaatatttctttcaaaaaggagagaaatactgatcaagcttccatgccagaaaatacagttgcgcagaagctctgccatcttcttgggatgaatgtgatggagtttactcgggccatcctgactccccggatcaaggtcggccgagactatgtgcaaaaagcccagaccaaagaacaggcagattttgcagtagaagcattggcaaaagctacctatgagcggctctttcgctggctcgttcatcgcatcaataaagctctggataggaccaaacgtcagggagcatctttcattggaatcctggatattgctggatttgaaatttttgagctgaactcctttgaacaactttgcatcaactacaccaatgagaagctgcagcagctgttcaaccacaccatgtttatcctagaacaagaggaataccagcgcgaaggcatcgagtggaacttcatcgatttcgggctggatctgcagccatgcatcgacctaatagagagacctgcgaaccctcctggtgtactggcccttttggatgaagaatgctggttccctaaagccacagataaaacctttgttgaaaaactggttcaagagcaaggttcccactccaagtttcagaaacctcgacaattaaaagacaaagctgatttttgcattatacattatgcagggaaggtggactataaggcagatgagtggctgatgaagaatatggaccccctgaatgacaacgtggccacccttttgcaccagtcatcagacagatttgtggcagagctttggaaagatgagattcagaatattcagagagcttctttctatgacagtgtttctggtcttcatgagccaccagtggaccgtatcgtgggtctggatcaagtcactggtatgactgagacagcttttggctccgcatataaaaccaagaagggcatgtttcgtaccgttgggcaactctacaaagaatctctcaccaagctgatggcaactctccgaaacaccaaccctaactttgttcgttgtatcattccaaatcacgagaagagggctggaaaattggatccacacctagtcctagatcagcttcgctgtaacggtgtcctggaagggatccgaatctgtcgccagggcttccctaaccgaatagttttccaggaattcagacagagatatgagatcctaactccaaatgctattcctaaaggttttatggatggtaaacaggcctgtgaacgaatgatccgggctttagaattggacccaaacttgtacagaattggacagagcaagatatttttcagagctggagttctggcacacttagaggaagaaagagatttaaaaatcaccgatatcattatcttcttccaggccgtttgcagaggttacctggccagaaaggcctttgccaagaagcagcagcaactaagtgccttaaaggtcttgcagcggaactgtgccgcgtacctgaaattacggcactggcagtggtggcgagtcttcacaaaggtgaagccgcttctacaagtgactcgccaggaggaagaacttcaggccaaagatgaagagctgttgaaggtgaaggagaagcagacgaaggtggaaggagagctggaggagatggagcggaagcaccagcagcttttagaagagaagaatatccttgcagaacaactacaagcagagactgagctctttgctgaagcagaagagatgagggcaagacttgctgctaaaaagcaggaattagaagagattctacatgacttggagtctagggttgaagaagaagaagaaagaaaccaaatcctccaaaatgaaaagaaaaaaatgcaagcacatattcaggacctggaagaacagctagacgaggaggaaggggctcggcaaaagctgcagctggaaaaggtgacagcagaggccaagatcaagaagatggaagaggagattctgcttctcgaggaccaaaattccaagttcatcaaagaaaagaaactcatggaagatcgcattgctgagtgttcctctcagctggctgaagaggaagaaaaggcgaaaaacttggccaaaatcaggaataagcaagaagtgatgatctcagatttagaagaacgcttaaagaaggaagaaaagactcgtcaggaactggaaaaggccaaaagaaaactcgacggggagacgaccgacctgcaggaccagatcgcagagctgcaggcgcagattgatgagctcaagctgcagctggccaagaaggaggaggagctgcagggcgcactggccagaggtgatgatgaaacactccataagaacaatgcccttaaagttgtgcgagagctacaagcccaaattgctgaacttcaggaagactttgaatccgagaaggcttcacggaacaaggccgaaaagcagaaaagggacttgagtgaggaactggaagctctgaaaacagagctggaggacacgctggacaccacggcagcccagcaggaactacgtacaaaacgtgaacaagaagtggcagagctgaagaaagctcttgaggaggaaactaagaaccatgaagctcaaatccaggacatgagacaaagacacgcaacagccctggaggagctctcagagcagctggaacaggccaagcggttcaaagcaaatctagagaagaacaagcagggcctggagacagataacaaggagctggcgtgtgaggtgaaggtcctgcagcaggtcaaggctgagtctgagcacaagaggaagaagctcgacgcgcaggtccaggagctccatgccaaggtctctgaaggcgacaggctcagggtggagctggcggagaaagcaagtaagctgcagaatgagctagataatgtctccacccttctggaagaagcagagaagaagggtattaaatttgctaaggatgcagctagtcttgagtctcaactacaggatacacaggagcttcttcaggaggagacacgccagaaactaaacctgagcagtcggatccggcagctggaagaggagaagaacagtcttcaggagcagcaggaggaggaggaggaggccaggaagaacctggagaagcaagtgctggccctgcagtcccagttggctgataccaagaagaaagtagatgacgacctgggaacaattgaaagtctggaagaagccaagaagaagcttctgaaggacgcggaggccctgagccagcgcctggaggagaaggcactggcgtatgacaaactggagaagaccaagaaccgcctgcagcaggagctggacgacctcacggtggacctggaccaccagcgccaggtcgcctccaacttggagaagaagcagaagaagtttgaccagctgttagcagaagagaagagcatctctgctcgctatgccgaagagcgggaccgggccgaagccgaggccagagagaaagaaaccaaagccctgtcactggcccgggccctcgaggaagccctggaggccaaggaggagtttgagaggcagaacaagcagctccgagcagacatggaagacctcatgagctccaaagatgatgtgggaaaaaacgttcacgaacttgaaaaatccaaacgggccctagagcagcaggtggaggaaatgaggacccagctggaggagctggaagacgaactccaggccacggaagatgccaagcttcgtctggaggtcaacatgcaggccatgaaggcgcagttcgagagagacctgcaaaccagggatgagcagaatgaagagaagaagcggctgctgatcaaacaggtgcgggagctcgaggcggagctggaggatgagaggaaacagcgggcgcttgctgtagcttcaaagaaaaagatggagatagacctgaaggacctcgaagcccaaatcgaggctgcgaacaaagctcgggatgaggtgattaagcagctccgcaagctccaggctcagatgaaggattaccaacgtgaattagaagaagctcgtgcatccagagatgagatttttgctcaatccaaagagagtgaaaagaaattgaagagtctggaagcagaaatccttcaattgcaggaggaacttgcctcatctgagcgagcccgccgacacgccgagcaggagagagatgagctggcggacgagatcaccaacagcgcctctggcaagtccgcgctgctggatgagaagcggcgtctggaagctcggatcgcacagctggaggaggagctggaagaggagcagagcaacatggagctgctcaacgaccgcttccgcaagaccactctacaggtggacacactgaacgccgagctagcagccgagcgcagcgccgcccagaagagtgacaatgcacgccagcaactggagcggcagaacaaggagctgaaggccaagctgcaggaactcgagggtgctgtcaagtctaagttcaaggccaccatctcagccctggaggccaagattgggcagctggaggagcagcttgagcaggaagccaaggaacgagcagccgccaacaaattagtccgtcgcactgagaagaagctgaaagaaatcttcatgcaggttgaggatgagcgtcgacacgcggaccagtataaagagcagatggagaaggccaacgctcggatgaagcagcttaaacgccagctggaggaagcagaagaagaagcgacgcgtgccaacgcatctcggcgtaaactccagcgggaactggatgatgccaccgaggccaacgagggcctgagccgcgaggtcagcaccctgaagaaccggctgaggcggggtggccccatcagcttctcttccagccgatctggccggcgccagctgcaccttgaaggagcttccctggagctctccgacgatgacacagaaagtaagaccagtgatgtcaacgagacgcagccaccccagtcagagtaaagttgcaggaagccagaggaggcaatacagtgggacagttaggaatgcacccggggcctcctgcagatttcggaaattggcaagctacgggattccttcctgaaagatcaactgtgtcttaaggctctccagcctatgcatactgtatcctgcttcagacttaggtacaattgctcccctttttatatatagacacacacaggacacatatattaaacagattgtttcatcattgcatctattttccatatagtcatcaagagaccattttataaaacatggtaagaccctttttaaaacaaactccaggcccttggttgcgggtcgctgggttattggggcagcgccgtggtcgtcactcagtcgctctgcatgctctctgtcatacagacaggtaacctagttctgtgttcacgtggcccccgactcctcagccacatcaagtctcctagaccactgtggactctaaactgcacttgtctctctcatttccttcaaataatgatcaatgctatttcagtgagcaaactgtgaaaggggctttggaaagagtaggaggggtgggctggatcggaagcaacacccatttggggttaccatgtccatcccccaaggggggccctgcccctcgagtcgatggtgtcccgcatctactcatgtgaactggccttggcgagggctggtctgtgcatagaagggatagtggccacactgcagctgaggccccaggtggcagccatggatcatgtagacttccagatggtctcccgaaccgcctggctctgccggcgccctcctcacgtcaggagcaagcagccgtggacccctaagccgagctggtggaaggcccctccccatcgccagccgggccctcatgctgaccttgcaaattcagccgctgctttgagcccaaaatgggaatattggttttgtgtccgaggcttgttccaagtttgtcaatgaggtttatggagcctccagaacagatgccatcttcctgaatgttgacatgccagtgggtgtgactccttcatttttccttctcccttccctttggacagtgttacagtgaacacttagcatcctgtttttggttggtagttaagcaaactgacattacggaaagtgccttagacactacagtactaagacaatgttgaatatatcattcgcctctataacaatttaatgtattcagttttgactgtgcttcatatcatgtacctctctagtcaaagtggtattacagacattcagtgacaatgaatcagtgttaattctaaatccttgatcctctgcaatgtgcttgaaaacacaaaccttttgggttaaaagctttaacatctattaggaagaatttgtcctgtgggtttggaatcttggattttccccctttatgaactgtactggctgttgaccaccagacacctgaccgcaaatatcttttcttgtattcccatatttctagacaatgatttttgtaagacaataaatttattcattatagatatttgcgcctgctctgtttacttgaagaaaaaagcacccgtggagaataaagagacctcaataaacaagaataatcatgtgaa

SEQ ID NO: 1162 - DNA, 7859 bp, Homo sapiens
atggcgccgggttggccctcactatcagcgggctcccgacaggaggcgccccagcttgcggccgggggcagcgcctaccaggcagttggcaggcagttccagccccgggccacggcactgcagggcccgagccaggccaagtcctgtatctgccatgtctgtggcgtccacctcaacaggctgcattcctgcctctactgtgtcttcttcggctgtttcacaaagaagcatattcacgagcatgcgaaggcgaagcggcacaacctggccattgatctgatgtacggaggcatctactgttttctgtgccaggactacatctatgacaaagacatggaaataatcgccaaggaggagcagcgaaaagcttggaaaatgcaaggcgttggagagaagttttcaacttgggaaccaaccaaacgggagcttgaactgctgaagcacaacccgaaaaggagaaagatcacctcgaactgcaccataggtctgcgtgggctgatcaaccttgggaacacatgcttcatgaactgcatcgtgcaggccctgacccacacgccacttctgcgggacttcttcctgtctgacaggcaccgctgtgagatgcagagccccagctcctgtctggtctgtgagatgtcctcactgtttcaggagacttattctggactcttctgtgtagttataaacccttacaagaatcttccaatttactctgagaatattattgaaatgtacagagggaagaagcgtcatgagatgcctccacacatctatgctatatctgaatctgcttacagatgcatgcttcaagatcgtgaggaccagtcaattctttgcacgggtgagtcaggtgctgggaagacagaaaatacaaagaaagttattcagtaccttgcccatgttgcttcttcacataaaggaagaaaggaccataatattcctgaatcgcctaaaccagtgaaacaccagggggaacttgaacggcagcttttgcaagcaaatccaattctggaatcatttggaaatgcgaagactgtgaaaaatgataactcatctcgttttggcaaatttattcggatcaactttgatgtaactggctatatcgttggggccaacattgaaacataccttctggaaaagtctcgtgctgttcgtcaagcaaaagatgaacgtacttttcatatcttttaccagttgttatctggagcaggagaacacctaaagtctgatttgcttcttgaaggatttaataactacaggtttctctccaatggctatattcctattccgggacagcaagacaaagataatttccaggagaccatggaagcaatgcacataatgggcttctcccatgaagagattctgtcaatgcttaaagtagtatcttcagtgctacagtttggaaatatttctttcaaaaaggagagaaatactgatcaagcttccatgccagaaaatacagttgcgcagaagctctgccatcttcttgggatgaatgtgatggagtttactcgggccatcctgactccccggatcaaggtcggccgagactatgtgcaaaaagcccagaccaaagaacaggcagattttgcagtagaagcattggcaaaagctacctatgagcggctctttcgctggctcgttcatcgcatcaataaagctctggataggaccaaacgtcagggagcatctttcattggaatcctggatattgctggatttgaaatttttgagctgaactcctttgaacaactttgcatcaactacaccaatgagaagctgcagcagctgttcaaccacaccatgtttatcctagaacaagaggaataccagcgcgaaggcatcgagtggaacttcatcgatttcgggctggatctgcagccatgcatcgacctaatagagagacctgcgaaccctcctggtgtactggcccttttggatgaagaatgctggttccctaaagccacagataaaacctttgttgaaaaactggttcaagagcaaggttcccactccaagtttcagaaacctcgacaattaaaagacaaagctgatttttgcattatacattatgcagggaaggtggactataaggcagatgagtggctgatgaagaatatggaccccctgaatgacaacgtggccacccttttgcaccagtcatcagacagatttgtggcagagctttggaaagatgtggaccgtatcgtgggtctggatcaagtcactggtatgactgagacagcttttggctccgcatataaaaccaagaagggcatgtttcgtaccgttgggcaactctacaaagaatctctcaccaagctgatggcaactctccgaaacaccaaccctaactttgttcgttgtatcattccaaatcacgagaagagggctggaaaattggatccacacctagtcctagatcagcttcgctgtaacggtgtcctggaagggatccgaatctgtcgccagggcttccctaaccgaatagttttccaggaattcagacagagatatgagatcctaactccaaatgctattcctaaaggttttatggatggtaaacaggcctgtgaacgaatgatccgggctttagaattggacccaaacttgtacagaattggacagagcaagatatttttcagagctggagttctggcacacttagaggaagaaagagatttaaaaatcaccgatatcattatcttcttccaggccgtttgcagaggttacctggccagaaaggcctttgccaagaagcagcagcaactaagtgccttaaaggtcttgcagcggaactgtgccgcgtacctgaaattacggcactggcagtggtggcgagtcttcacaaaggtgaagccgcttctacaagtgactcgccaggaggaagaacttcaggccaaagatgaagagctgttgaaggtgaaggagaagcagacgaaggtggaaggagagctggaggagatggagcggaagcaccagcagcttttagaagagaagaatatccttgcagaacaactacaagcagagactgagctctttgctgaagcagaagagatgagggcaagacttgctgctaaaaagcaggaattagaagagattctacatgacttggagtctagggttgaagaagaagaagaaagaaaccaaatcctccaaaatgaaaagaaaaaaatgcaagcacatattcaggacctggaagaacagctagacgaggaggaaggggctcggcaaaagctgcagctggaaaaggtgacagcagaggccaagatcaagaagatggaagaggagattctgcttctcgaggaccaaaattccaagttcatcaaagaaaagaaactcatggaagatcgcattgctgagtgttcctctcagctggctgaagaggaagaaaaggcgaaaaacttggccaaaatcaggaataagcaagaagtgatgatctcagatttagaagaacgcttaaagaaggaagaaaagactcgtcaggaactggaaaaggccaaaagaaaactcgacggggagacgaccgacctgcaggaccagatcgcagagctgcaggcgcagattgatgagctcaagctgcagctggccaagaaggaggaggagctgcagggcgcactggccagaggtgatgatgaaacactccataagaacaatgcccttaaagttgtgcgagagctacaagcccaaattgctgaacttcaggaagactttgaatccgagaaggcttcacggaacaaggccgaaaagcagaaaagggacttgagtgaggaactggaagctctgaaaacagagctggaggacacgctggacaccacggcagcccagcaggaactacgtacaaaacgtgaacaagaagtggcagagctgaagaaagctcttgaggaggaaactaagaaccatgaagctcaaatccaggacatgagacaaagacacgcaacagccctggaggagctctcagagcagctggaacaggccaagcggttcaaagcaaatctagagaagaacaagcagggcctggagacagataacaaggagctggcgtgtgaggtgaaggtcctgcagcaggtcaaggctgagtctgagcacaagaggaagaagctcgacgcgcaggtccaggagctccatgccaaggtctctgaaggcgacaggctcagggtggagctggcggagaaagcaagtaagctgcagaatgagctagataatgtctccacccttctggaagaagcagagaagaagggtattaaatttgctaaggatgcagctagtcttgagtctcaactacaggatacacaggagcttcttcaggaggagacacgccagaaactaaacctgagcagtcggatccggcagctggaagaggagaagaacagtcttcaggagcagcaggaggaggaggaggaggccaggaagaacctggagaagcaagtgctggccctgcagtcccagttggctgataccaagaagaaagtagatgacgacctgggaacaattgaaagtctggaagaagccaagaagaagcttctgaaggacgcggaggccctgagccagcgcctggaggagaaggcactggcgtatgacaaactggagaagaccaagaaccgcctgcagcaggagctggacgacctcacggtggacctggaccaccagcgccaggtcgcctccaacttggagaagaagcagaagaagtttgaccagctgttagcagaagagaagagcatctctgctcgctatgccgaagagcgggaccgggccgaagccgaggccagagagaaagaaaccaaagccctgtcactggcccgggccctcgaggaagccctggaggccaaggaggagtttgagaggcagaacaagcagctccgagcagacatggaagacctcatgagctccaaagatgatgtgggaaaaaacgttcacgaacttgaaaaatccaaacgggccctagagcagcaggtggaggaaatgaggacccagctggaggagctggaagacgaactccaggccacggaagatgccaagcttcgtctggaggtcaacatgcaggccatgaaggcgcagttcgagagagacctgcaaaccagggatgagcagaatgaagagaagaagcggctgctgatcaaacaggtgcgggagctcgaggcggagctggaggatgagaggaaacagcgggcgcttgctgtagcttcaaagaaaaagatggagatagacctgaaggacctcgaagcccaaatcgaggctgcgaacaaagctcgggatgaggtgattaagcagctccgcaagctccaggctcagatgaaggattaccaacgtgaattagaagaagctcgtgcatccagagatgagatttttgctcaatccaaagagagtgaaaagaaattgaagagtctggaagcagaaatccttcaattgcaggaggaacttgcctcatctgagcgagcccgccgacacgccgagcaggagagagatgagctggcggacgagatcaccaacagcgcctctggcaagtccgcgctgctggatgagaagcggcgtctggaagctcggatcgcacagctggaggaggagctggaagaggagcagagcaacatggagctgctcaacgaccgcttccgcaagaccactctacaggtggacacactgaacgccgagctagcagccgagcgcagcgccgcccagaagagtgacaatgcacgccagcaactggagcggcagaacaaggagctgaaggccaagctgcaggaactcgagggtgctgtcaagtctaagttcaaggccaccatctcagccctggaggccaagattgggcagctggaggagcagcttgagcaggaagccaaggaacgagcagccgccaacaaattagtccgtcgcactgagaagaagctgaaagaaatcttcatgcaggttgaggatgagcgtcgacacgcggaccagtataaagagcagatggagaaggccaacgctcggatgaagcagcttaaacgccagctggaggaagcagaagaagaagcgacgcgtgccaacgcatctcggcgtaaactccagcgggaactggatgatgccaccgaggccaacgagggcctgagccgcgaggtcagcaccctgaagaaccggctgaggcggggtggccccatcagcttctcttccagccgatctggccggcgccagctgcaccttgaaggagcttccctggagctctccgacgatgacacagaaagtaagaccagtgatgtcaacgagacgcagccaccccagtcagagtaaagttgcaggaagccagaggaggcaatacagtgggacagttaggaatgcacccggggcctcctgcagatttcggaaattggcaagctacgggattccttcctgaaagatcaactgtgtcttaaggctctccagcctatgcatactgtatcctgcttcagacttaggtacaattgctcccctttttatatatagacacacacaggacacatatattaaacagattgtttcatcattgcatctattttccatatagtcatcaagagaccattttataaaacatggtaagaccctttttaaaacaaactccaggcccttggttgcgggtcgctgggttattggggcagcgccgtggtcgtcactcagtcgctctgcatgctctctgtcatacagacaggtaacctagttctgtgttcacgtggcccccgactcctcagccacatcaagtctcctagaccactgtggactctaaactgcacttgtctctctcatttccttcaaataatgatcaatgctatttcagtgagcaaactgtgaaaggggctttggaaagagtaggaggggtgggctggatcggaagcaacacccatttggggttaccatgtccatcccccaaggggggccctgcccctcgagtcgatggtgtcccgcatctactcatgtgaactggccttggcgagggctggtctgtgcatagaagggatagtggccacactgcagctgaggccccaggtggcagccatggatcatgtagacttccagatggtctcccgaaccgcctggctctgccggcgccctcctcacgtcaggagcaagcagccgtggacccctaagccgagctggtggaaggcccctccccatcgccagccgggccctcatgctgaccttgcaaattcagccgctgctttgagcccaaaatgggaatattggttttgtgtccgaggcttgttccaagtttgtcaatgaggtttatggagcctccagaacagatgccatcttcctgaatgttgacatgccagtgggtgtgactccttcatttttccttctcccttccctttggacagtgttacagtgaacacttagcatcctgtttttggttggtagttaagcaaactgacattacggaaagtgccttagacactacagtactaagacaatgttgaatatatcattcgcctctataacaatttaatgtattcagttttgactgtgcttcatatcatgtacctctctagtcaaagtggtattacagacattcagtgacaatgaatcagtgttaattctaaatccttgatcctctgcaatgtgcttgaaaacacaaaccttttgggttaaaagctttaacatctattaggaagaatttgtcctgtgggtttggaatcttggattttccccctttatgaactgtactggctgttgaccaccagacacctgaccgcaaatatcttttcttgtattcccatatttctagacaatgatttttgtaagacaataaatttattcattatagatatttgcgcctgctctgtttacttgaagaaaaaagcacccgtggagaataaagagacctcaataaacaagaataatcatgtgaa

SEQ ID NO: 1163 - DNA, 8099 bp, Homo sapiens
gcagccgcagctcgggggcggtgcctgccttgcagcctcccctcggcgatcgcgcagccccatctttgtccggcctccgcgctttgttctcggcgcccgggccttggccagcctggccagccgccgagcagcccccacgccgcgctggcgtcgtcctcgcctccctcgccgccgccccccgcgcgcggccgggccttgccccccatggtgtcccggccagagcccgagggcgaggccatggacgccgagctggcggtagcgccgccgggctgctcgcacctgggcagcttcaaggtggacaactggaagcagaacctgcgggccatctaccagtgcttcgtgtggagcggcacggctgaggcccgcaagcgcaaggccaagtcctgtatctgccatgtctgtggcgtccacctcaacaggctgcattcctgcctctactgtgtcttcttcggctgtttcacaaagaagcatattcacgagcatgcgaaggcgaagcggcacaacctggccattgatctgatgtacggaggcatctactgttttctgtgccaggactacatctatgacaaagacatggaaataatcgccaaggaggagcagcgaaaagcttggaaaatgcaaggcgttggagagaagttttcaacttgggaaccaaccaaacgggagcttgaactgctgaagcacaacccgaaaaggagaaagatcacctcgaactgcaccataggtctgcgtgggctgatcaaccttgggaacacatgcttcatgaactgcatcgtgcaggccctgacccacacgccacttctgcgggacttcttcctgtctgacaggcaccgctgtgagatgcagagccccagctcctgtctggtctgtgagatgtcctcactgtttcaggagacttattctggactcttctgtgtagttataaacccttacaagaatcttccaatttactctgagaatattattgaaatgtacagagggaagaagcgtcatgagatgcctccacacatctatgctatatctgaatctgcttacagatgcatgcttcaagatcgtgaggaccagtcaattctttgcacgggtgagtcaggtgctgggaagacagaaaatacaaagaaagttattcagtaccttgcccatgttgcttcttcacataaaggaagaaaggaccataatattcctgaatcgcctaaaccagtgaaacaccagggggaacttgaacggcagcttttgcaagcaaatccaattctggaatcatttggaaatgcgaagactgtgaaaaatgataactcatctcgttttggcaaatttattcggatcaactttgatgtaactggctatatcgttggggccaacattgaaacataccttctggaaaagtctcgtgctgttcgtcaagcaaaagatgaacgtacttttcatatcttttaccagttgttatctggagcaggagaacacctaaagtctgatttgcttcttgaaggatttaataactacaggtttctctccaatggctatattcctattccgggacagcaagacaaagataatttccaggagaccatggaagcaatgcacataatgggcttctcccatgaagagattctgtcaatgcttaaagtagtatcttcagtgctacagtttggaaatatttctttcaaaaaggagagaaatactgatcaagcttccatgccagaaaatacagttgcgcagaagctctgccatcttcttgggatgaatgtgatggagtttactcgggccatcctgactccccggatcaaggtcggccgagactatgtgcaaaaagcccagaccaaagaacaggcagattttgcagtagaagcattggcaaaagctacctatgagcggctctttcgctggctcgttcatcgcatcaataaagctctggataggaccaaacgtcagggagcatctttcattggaatcctggatattgctggatttgaaatttttgagctgaactcctttgaacaactttgcatcaactacaccaatgagaagctgcagcagctgttcaaccacaccatgtttatcctagaacaagaggaataccagcgcgaaggcatcgagtggaacttcatcgatttcgggctggatctgcagccatgcatcgacctaatagagagacctgcgaaccctcctggtgtactggcccttttggatgaagaatgctggttccctaaagccacagataaaacctttgttgaaaaactggttcaagagcaaggttcccactccaagtttcagaaacctcgacaattaaaagacaaagctgatttttgcattatacattatgcagggaaggtggactataaggcagatgagtggctgatgaagaatatggaccccctgaatgacaacgtggccacccttttgcaccagtcatcagacagatttgtggcagagctttggaaagatgtggaccgtatcgtgggtctggatcaagtcactggtatgactgagacagcttttggctccgcatataaaaccaagaagggcatgtttcgtaccgttgggcaactctacaaagaatctctcaccaagctgatggcaactctccgaaacaccaaccctaactttgttcgttgtatcattccaaatcacgagaagagggctggaaaattggatccacacctagtcctagatcagcttcgctgtaacggtgtcctggaagggatccgaatctgtcgccagggcttccctaaccgaatagttttccaggaattcagacagagatatgagatcctaactccaaatgctattcctaaaggttttatggatggtaaacaggcctgtgaacgaatgatccgggctttagaattggacccaaacttgtacagaattggacagagcaagatatttttcagagctggagttctggcacacttagaggaagaaagagatttaaaaatcaccgatatcattatcttcttccaggccgtttgcagaggttacctggccagaaaggcctttgccaagaagcagcagcaactaagtgccttaaaggtcttgcagcggaactgtgccgcgtacctgaaattacggcactggcagtggtggcgagtcttcacaaaggtgaagccgcttctacaagtgactcgccaggaggaagaacttcaggccaaagatgaagagctgttgaaggtgaaggagaagcagacgaaggtggaaggagagctggaggagatggagcggaagcaccagcagcttttagaagagaagaatatccttgcagaacaactacaagcagagactgagctctttgctgaagcagaagagatgagggcaagacttgctgctaaaaagcaggaattagaagagattctacatgacttggagtctagggttgaagaagaagaagaaagaaaccaaatcctccaaaatgaaaagaaaaaaatgcaagcacatattcaggacctggaagaacagctagacgaggaggaaggggctcggcaaaagctgcagctggaaaaggtgacagcagaggccaagatcaagaagatggaagaggagattctgcttctcgaggaccaaaattccaagttcatcaaagaaaagaaactcatggaagatcgcattgctgagtgttcctctcagctggctgaagaggaagaaaaggcgaaaaacttggccaaaatcaggaataagcaagaagtgatgatctcagatttagaagaacgcttaaagaaggaagaaaagactcgtcaggaactggaaaaggccaaaagaaaactcgacggggagacgaccgacctgcaggaccagatcgcagagctgcaggcgcagattgatgagctcaagctgcagctggccaagaaggaggaggagctgcagggcgcactggccagaggtgatgatgaaacactccataagaacaatgcccttaaagttgtgcgagagctacaagcccaaattgctgaacttcaggaagactttgaatccgagaaggcttcacggaacaaggccgaaaagcagaaaagggacttgagtgaggaactggaagctctgaaaacagagctggaggacacgctggacaccacggcagcccagcaggaactacgtacaaaacgtgaacaagaagtggcagagctgaagaaagctcttgaggaggaaactaagaaccatgaagctcaaatccaggacatgagacaaagacacgcaacagccctggaggagctctcagagcagctggaacaggccaagcggttcaaagcaaatctagagaagaacaagcagggcctggagacagataacaaggagctggcgtgtgaggtgaaggtcctgcagcaggtcaaggctgagtctgagcacaagaggaagaagctcgacgcgcaggtccaggagctccatgccaaggtctctgaaggcgacaggctcagggtggagctggcggagaaagcaagtaagctgcagaatgagctagataatgtctccacccttctggaagaagcagagaagaagggtattaaatttgctaaggatgcagctagtcttgagtctcaactacaggatacacaggagcttcttcaggaggagacacgccagaaactaaacctgagcagtcggatccggcagctggaagaggagaagaacagtcttcaggagcagcaggaggaggaggaggaggccaggaagaacctggagaagcaagtgctggccctgcagtcccagttggctgataccaagaagaaagtagatgacgacctgggaacaattgaaagtctggaagaagccaagaagaagcttctgaaggacgcggaggccctgagccagcgcctggaggagaaggcactggcgtatgacaaactggagaagaccaagaaccgcctgcagcaggagctggacgacctcacggtggacctggaccaccagcgccaggtcgcctccaacttggagaagaagcagaagaagtttgaccagctgttagcagaagagaagagcatctctgctcgctatgccgaagagcgggaccgggccgaagccgaggccagagagaaagaaaccaaagccctgtcactggcccgggccctcgaggaagccctggaggccaaggaggagtttgagaggcagaacaagcagctccgagcagacatggaagacctcatgagctccaaagatgatgtgggaaaaaacgttcacgaacttgaaaaatccaaacgggccctagagcagcaggtggaggaaatgaggacccagctggaggagctggaagacgaactccaggccacggaagatgccaagcttcgtctggaggtcaacatgcaggccatgaaggcgcagttcgagagagacctgcaaaccagggatgagcagaatgaagagaagaagcggctgctgatcaaacaggtgcgggagctcgaggcggagctggaggatgagaggaaacagcgggcgcttgctgtagcttcaaagaaaaagatggagatagacctgaaggacctcgaagcccaaatcgaggctgcgaacaaagctcgggatgaggtgattaagcagctccgcaagctccaggctcagatgaaggattaccaacgtgaattagaagaagctcgtgcatccagagatgagatttttgctcaatccaaagagagtgaaaagaaattgaagagtctggaagcagaaatccttcaattgcaggaggaacttgcctcatctgagcgagcccgccgacacgccgagcaggagagagatgagctggcggacgagatcaccaacagcgcctctggcaagtccgcgctgctggatgagaagcggcgtctggaagctcggatcgcacagctggaggaggagctggaagaggagcagagcaacatggagctgctcaacgaccgcttccgcaagaccactctacaggtggacacactgaacgccgagctagcagccgagcgcagcgccgcccagaagagtgacaatgcacgccagcaactggagcggcagaacaaggagctgaaggccaagctgcaggaactcgagggtgctgtcaagtctaagttcaaggccaccatctcagccctggaggccaagattgggcagctggaggagcagcttgagcaggaagccaaggaacgagcagccgccaacaaattagtccgtcgcactgagaagaagctgaaagaaatcttcatgcaggttgaggatgagcgtcgacacgcggaccagtataaagagcagatggagaaggccaacgctcggatgaagcagcttaaacgccagctggaggaagcagaagaagaagcgacgcgtgccaacgcatctcggcgtaaactccagcgggaactggatgatgccaccgaggccaacgagggcctgagccgcgaggtcagcaccctgaagaaccggctgaggcggggtggccccatcagcttctcttccagccgatctggccggcgccagctgcaccttgaaggagcttccctggagctctccgacgatgacacagaaagtaagaccagtgatgtcaacgagacgcagccaccccagtcagagtaaagttgcaggaagccagaggaggcaatacagtgggacagttaggaatgcacccggggcctcctgcagatttcggaaattggcaagctacgggattccttcctgaaagatcaactgtgtcttaaggctctccagcctatgcatactgtatcctgcttcagacttaggtacaattgctcccctttttatatatagacacacacaggacacatatattaaacagattgtttcatcattgcatctattttccatatagtcatcaagagaccattttataaaacatggtaagaccctttttaaaacaaactccaggcccttggttgcgggtcgctgggttattggggcagcgccgtggtcgtcactcagtcgctctgcatgctctctgtcatacagacaggtaacctagttctgtgttcacgtggcccccgactcctcagccacatcaagtctcctagaccactgtggactctaaactgcacttgtctctctcatttccttcaaataatgatcaatgctatttcagtgagcaaactgtgaaaggggctttggaaagagtaggaggggtgggctggatcggaagcaacacccatttggggttaccatgtccatcccccaaggggggccctgcccctcgagtcgatggtgtcccgcatctactcatgtgaactggccttggcgagggctggtctgtgcatagaagggatagtggccacactgcagctgaggccccaggtggcagccatggatcatgtagacttccagatggtctcccgaaccgcctggctctgccggcgccctcctcacgtcaggagcaagcagccgtggacccctaagccgagctggtggaaggcccctccccatcgccagccgggccctcatgctgaccttgcaaattcagccgctgctttgagcccaaaatgggaatattggttttgtgtccgaggcttgttccaagtttgtcaatgaggtttatggagcctccagaacagatgccatcttcctgaatgttgacatgccagtgggtgtgactccttcatttttccttctcccttccctttggacagtgttacagtgaacacttagcatcctgtttttggttggtagttaagcaaactgacattacggaaagtgccttagacactacagtactaagacaatgttgaatatatcattcgcctctataacaatttaatgtattcagttttgactgtgcttcatatcatgtacctctctagtcaaagtggtattacagacattcagtgacaatgaatcagtgttaattctaaatccttgatcctctgcaatgtgcttgaaaacacaaaccttttgggttaaaagctttaacatctattaggaagaatttgtcctgtgggtttggaatcttggattttccccctttatgaactgtactggctgttgaccaccagacacctgaccgcaaatatcttttcttgtattcccatatttctagacaatgatttttgtaagacaataaatttattcattatagatatttgcgcctgctctgtttacttgaagaaaaaagcacccgtggagaataaagagacctcaataaacaagaataatcatgtgaa

SEQ ID NO: 1164 - DNA, 7832 bp, Homo sapiens
atggcgccgggttggccctcactatcagcgggctcccgacaggaggcgccccagcttgcggccgggggcagcgcctaccaggcagttggcaggcagttccagccccgggccacggcactgcagggcccgagccaggccaagtcctgtatctgccatgtctgtggcgtccacctcaacaggctgcattcctgcctctactgtgtcttcttcggctgtttcacaaagaagcatattcacgagcatgcgaaggcgaagcggcacaacctggccattgatctgatgtacggaggcatctactgttttctgtgccaggactacatctatgacaaagacatggaaataatcgccaaggaggagcagcgaaaagcttggaaaatgcaaggcgttggagagaagttttcaacttgggaaccaaccaaacgggagcttgaactgctgaagcacaacccgaaaaggagaaagatcacctcgaactgcaccataggtctgcgtgggctgatcaaccttgggaacacatgcttcatgaactgcatcgtgcaggccctgacccacacgccacttctgcgggacttcttcctgtctgacaggcaccgctgtgagatgcagagccccagctcctgtctggtctgtgagatgtcctcactgtttcaggagacttattctggactcttctgtgtagttataaacccttacaagaatcttccaatttactctgagaatattattgaaatgtacagagggaagaagcgtcatgagatgcctccacacatctatgctatatctgaatctgcttacagatgcatgcttcaagatcgtgaggaccagtcaattctttgcacgggtgagtcaggtgctgggaagacagaaaatacaaagaaagttattcagtaccttgcccatgttgcttcttcacataaaggaagaaaggaccataatattcctggggaacttgaacggcagcttttgcaagcaaatccaattctggaatcatttggaaatgcgaagactgtgaaaaatgataactcatctcgttttggcaaatttattcggatcaactttgatgtaactggctatatcgttggggccaacattgaaacataccttctggaaaagtctcgtgctgttcgtcaagcaaaagatgaacgtacttttcatatcttttaccagttgttatctggagcaggagaacacctaaagtctgatttgcttcttgaaggatttaataactacaggtttctctccaatggctatattcctattccgggacagcaagacaaagataatttccaggagaccatggaagcaatgcacataatgggcttctcccatgaagagattctgtcaatgcttaaagtagtatcttcagtgctacagtttggaaatatttctttcaaaaaggagagaaatactgatcaagcttccatgccagaaaatacagttgcgcagaagctctgccatcttcttgggatgaatgtgatggagtttactcgggccatcctgactccccggatcaaggtcggccgagactatgtgcaaaaagcccagaccaaagaacaggcagattttgcagtagaagcattggcaaaagctacctatgagcggctctttcgctggctcgttcatcgcatcaataaagctctggataggaccaaacgtcagggagcatctttcattggaatcctggatattgctggatttgaaatttttgagctgaactcctttgaacaactttgcatcaactacaccaatgagaagctgcagcagctgttcaaccacaccatgtttatcctagaacaagaggaataccagcgcgaaggcatcgagtggaacttcatcgatttcgggctggatctgcagccatgcatcgacctaatagagagacctgcgaaccctcctggtgtactggcccttttggatgaagaatgctggttccctaaagccacagataaaacctttgttgaaaaactggttcaagagcaaggttcccactccaagtttcagaaacctcgacaattaaaagacaaagctgatttttgcattatacattatgcagggaaggtggactataaggcagatgagtggctgatgaagaatatggaccccctgaatgacaacgtggccacccttttgcaccagtcatcagacagatttgtggcagagctttggaaagatgtggaccgtatcgtgggtctggatcaagtcactggtatgactgagacagcttttggctccgcatataaaaccaagaagggcatgtttcgtaccgttgggcaactctacaaagaatctctcaccaagctgatggcaactctccgaaacaccaaccctaactttgttcgttgtatcattccaaatcacgagaagagggctggaaaattggatccacacctagtcctagatcagcttcgctgtaacggtgtcctggaagggatccgaatctgtcgccagggcttccctaaccgaatagttttccaggaattcagacagagatatgagatcctaactccaaatgctattcctaaaggttttatggatggtaaacaggcctgtgaacgaatgatccgggctttagaattggacccaaacttgtacagaattggacagagcaagatatttttcagagctggagttctggcacacttagaggaagaaagagatttaaaaatcaccgatatcattatcttcttccaggccgtttgcagaggttacctggccagaaaggcctttgccaagaagcagcagcaactaagtgccttaaaggtcttgcagcggaactgtgccgcgtacctgaaattacggcactggcagtggtggcgagtcttcacaaaggtgaagccgcttctacaagtgactcgccaggaggaagaacttcaggccaaagatgaagagctgttgaaggtgaaggagaagcagacgaaggtggaaggagagctggaggagatggagcggaagcaccagcagcttttagaagagaagaatatccttgcagaacaactacaagcagagactgagctctttgctgaagcagaagagatgagggcaagacttgctgctaaaaagcaggaattagaagagattctacatgacttggagtctagggttgaagaagaagaagaaagaaaccaaatcctccaaaatgaaaagaaaaaaatgcaagcacatattcaggacctggaagaacagctagacgaggaggaaggggctcggcaaaagctgcagctggaaaaggtgacagcagaggccaagatcaagaagatggaagaggagattctgcttctcgaggaccaaaattccaagttcatcaaagaaaagaaactcatggaagatcgcattgctgagtgttcctctcagctggctgaagaggaagaaaaggcgaaaaacttggccaaaatcaggaataagcaagaagtgatgatctcagatttagaagaacgcttaaagaaggaagaaaagactcgtcaggaactggaaaaggccaaaagaaaactcgacggggagacgaccgacctgcaggaccagatcgcagagctgcaggcgcagattgatgagctcaagctgcagctggccaagaaggaggaggagctgcagggcgcactggccagaggtgatgatgaaacactccataagaacaatgcccttaaagttgtgcgagagctacaagcccaaattgctgaacttcaggaagactttgaatccgagaaggcttcacggaacaaggccgaaaagcagaaaagggacttgagtgaggaactggaagctctgaaaacagagctggaggacacgctggacaccacggcagcccagcaggaactacgtacaaaacgtgaacaagaagtggcagagctgaagaaagctcttgaggaggaaactaagaaccatgaagctcaaatccaggacatgagacaaagacacgcaacagccctggaggagctctcagagcagctggaacaggccaagcggttcaaagcaaatctagagaagaacaagcagggcctggagacagataacaaggagctggcgtgtgaggtgaaggtcctgcagcaggtcaaggctgagtctgagcacaagaggaagaagctcgacgcgcaggtccaggagctccatgccaaggtctctgaaggcgacaggctcagggtggagctggcggagaaagcaagtaagctgcagaatgagctagataatgtctccacccttctggaagaagcagagaagaagggtattaaatttgctaaggatgcagctagtcttgagtctcaactacaggatacacaggagcttcttcaggaggagacacgccagaaactaaacctgagcagtcggatccggcagctggaagaggagaagaacagtcttcaggagcagcaggaggaggaggaggaggccaggaagaacctggagaagcaagtgctggccctgcagtcccagttggctgataccaagaagaaagtagatgacgacctgggaacaattgaaagtctggaagaagccaagaagaagcttctgaaggacgcggaggccctgagccagcgcctggaggagaaggcactggcgtatgacaaactggagaagaccaagaaccgcctgcagcaggagctggacgacctcacggtggacctggaccaccagcgccaggtcgcctccaacttggagaagaagcagaagaagtttgaccagctgttagcagaagagaagagcatctctgctcgctatgccgaagagcgggaccgggccgaagccgaggccagagagaaagaaaccaaagccctgtcactggcccgggccctcgaggaagccctggaggccaaggaggagtttgagaggcagaacaagcagctccgagcagacatggaagacctcatgagctccaaagatgatgtgggaaaaaacgttcacgaacttgaaaaatccaaacgggccctagagcagcaggtggaggaaatgaggacccagctggaggagctggaagacgaactccaggccacggaagatgccaagcttcgtctggaggtcaacatgcaggccatgaaggcgcagttcgagagagacctgcaaaccagggatgagcagaatgaagagaagaagcggctgctgatcaaacaggtgcgggagctcgaggcggagctggaggatgagaggaaacagcgggcgcttgctgtagcttcaaagaaaaagatggagatagacctgaaggacctcgaagcccaaatcgaggctgcgaacaaagctcgggatgaggtgattaagcagctccgcaagctccaggctcagatgaaggattaccaacgtgaattagaagaagctcgtgcatccagagatgagatttttgctcaatccaaagagagtgaaaagaaattgaagagtctggaagcagaaatccttcaattgcaggaggaacttgcctcatctgagcgagcccgccgacacgccgagcaggagagagatgagctggcggacgagatcaccaacagcgcctctggcaagtccgcgctgctggatgagaagcggcgtctggaagctcggatcgcacagctggaggaggagctggaagaggagcagagcaacatggagctgctcaacgaccgcttccgcaagaccactctacaggtggacacactgaacgccgagctagcagccgagcgcagcgccgcccagaagagtgacaatgcacgccagcaactggagcggcagaacaaggagctgaaggccaagctgcaggaactcgagggtgctgtcaagtctaagttcaaggccaccatctcagccctggaggccaagattgggcagctggaggagcagcttgagcaggaagccaaggaacgagcagccgccaacaaattagtccgtcgcactgagaagaagctgaaagaaatcttcatgcaggttgaggatgagcgtcgacacgcggaccagtataaagagcagatggagaaggccaacgctcggatgaagcagcttaaacgccagctggaggaagcagaagaagaagcgacgcgtgccaacgcatctcggcgtaaactccagcgggaactggatgatgccaccgaggccaacgagggcctgagccgcgaggtcagcaccctgaagaaccggctgaggcggggtggccccatcagcttctcttccagccgatctggccggcgccagctgcaccttgaaggagcttccctggagctctccgacgatgacacagaaagtaagaccagtgatgtcaacgagacgcagccaccccagtcagagtaaagttgcaggaagccagaggaggcaatacagtgggacagttaggaatgcacccggggcctcctgcagatttcggaaattggcaagctacgggattccttcctgaaagatcaactgtgtcttaaggctctccagcctatgcatactgtatcctgcttcagacttaggtacaattgctcccctttttatatatagacacacacaggacacatatattaaacagattgtttcatcattgcatctattttccatatagtcatcaagagaccattttataaaacatggtaagaccctttttaaaacaaactccaggcccttggttgcgggtcgctgggttattggggcagcgccgtggtcgtcactcagtcgctctgcatgctctctgtcatacagacaggtaacctagttctgtgttcacgtggcccccgactcctcagccacatcaagtctcctagaccactgtggactctaaactgcacttgtctctctcatttccttcaaataatgatcaatgctatttcagtgagcaaactgtgaaaggggctttggaaagagtaggaggggtgggctggatcggaagcaacacccatttggggttaccatgtccatcccccaaggggggccctgcccctcgagtcgatggtgtcccgcatctactcatgtgaactggccttggcgagggctggtctgtgcatagaagggatagtggccacactgcagctgaggccccaggtggcagccatggatcatgtagacttccagatggtctcccgaaccgcctggctctgccggcgccctcctcacgtcaggagcaagcagccgtggacccctaagccgagctggtggaaggcccctccccatcgccagccgggccctcatgctgaccttgcaaattcagccgctgctttgagcccaaaatgggaatattggttttgtgtccgaggcttgttccaagtttgtcaatgaggtttatggagcctccagaacagatgccatcttcctgaatgttgacatgccagtgggtgtgactccttcatttttccttctcccttccctttggacagtgttacagtgaacacttagcatcctgtttttggttggtagttaagcaaactgacattacggaaagtgccttagacactacagtactaagacaatgttgaatatatcattcgcctctataacaatttaatgtattcagttttgactgtgcttcatatcatgtacctctctagtcaaagtggtattacagacattcagtgacaatgaatcagtgttaattctaaatccttgatcctctgcaatgtgcttgaaaacacaaaccttttgggttaaaagctttaacatctattaggaagaatttgtcctgtgggtttggaatcttggattttccccctttatgaactgtactggctgttgaccaccagacacctgaccgcaaatatcttttcttgtattcccatatttctagacaatgatttttgtaagacaataaatttattcattatagatatttgcgcctgctctgtttacttgaagaaaaaagcacccgtggagaataaagagacctcaataaacaagaataatcatgtgaa

SEQ ID NO: 1165 - DNA, 8072 bp, Homo sapiens
gcagccgcagctcgggggcggtgcctgccttgcagcctcccctcggcgatcgcgcagccccatctttgtccggcctccgcgctttgttctcggcgcccgggccttggccagcctggccagccgccgagcagcccccacgccgcgctggcgtcgtcctcgcctccctcgccgccgccccccgcgcgcggccgggccttgccccccatggtgtcccggccagagcccgagggcgaggccatggacgccgagctggcggtagcgccgccgggctgctcgcacctgggcagcttcaaggtggacaactggaagcagaacctgcgggccatctaccagtgcttcgtgtggagcggcacggctgaggcccgcaagcgcaaggccaagtcctgtatctgccatgtctgtggcgtccacctcaacaggctgcattcctgcctctactgtgtcttcttcggctgtttcacaaagaagcatattcacgagcatgcgaaggcgaagcggcacaacctggccattgatctgatgtacggaggcatctactgttttctgtgccaggactacatctatgacaaagacatggaaataatcgccaaggaggagcagcgaaaagcttggaaaatgcaaggcgttggagagaagttttcaacttgggaaccaaccaaacgggagcttgaactgctgaagcacaacccgaaaaggagaaagatcacctcgaactgcaccataggtctgcgtgggctgatcaaccttgggaacacatgcttcatgaactgcatcgtgcaggccctgacccacacgccacttctgcgggacttcttcctgtctgacaggcaccgctgtgagatgcagagccccagctcctgtctggtctgtgagatgtcctcactgtttcaggagacttattctggactcttctgtgtagttataaacccttacaagaatcttccaatttactctgagaatattattgaaatgtacagagggaagaagcgtcatgagatgcctccacacatctatgctatatctgaatctgcttacagatgcatgcttcaagatcgtgaggaccagtcaattctttgcacgggtgagtcaggtgctgggaagacagaaaatacaaagaaagttattcagtaccttgcccatgttgcttcttcacataaaggaagaaaggaccataatattcctggggaacttgaacggcagcttttgcaagcaaatccaattctggaatcatttggaaatgcgaagactgtgaaaaatgataactcatctcgttttggcaaatttattcggatcaactttgatgtaactggctatatcgttggggccaacattgaaacataccttctggaaaagtctcgtgctgttcgtcaagcaaaagatgaacgtacttttcatatcttttaccagttgttatctggagcaggagaacacctaaagtctgatttgcttcttgaaggatttaataactacaggtttctctccaatggctatattcctattccgggacagcaagacaaagataatttccaggagaccatggaagcaatgcacataatgggcttctcccatgaagagattctgtcaatgcttaaagtagtatcttcagtgctacagtttggaaatatttctttcaaaaaggagagaaatactgatcaagcttccatgccagaaaatacagttgcgcagaagctctgccatcttcttgggatgaatgtgatggagtttactcgggccatcctgactccccggatcaaggtcggccgagactatgtgcaaaaagcccagaccaaagaacaggcagattttgcagtagaagcattggcaaaagctacctatgagcggctctttcgctggctcgttcatcgcatcaataaagctctggataggaccaaacgtcagggagcatctttcattggaatcctggatattgctggatttgaaatttttgagctgaactcctttgaacaactttgcatcaactacaccaatgagaagctgcagcagctgttcaaccacaccatgtttatcctagaacaagaggaataccagcgcgaaggcatcgagtggaacttcatcgatttcgggctggatctgcagccatgcatcgacctaatagagagacctgcgaaccctcctggtgtactggcccttttggatgaagaatgctggttccctaaagccacagataaaacctttgttgaaaaactggttcaagagcaaggttcccactccaagtttcagaaacctcgacaattaaaagacaaagctgatttttgcattatacattatgcagggaaggtggactataaggcagatgagtggctgatgaagaatatggaccccctgaatgacaacgtggccacccttttgcaccagtcatcagacagatttgtggcagagctttggaaagatgtggaccgtatcgtgggtctggatcaagtcactggtatgactgagacagcttttggctccgcatataaaaccaagaagggcatgtttcgtaccgttgggcaactctacaaagaatctctcaccaagctgatggcaactctccgaaacaccaaccctaactttgttcgttgtatcattccaaatcacgagaagagggctggaaaattggatccacacctagtcctagatcagcttcgctgtaacggtgtcctggaagggatccgaatctgtcgccagggcttccctaaccgaatagttttccaggaattcagacagagatatgagatcctaactccaaatgctattcctaaaggttttatggatggtaaacaggcctgtgaacgaatgatccgggctttagaattggacccaaacttgtacagaattggacagagcaagatatttttcagagctggagttctggcacacttagaggaagaaagagatttaaaaatcaccgatatcattatcttcttccaggccgtttgcagaggttacctggccagaaaggcctttgccaagaagcagcagcaactaagtgccttaaaggtcttgcagcggaactgtgccgcgtacctgaaattacggcactggcagtggtggcgagtcttcacaaaggtgaagccgcttctacaagtgactcgccaggaggaagaacttcaggccaaagatgaagagctgttgaaggtgaaggagaagcagacgaaggtggaaggagagctggaggagatggagcggaagcaccagcagcttttagaagagaagaatatccttgcagaacaactacaagcagagactgagctctttgctgaagcagaagagatgagggcaagacttgctgctaaaaagcaggaattagaagagattctacatgacttggagtctagggttgaagaagaagaagaaagaaaccaaatcctccaaaatgaaaagaaaaaaatgcaagcacatattcaggacctggaagaacagctagacgaggaggaaggggctcggcaaaagctgcagctggaaaaggtgacagcagaggccaagatcaagaagatggaagaggagattctgcttctcgaggaccaaaattccaagttcatcaaagaaaagaaactcatggaagatcgcattgctgagtgttcctctcagctggctgaagaggaagaaaaggcgaaaaacttggccaaaatcaggaataagcaagaagtgatgatctcagatttagaagaacgcttaaagaaggaagaaaagactcgtcaggaactggaaaaggccaaaagaaaactcgacggggagacgaccgacctgcaggaccagatcgcagagctgcaggcgcagattgatgagctcaagctgcagctggccaagaaggaggaggagctgcagggcgcactggccagaggtgatgatgaaacactccataagaacaatgcccttaaagttgtgcgagagctacaagcccaaattgctgaacttcaggaagactttgaatccgagaaggcttcacggaacaaggccgaaaagcagaaaagggacttgagtgaggaactggaagctctgaaaacagagctggaggacacgctggacaccacggcagcccagcaggaactacgtacaaaacgtgaacaagaagtggcagagctgaagaaagctcttgaggaggaaactaagaaccatgaagctcaaatccaggacatgagacaaagacacgcaacagccctggaggagctctcagagcagctggaacaggccaagcggttcaaagcaaatctagagaagaacaagcagggcctggagacagataacaaggagctggcgtgtgaggtgaaggtcctgcagcaggtcaaggctgagtctgagcacaagaggaagaagctcgacgcgcaggtccaggagctccatgccaaggtctctgaaggcgacaggctcagggtggagctggcggagaaagcaagtaagctgcagaatgagctagataatgtctccacccttctggaagaagcagagaagaagggtattaaatttgctaaggatgcagctagtcttgagtctcaactacaggatacacaggagcttcttcaggaggagacacgccagaaactaaacctgagcagtcggatccggcagctggaagaggagaagaacagtcttcaggagcagcaggaggaggaggaggaggccaggaagaacctggagaagcaagtgctggccctgcagtcccagttggctgataccaagaagaaagtagatgacgacctgggaacaattgaaagtctggaagaagccaagaagaagcttctgaaggacgcggaggccctgagccagcgcctggaggagaaggcactggcgtatgacaaactggagaagaccaagaaccgcctgcagcaggagctggacgacctcacggtggacctggaccaccagcgccaggtcgcctccaacttggagaagaagcagaagaagtttgaccagctgttagcagaagagaagagcatctctgctcgctatgccgaagagcgggaccgggccgaagccgaggccagagagaaagaaaccaaagccctgtcactggcccgggccctcgaggaagccctggaggccaaggaggagtttgagaggcagaacaagcagctccgagcagacatggaagacctcatgagctccaaagatgatgtgggaaaaaacgttcacgaacttgaaaaatccaaacgggccctagagcagcaggtggaggaaatgaggacccagctggaggagctggaagacgaactccaggccacggaagatgccaagcttcgtctggaggtcaacatgcaggccatgaaggcgcagttcgagagagacctgcaaaccagggatgagcagaatgaagagaagaagcggctgctgatcaaacaggtgcgggagctcgaggcggagctggaggatgagaggaaacagcgggcgcttgctgtagcttcaaagaaaaagatggagatagacctgaaggacctcgaagcccaaatcgaggctgcgaacaaagctcgggatgaggtgattaagcagctccgcaagctccaggctcagatgaaggattaccaacgtgaattagaagaagctcgtgcatccagagatgagatttttgctcaatccaaagagagtgaaaagaaattgaagagtctggaagcagaaatccttcaattgcaggaggaacttgcctcatctgagcgagcccgccgacacgccgagcaggagagagatgagctggcggacgagatcaccaacagcgcctctggcaagtccgcgctgctggatgagaagcggcgtctggaagctcggatcgcacagctggaggaggagctggaagaggagcagagcaacatggagctgctcaacgaccgcttccgcaagaccactctacaggtggacacactgaacgccgagctagcagccgagcgcagcgccgcccagaagagtgacaatgcacgccagcaactggagcggcagaacaaggagctgaaggccaagctgcaggaactcgagggtgctgtcaagtctaagttcaaggccaccatctcagccctggaggccaagattgggcagctggaggagcagcttgagcaggaagccaaggaacgagcagccgccaacaaattagtccgtcgcactgagaagaagctgaaagaaatcttcatgcaggttgaggatgagcgtcgacacgcggaccagtataaagagcagatggagaaggccaacgctcggatgaagcagcttaaacgccagctggaggaagcagaagaagaagcgacgcgtgccaacgcatctcggcgtaaactccagcgggaactggatgatgccaccgaggccaacgagggcctgagccgcgaggtcagcaccctgaagaaccggctgaggcggggtggccccatcagcttctcttccagccgatctggccggcgccagctgcaccttgaaggagcttccctggagctctccgacgatgacacagaaagtaagaccagtgatgtcaacgagacgcagccaccccagtcagagtaaagttgcaggaagccagaggaggcaatacagtgggacagttaggaatgcacccggggcctcctgcagatttcggaaattggcaagctacgggattccttcctgaaagatcaactgtgtcttaaggctctccagcctatgcatactgtatcctgcttcagacttaggtacaattgctcccctttttatatatagacacacacaggacacatatattaaacagattgtttcatcattgcatctattttccatatagtcatcaagagaccattttataaaacatggtaagaccctttttaaaacaaactccaggcccttggttgcgggtcgctgggttattggggcagcgccgtggtcgtcactcagtcgctctgcatgctctctgtcatacagacaggtaacctagttctgtgttcacgtggcccccgactcctcagccacatcaagtctcctagaccactgtggactctaaactgcacttgtctctctcatttccttcaaataatgatcaatgctatttcagtgagcaaactgtgaaaggggctttggaaagagtaggaggggtgggctggatcggaagcaacacccatttggggttaccatgtccatcccccaaggggggccctgcccctcgagtcgatggtgtcccgcatctactcatgtgaactggccttggcgagggctggtctgtgcatagaagggatagtggccacactgcagctgaggccccaggtggcagccatggatcatgtagacttccagatggtctcccgaaccgcctggctctgccggcgccctcctcacgtcaggagcaagcagccgtggacccctaagccgagctggtggaaggcccctccccatcgccagccgggccctcatgctgaccttgcaaattcagccgctgctttgagcccaaaatgggaatattggttttgtgtccgaggcttgttccaagtttgtcaatgaggtttatggagcctccagaacagatgccatcttcctgaatgttgacatgccagtgggtgtgactccttcatttttccttctcccttccctttggacagtgttacagtgaacacttagcatcctgtttttggttggtagttaagcaaactgacattacggaaagtgccttagacactacagtactaagacaatgttgaatatatcattcgcctctataacaatttaatgtattcagttttgactgtgcttcatatcatgtacctctctagtcaaagtggtattacagacattcagtgacaatgaatcagtgttaattctaaatccttgatcctctgcaatgtgcttgaaaacacaaaccttttgggttaaaagctttaacatctattaggaagaatttgtcctgtgggtttggaatcttggattttccccctttatgaactgtactggctgttgaccaccagacacctgaccgcaaatatcttttcttgtattcccatatttctagacaatgatttttgtaagacaataaatttattcattatagatatttgcgcctgctctgtttacttgaagaaaaaagcacccgtggagaataaagagacctcaataaacaagaataatcatgtgaa

SEQ ID NO: 1166 - DNA, 7925 bp, Homo sapiens
atggcgccgggttggccctcactatcagcgggctcccgacaggaggcgccccagcttgcggccgggggcagcgcctaccaggcagttggcaggcagttccagccccgggccacggcactgcagggcccgagccaggccaagtcctgtatctgccatgtctgtggcgtccacctcaacaggctgcattcctgcctctactgtgtcttcttcggctgtttcacaaagaagcatattcacgagcatgcgaaggcgaagcggcacaacctggccattgatctgatgtacggaggcatctactgttttctgtgccaggactacatctatgacaaagacatggaaataatcgccaaggaggagcagcgaaaagcttggaaaatgcaaggcgttggagagaagttttcaacttgggaaccaaccaaacgggagcttgaactgctgaagcacaacccgaaaaggagaaagatcacctcgaactgcaccataggtctgcgtgggctgatcaaccttgggaacacatgcttcatgaactgcatcgtgcaggccctgacccacacgccacttctgcgggacttcttcctgtctgacaggcaccgctgtgagatgcagagccccagctcctgtctggtctgtgagatgtcctcactgtttcaggagacttattctggactcttctgtgtagttataaacccttacaagaatcttccaatttactctgagaatattattgaaatgtacagagggaagaagcgtcatgagatgcctccacacatctatgctatatctgaatctgcttacagatgcatgcttcaagatcgtgaggaccagtcaattctttgcacgggtgagtcaggtgctgggaagacagaaaatacaaagaaagttattcagtaccttgcccatgttgcttcttcacataaaggaagaaaggaccataatattcctcaggaatcgcctaaaccagtgaaacaccagggggaacttgaacggcagcttttgcaagcaaatccaattctggaatcatttggaaatgcgaagactgtgaaaaatgataactcatctcgttttggcaaatttattcggatcaactttgatgtaactggctatatcgttggggccaacattgaaacataccttctggaaaagtctcgtgctgttcgtcaagcaaaagatgaacgtacttttcatatcttttaccagttgttatctggagcaggagaacacctaaagtctgatttgcttcttgaaggatttaataactacaggtttctctccaatggctatattcctattccgggacagcaagacaaagataatttccaggagaccatggaagcaatgcacataatgggcttctcccatgaagagattctgtcaatgcttaaagtagtatcttcagtgctacagtttggaaatatttctttcaaaaaggagagaaatactgatcaagcttccatgccagaaaatacagttgcgcagaagctctgccatcttcttgggatgaatgtgatggagtttactcgggccatcctgactccccggatcaaggtcggccgagactatgtgcaaaaagcccagaccaaagaacaggcagattttgcagtagaagcattggcaaaagctacctatgagcggctctttcgctggctcgttcatcgcatcaataaagctctggataggaccaaacgtcagggagcatctttcattggaatcctggatattgctggatttgaaatttttgagctgaactcctttgaacaactttgcatcaactacaccaatgagaagctgcagcagctgttcaaccacaccatgtttatcctagaacaagaggaataccagcgcgaaggcatcgagtggaacttcatcgatttcgggctggatctgcagccatgcatcgacctaatagagagacctgcgaaccctcctggtgtactggcccttttggatgaagaatgctggttccctaaagccacagataaaacctttgttgaaaaactggttcaagagcaaggttcccactccaagtttcagaaacctcgacaattaaaagacaaagctgatttttgcattatacattatgcagggaaggtggactataaggcagatgagtggctgatgaagaatatggaccccctgaatgacaacgtggccacccttttgcaccagtcatcagacagatttgtggcagagctttggaaagatgagattcagaatattcagagagcttctttctatgacagtgtttctggtcttcatgagccaccagtggaccgtatcgtgggtctggatcaagtcactggtatgactgagacagcttttggctccgcatataaaaccaagaagggcatgtttcgtaccgttgggcaactctacaaagaatctctcaccaagctgatggcaactctccgaaacaccaaccctaactttgttcgttgtatcattccaaatcacgagaagagggctggaaaattggatccacacctagtcctagatcagcttcgctgtaacggtgtcctggaagggatccgaatctgtcgccagggcttccctaaccgaatagttttccaggaattcagacagagatatgagatcctaactccaaatgctattcctaaaggttttatggatggtaaacaggcctgtgaacgaatgatccgggctttagaattggacccaaacttgtacagaattggacagagcaagatatttttcagagctggagttctggcacacttagaggaagaaagagatttaaaaatcaccgatatcattatcttcttccaggccgtttgcagaggttacctggccagaaaggcctttgccaagaagcagcagcaactaagtgccttaaaggtcttgcagcggaactgtgccgcgtacctgaaattacggcactggcagtggtggcgagtcttcacaaaggtgaagccgcttctacaagtgactcgccaggaggaagaacttcaggccaaagatgaagagctgttgaaggtgaaggagaagcagacgaaggtggaaggagagctggaggagatggagcggaagcaccagcagcttttagaagagaagaatatccttgcagaacaactacaagcagagactgagctctttgctgaagcagaagagatgagggcaagacttgctgctaaaaagcaggaattagaagagattctacatgacttggagtctagggttgaagaagaagaagaaagaaaccaaatcctccaaaatgaaaagaaaaaaatgcaagcacatattcaggacctggaagaacagctagacgaggaggaaggggctcggcaaaagctgcagctggaaaaggtgacagcagaggccaagatcaagaagatggaagaggagattctgcttctcgaggaccaaaattccaagttcatcaaagaaaagaaactcatggaagatcgcattgctgagtgttcctctcagctggctgaagaggaagaaaaggcgaaaaacttggccaaaatcaggaataagcaagaagtgatgatctcagatttagaagaacgcttaaagaaggaagaaaagactcgtcaggaactggaaaaggccaaaagaaaactcgacggggagacgaccgacctgcaggaccagatcgcagagctgcaggcgcagattgatgagctcaagctgcagctggccaagaaggaggaggagctgcagggcgcactggccagaggtgatgatgaaacactccataagaacaatgcccttaaagttgtgcgagagctacaagcccaaattgctgaacttcaggaagactttgaatccgagaaggcttcacggaacaaggccgaaaagcagaaaagggacttgagtgaggaactggaagctctgaaaacagagctggaggacacgctggacaccacggcagcccagcaggaactacgtacaaaacgtgaacaagaagtggcagagctgaagaaagctcttgaggaggaaactaagaaccatgaagctcaaatccaggacatgagacaaagacacgcaacagccctggaggagctctcagagcagctggaacaggccaagcggttcaaagcaaatctagagaagaacaagcagggcctggagacagataacaaggagctggcgtgtgaggtgaaggtcctgcagcaggtcaaggctgagtctgagcacaagaggaagaagctcgacgcgcaggtccaggagctccatgccaaggtctctgaaggcgacaggctcagggtggagctggcggagaaagcaagtaagctgcagaatgagctagataatgtctccacccttctggaagaagcagagaagaagggtattaaatttgctaaggatgcagctagtcttgagtctcaactacaggatacacaggagcttcttcaggaggagacacgccagaaactaaacctgagcagtcggatccggcagctggaagaggagaagaacagtcttcaggagcagcaggaggaggaggaggaggccaggaagaacctggagaagcaagtgctggccctgcagtcccagttggctgataccaagaagaaagtagatgacgacctgggaacaattgaaagtctggaagaagccaagaagaagcttctgaaggacgcggaggccctgagccagcgcctggaggagaaggcactggcgtatgacaaactggagaagaccaagaaccgcctgcagcaggagctggacgacctcacggtggacctggaccaccagcgccaggtcgcctccaacttggagaagaagcagaagaagtttgaccagctgttagcagaagagaagagcatctctgctcgctatgccgaagagcgggaccgggccgaagccgaggccagagagaaagaaaccaaagccctgtcactggcccgggccctcgaggaagccctggaggccaaggaggagtttgagaggcagaacaagcagctccgagcagacatggaagacctcatgagctccaaagatgatgtgggaaaaaacgttcacgaacttgaaaaatccaaacgggccctagagcagcaggtggaggaaatgaggacccagctggaggagctggaagacgaactccaggccacggaagatgccaagcttcgtctggaggtcaacatgcaggccatgaaggcgcagttcgagagagacctgcaaaccagggatgagcagaatgaagagaagaagcggctgctgatcaaacaggtgcgggagctcgaggcggagctggaggatgagaggaaacagcgggcgcttgctgtagcttcaaagaaaaagatggagatagacctgaaggacctcgaagcccaaatcgaggctgcgaacaaagctcgggatgaggtgattaagcagctccgcaagctccaggctcagatgaaggattaccaacgtgaattagaagaagctcgtgcatccagagatgagatttttgctcaatccaaagagagtgaaaagaaattgaagagtctggaagcagaaatccttcaattgcaggaggaacttgcctcatctgagcgagcccgccgacacgccgagcaggagagagatgagctggcggacgagatcaccaacagcgcctctggcaagtccgcgctgctggatgagaagcggcgtctggaagctcggatcgcacagctggaggaggagctggaagaggagcagagcaacatggagctgctcaacgaccgcttccgcaagaccactctacaggtggacacactgaacgccgagctagcagccgagcgcagcgccgcccagaagagtgacaatgcacgccagcaactggagcggcagaacaaggagctgaaggccaagctgcaggaactcgagggtgctgtcaagtctaagttcaaggccaccatctcagccctggaggccaagattgggcagctggaggagcagcttgagcaggaagccaaggaacgagcagccgccaacaaattagtccgtcgcactgagaagaagctgaaagaaatcttcatgcaggttgaggatgagcgtcgacacgcggaccagtataaagagcagatggagaaggccaacgctcggatgaagcagcttaaacgccagctggaggaagcagaagaagaagcgacgcgtgccaacgcatctcggcgtaaactccagcgggaactggatgatgccaccgaggccaacgagggcctgagccgcgaggtcagcaccctgaagaaccggctgaggcggggtggccccatcagcttctcttccagccgatctggccggcgccagctgcaccttgaaggagcttccctggagctctccgacgatgacacagaaagtaagaccagtgatgtcaacgagacgcagccaccccagtcagagtaaagttgcaggaagccagaggaggcaatacagtgggacagttaggaatgcacccggggcctcctgcagatttcggaaattggcaagctacgggattccttcctgaaagatcaactgtgtcttaaggctctccagcctatgcatactgtatcctgcttcagacttaggtacaattgctcccctttttatatatagacacacacaggacacatatattaaacagattgtttcatcattgcatctattttccatatagtcatcaagagaccattttataaaacatggtaagaccctttttaaaacaaactccaggcccttggttgcgggtcgctgggttattggggcagcgccgtggtcgtcactcagtcgctctgcatgctctctgtcatacagacaggtaacctagttctgtgttcacgtggcccccgactcctcagccacatcaagtctcctagaccactgtggactctaaactgcacttgtctctctcatttccttcaaataatgatcaatgctatttcagtgagcaaactgtgaaaggggctttggaaagagtaggaggggtgggctggatcggaagcaacacccatttggggttaccatgtccatcccccaaggggggccctgcccctcgagtcgatggtgtcccgcatctactcatgtgaactggccttggcgagggctggtctgtgcatagaagggatagtggccacactgcagctgaggccccaggtggcagccatggatcatgtagacttccagatggtctcccgaaccgcctggctctgccggcgccctcctcacgtcaggagcaagcagccgtggacccctaagccgagctggtggaaggcccctccccatcgccagccgggccctcatgctgaccttgcaaattcagccgctgctttgagcccaaaatgggaatattggttttgtgtccgaggcttgttccaagtttgtcaatgaggtttatggagcctccagaacagatgccatcttcctgaatgttgacatgccagtgggtgtgactccttcatttttccttctcccttccctttggacagtgttacagtgaacacttagcatcctgtttttggttggtagttaagcaaactgacattacggaaagtgccttagacactacagtactaagacaatgttgaatatatcattcgcctctataacaatttaatgtattcagttttgactgtgcttcatatcatgtacctctctagtcaaagtggtattacagacattcagtgacaatgaatcagtgttaattctaaatccttgatcctctgcaatgtgcttgaaaacacaaaccttttgggttaaaagctttaacatctattaggaagaatttgtcctgtgggtttggaatcttggattttccccctttatgaactgtactggctgttgaccaccagacacctgaccgcaaatatcttttcttgtattcccatatttctagacaatgatttttgtaagacaataaatttattcattatagatatttgcgcctgctctgtttacttgaagaaaaaagcacccgtggagaataaagagacctcaataaacaagaataatcatgtgaa

SEQ ID NO: 1167 - DNA, 8230 bp, Homo sapiens
atggcgccgggttggccctcactatcagcgggctcccgacaggaggcgccccagcttgcggccgggggcagcgcctaccaggcagttggcaggcagttccagccccgggccacggcactgcagggcccgagccaggttacggcaaccgggggccctgcaaacagctcccgattagggggtgcttttgggtgggaaagcgcaggccctggatggaggcccgacctgcggcgctccagctcatcgccccgcctctttgcggcagagctcaggccggcgcaaaccggttcagtgctaggactgacgtctcgcgccgcccaaccgcagcacgcccccgcctccccagtcctctggaagagacagggaacgtctagccgccagggtcccgggaggcggctctgtaccagacggactatactgagagcctatgacaatagccgaaggccaagtcctgtatctgccatgtctgtggcgtccacctcaacaggctgcattcctgcctctactgtgtcttcttcggctgtttcacaaagaagcatattcacgagcatgcgaaggcgaagcggcacaacctggccattgatctgatgtacggaggcatctactgttttctgtgccaggactacatctatgacaaagacatggaaataatcgccaaggaggagcagcgaaaagcttggaaaatgcaaggcgttggagagaagttttcaacttgggaaccaaccaaacgggagcttgaactgctgaagcacaacccgaaaaggagaaagatcacctcgaactgcaccataggtctgcgtgggctgatcaaccttgggaacacatgcttcatgaactgcatcgtgcaggccctgacccacacgccacttctgcgggacttcttcctgtctgacaggcaccgctgtgagatgcagagccccagctcctgtctggtctgtgagatgtcctcactgtttcaggagacttattctggactcttctgtgtagttataaacccttacaagaatcttccaatttactctgagaatattattgaaatgtacagagggaagaagcgtcatgagatgcctccacacatctatgctatatctgaatctgcttacagatgcatgcttcaagatcgtgaggaccagtcaattctttgcacgggtgagtcaggtgctgggaagacagaaaatacaaagaaagttattcagtaccttgcccatgttgcttcttcacataaaggaagaaaggaccataatattcctcaggaatcgcctaaaccagtgaaacaccagggggaacttgaacggcagcttttgcaagcaaatccaattctggaatcatttggaaatgcgaagactgtgaaaaatgataactcatctcgttttggcaaatttattcggatcaactttgatgtaactggctatatcgttggggccaacattgaaacataccttctggaaaagtctcgtgctgttcgtcaagcaaaagatgaacgtacttttcatatcttttaccagttgttatctggagcaggagaacacctaaagtctgatttgcttcttgaaggatttaataactacaggtttctctccaatggctatattcctattccgggacagcaagacaaagataatttccaggagaccatggaagcaatgcacataatgggcttctcccatgaagagattctgtcaatgcttaaagtagtatcttcagtgctacagtttggaaatatttctttcaaaaaggagagaaatactgatcaagcttccatgccagaaaatacagttgcgcagaagctctgccatcttcttgggatgaatgtgatggagtttactcgggccatcctgactccccggatcaaggtcggccgagactatgtgcaaaaagcccagaccaaagaacaggcagattttgcagtagaagcattggcaaaagctacctatgagcggctctttcgctggctcgttcatcgcatcaataaagctctggataggaccaaacgtcagggagcatctttcattggaatcctggatattgctggatttgaaatttttgagctgaactcctttgaacaactttgcatcaactacaccaatgagaagctgcagcagctgttcaaccacaccatgtttatcctagaacaagaggaataccagcgcgaaggcatcgagtggaacttcatcgatttcgggctggatctgcagccatgcatcgacctaatagagagacctgcgaaccctcctggtgtactggcccttttggatgaagaatgctggttccctaaagccacagataaaacctttgttgaaaaactggttcaagagcaaggttcccactccaagtttcagaaacctcgacaattaaaagacaaagctgatttttgcattatacattatgcagggaaggtggactataaggcagatgagtggctgatgaagaatatggaccccctgaatgacaacgtggccacccttttgcaccagtcatcagacagatttgtggcagagctttggaaagatgagattcagaatattcagagagcttctttctatgacagtgtttctggtcttcatgagccaccagtggaccgtatcgtgggtctggatcaagtcactggtatgactgagacagcttttggctccgcatataaaaccaagaagggcatgtttcgtaccgttgggcaactctacaaagaatctctcaccaagctgatggcaactctccgaaacaccaaccctaactttgttcgttgtatcattccaaatcacgagaagagggctggaaaattggatccacacctagtcctagatcagcttcgctgtaacggtgtcctggaagggatccgaatctgtcgccagggcttccctaaccgaatagttttccaggaattcagacagagatatgagatcctaactccaaatgctattcctaaaggttttatggatggtaaacaggcctgtgaacgaatgatccgggctttagaattggacccaaacttgtacagaattggacagagcaagatatttttcagagctggagttctggcacacttagaggaagaaagagatttaaaaatcaccgatatcattatcttcttccaggccgtttgcagaggttacctggccagaaaggcctttgccaagaagcagcagcaactaagtgccttaaaggtcttgcagcggaactgtgccgcgtacctgaaattacggcactggcagtggtggcgagtcttcacaaaggtgaagccgcttctacaagtgactcgccaggaggaagaacttcaggccaaagatgaagagctgttgaaggtgaaggagaagcagacgaaggtggaaggagagctggaggagatggagcggaagcaccagcagcttttagaagagaagaatatccttgcagaacaactacaagcagagactgagctctttgctgaagcagaagagatgagggcaagacttgctgctaaaaagcaggaattagaagagattctacatgacttggagtctagggttgaagaagaagaagaaagaaaccaaatcctccaaaatgaaaagaaaaaaatgcaagcacatattcaggacctggaagaacagctagacgaggaggaaggggctcggcaaaagctgcagctggaaaaggtgacagcagaggccaagatcaagaagatggaagaggagattctgcttctcgaggaccaaaattccaagttcatcaaagaaaagaaactcatggaagatcgcattgctgagtgttcctctcagctggctgaagaggaagaaaaggcgaaaaacttggccaaaatcaggaataagcaagaagtgatgatctcagatttagaagaacgcttaaagaaggaagaaaagactcgtcaggaactggaaaaggccaaaagaaaactcgacggggagacgaccgacctgcaggaccagatcgcagagctgcaggcgcagattgatgagctcaagctgcagctggccaagaaggaggaggagctgcagggcgcactggccagaggtgatgatgaaacactccataagaacaatgcccttaaagttgtgcgagagctacaagcccaaattgctgaacttcaggaagactttgaatccgagaaggcttcacggaacaaggccgaaaagcagaaaagggacttgagtgaggaactggaagctctgaaaacagagctggaggacacgctggacaccacggcagcccagcaggaactacgtacaaaacgtgaacaagaagtggcagagctgaagaaagctcttgaggaggaaactaagaaccatgaagctcaaatccaggacatgagacaaagacacgcaacagccctggaggagctctcagagcagctggaacaggccaagcggttcaaagcaaatctagagaagaacaagcagggcctggagacagataacaaggagctggcgtgtgaggtgaaggtcctgcagcaggtcaaggctgagtctgagcacaagaggaagaagctcgacgcgcaggtccaggagctccatgccaaggtctctgaaggcgacaggctcagggtggagctggcggagaaagcaagtaagctgcagaatgagctagataatgtctccacccttctggaagaagcagagaagaagggtattaaatttgctaaggatgcagctagtcttgagtctcaactacaggatacacaggagcttcttcaggaggagacacgccagaaactaaacctgagcagtcggatccggcagctggaagaggagaagaacagtcttcaggagcagcaggaggaggaggaggaggccaggaagaacctggagaagcaagtgctggccctgcagtcccagttggctgataccaagaagaaagtagatgacgacctgggaacaattgaaagtctggaagaagccaagaagaagcttctgaaggacgcggaggccctgagccagcgcctggaggagaaggcactggcgtatgacaaactggagaagaccaagaaccgcctgcagcaggagctggacgacctcacggtggacctggaccaccagcgccaggtcgcctccaacttggagaagaagcagaagaagtttgaccagctgttagcagaagagaagagcatctctgctcgctatgccgaagagcgggaccgggccgaagccgaggccagagagaaagaaaccaaagccctgtcactggcccgggccctcgaggaagccctggaggccaaggaggagtttgagaggcagaacaagcagctccgagcagacatggaagacctcatgagctccaaagatgatgtgggaaaaaacgttcacgaacttgaaaaatccaaacgggccctagagcagcaggtggaggaaatgaggacccagctggaggagctggaagacgaactccaggccacggaagatgccaagcttcgtctggaggtcaacatgcaggccatgaaggcgcagttcgagagagacctgcaaaccagggatgagcagaatgaagagaagaagcggctgctgatcaaacaggtgcgggagctcgaggcggagctggaggatgagaggaaacagcgggcgcttgctgtagcttcaaagaaaaagatggagatagacctgaaggacctcgaagcccaaatcgaggctgcgaacaaagctcgggatgaggtgattaagcagctccgcaagctccaggctcagatgaaggattaccaacgtgaattagaagaagctcgtgcatccagagatgagatttttgctcaatccaaagagagtgaaaagaaattgaagagtctggaagcagaaatccttcaattgcaggaggaacttgcctcatctgagcgagcccgccgacacgccgagcaggagagagatgagctggcggacgagatcaccaacagcgcctctggcaagtccgcgctgctggatgagaagcggcgtctggaagctcggatcgcacagctggaggaggagctggaagaggagcagagcaacatggagctgctcaacgaccgcttccgcaagaccactctacaggtggacacactgaacgccgagctagcagccgagcgcagcgccgcccagaagagtgacaatgcacgccagcaactggagcggcagaacaaggagctgaaggccaagctgcaggaactcgagggtgctgtcaagtctaagttcaaggccaccatctcagccctggaggccaagattgggcagctggaggagcagcttgagcaggaagccaaggaacgagcagccgccaacaaattagtccgtcgcactgagaagaagctgaaagaaatcttcatgcaggttgaggatgagcgtcgacacgcggaccagtataaagagcagatggagaaggccaacgctcggatgaagcagcttaaacgccagctggaggaagcagaagaagaagcgacgcgtgccaacgcatctcggcgtaaactccagcgggaactggatgatgccaccgaggccaacgagggcctgagccgcgaggtcagcaccctgaagaaccggctgaggcggggtggccccatcagcttctcttccagccgatctggccggcgccagctgcaccttgaaggagcttccctggagctctccgacgatgacacagaaagtaagaccagtgatgtcaacgagacgcagccaccccagtcagagtaaagttgcaggaagccagaggaggcaatacagtgggacagttaggaatgcacccggggcctcctgcagatttcggaaattggcaagctacgggattccttcctgaaagatcaactgtgtcttaaggctctccagcctatgcatactgtatcctgcttcagacttaggtacaattgctcccctttttatatatagacacacacaggacacatatattaaacagattgtttcatcattgcatctattttccatatagtcatcaagagaccattttataaaacatggtaagaccctttttaaaacaaactccaggcccttggttgcgggtcgctgggttattggggcagcgccgtggtcgtcactcagtcgctctgcatgctctctgtcatacagacaggtaacctagttctgtgttcacgtggcccccgactcctcagccacatcaagtctcctagaccactgtggactctaaactgcacttgtctctctcatttccttcaaataatgatcaatgctatttcagtgagcaaactgtgaaaggggctttggaaagagtaggaggggtgggctggatcggaagcaacacccatttggggttaccatgtccatcccccaaggggggccctgcccctcgagtcgatggtgtcccgcatctactcatgtgaactggccttggcgagggctggtctgtgcatagaagggatagtggccacactgcagctgaggccccaggtggcagccatggatcatgtagacttccagatggtctcccgaaccgcctggctctgccggcgccctcctcacgtcaggagcaagcagccgtggacccctaagccgagctggtggaaggcccctccccatcgccagccgggccctcatgctgaccttgcaaattcagccgctgctttgagcccaaaatgggaatattggttttgtgtccgaggcttgttccaagtttgtcaatgaggtttatggagcctccagaacagatgccatcttcctgaatgttgacatgccagtgggtgtgactccttcatttttccttctcccttccctttggacagtgttacagtgaacacttagcatcctgtttttggttggtagttaagcaaactgacattacggaaagtgccttagacactacagtactaagacaatgttgaatatatcattcgcctctataacaatttaatgtattcagttttgactgtgcttcatatcatgtacctctctagtcaaagtggtattacagacattcagtgacaatgaatcagtgttaattctaaatccttgatcctctgcaatgtgcttgaaaacacaaaccttttgggttaaaagctttaacatctattaggaagaatttgtcctgtgggtttggaatcttggattttccccctttatgaactgtactggctgttgaccaccagacacctgaccgcaaatatcttttcttgtattcccatatttctagacaatgatttttgtaagacaataaatttattcattatagatatttgcgcctgctctgtttacttgaagaaaaaagcacccgtggagaataaagagacctcaataaacaagaataatcatgtgaa

SEQ ID NO: 1168 - DNA, 8137 bp, Homo sapiens
atggcgccgggttggccctcactatcagcgggctcccgacaggaggcgccccagcttgcggccgggggcagcgcctaccaggcagttggcaggcagttccagccccgggccacggcactgcagggcccgagccaggttacggcaaccgggggccctgcaaacagctcccgattagggggtgcttttgggtgggaaagcgcaggccctggatggaggcccgacctgcggcgctccagctcatcgccccgcctctttgcggcagagctcaggccggcgcaaaccggttcagtgctaggactgacgtctcgcgccgcccaaccgcagcacgcccccgcctccccagtcctctggaagagacagggaacgtctagccgccagggtcccgggaggcggctctgtaccagacggactatactgagagcctatgacaatagccgaaggccaagtcctgtatctgccatgtctgtggcgtccacctcaacaggctgcattcctgcctctactgtgtcttcttcggctgtttcacaaagaagcatattcacgagcatgcgaaggcgaagcggcacaacctggccattgatctgatgtacggaggcatctactgttttctgtgccaggactacatctatgacaaagacatggaaataatcgccaaggaggagcagcgaaaagcttggaaaatgcaaggcgttggagagaagttttcaacttgggaaccaaccaaacgggagcttgaactgctgaagcacaacccgaaaaggagaaagatcacctcgaactgcaccataggtctgcgtgggctgatcaaccttgggaacacatgcttcatgaactgcatcgtgcaggccctgacccacacgccacttctgcgggacttcttcctgtctgacaggcaccgctgtgagatgcagagccccagctcctgtctggtctgtgagatgtcctcactgtttcaggagacttattctggactcttctgtgtagttataaacccttacaagaatcttccaatttactctgagaatattattgaaatgtacagagggaagaagcgtcatgagatgcctccacacatctatgctatatctgaatctgcttacagatgcatgcttcaagatcgtgaggaccagtcaattctttgcacgggtgagtcaggtgctgggaagacagaaaatacaaagaaagttattcagtaccttgcccatgttgcttcttcacataaaggaagaaaggaccataatattcctggggaacttgaacggcagcttttgcaagcaaatccaattctggaatcatttggaaatgcgaagactgtgaaaaatgataactcatctcgttttggcaaatttattcggatcaactttgatgtaactggctatatcgttggggccaacattgaaacataccttctggaaaagtctcgtgctgttcgtcaagcaaaagatgaacgtacttttcatatcttttaccagttgttatctggagcaggagaacacctaaagtctgatttgcttcttgaaggatttaataactacaggtttctctccaatggctatattcctattccgggacagcaagacaaagataatttccaggagaccatggaagcaatgcacataatgggcttctcccatgaagagattctgtcaatgcttaaagtagtatcttcagtgctacagtttggaaatatttctttcaaaaaggagagaaatactgatcaagcttccatgccagaaaatacagttgcgcagaagctctgccatcttcttgggatgaatgtgatggagtttactcgggccatcctgactccccggatcaaggtcggccgagactatgtgcaaaaagcccagaccaaagaacaggcagattttgcagtagaagcattggcaaaagctacctatgagcggctctttcgctggctcgttcatcgcatcaataaagctctggataggaccaaacgtcagggagcatctttcattggaatcctggatattgctggatttgaaatttttgagctgaactcctttgaacaactttgcatcaactacaccaatgagaagctgcagcagctgttcaaccacaccatgtttatcctagaacaagaggaataccagcgcgaaggcatcgagtggaacttcatcgatttcgggctggatctgcagccatgcatcgacctaatagagagacctgcgaaccctcctggtgtactggcccttttggatgaagaatgctggttccctaaagccacagataaaacctttgttgaaaaactggttcaagagcaaggttcccactccaagtttcagaaacctcgacaattaaaagacaaagctgatttttgcattatacattatgcagggaaggtggactataaggcagatgagtggctgatgaagaatatggaccccctgaatgacaacgtggccacccttttgcaccagtcatcagacagatttgtggcagagctttggaaagatgtggaccgtatcgtgggtctggatcaagtcactggtatgactgagacagcttttggctccgcatataaaaccaagaagggcatgtttcgtaccgttgggcaactctacaaagaatctctcaccaagctgatggcaactctccgaaacaccaaccctaactttgttcgttgtatcattccaaatcacgagaagagggctggaaaattggatccacacctagtcctagatcagcttcgctgtaacggtgtcctggaagggatccgaatctgtcgccagggcttccctaaccgaatagttttccaggaattcagacagagatatgagatcctaactccaaatgctattcctaaaggttttatggatggtaaacaggcctgtgaacgaatgatccgggctttagaattggacccaaacttgtacagaattggacagagcaagatatttttcagagctggagttctggcacacttagaggaagaaagagatttaaaaatcaccgatatcattatcttcttccaggccgtttgcagaggttacctggccagaaaggcctttgccaagaagcagcagcaactaagtgccttaaaggtcttgcagcggaactgtgccgcgtacctgaaattacggcactggcagtggtggcgagtcttcacaaaggtgaagccgcttctacaagtgactcgccaggaggaagaacttcaggccaaagatgaagagctgttgaaggtgaaggagaagcagacgaaggtggaaggagagctggaggagatggagcggaagcaccagcagcttttagaagagaagaatatccttgcagaacaactacaagcagagactgagctctttgctgaagcagaagagatgagggcaagacttgctgctaaaaagcaggaattagaagagattctacatgacttggagtctagggttgaagaagaagaagaaagaaaccaaatcctccaaaatgaaaagaaaaaaatgcaagcacatattcaggacctggaagaacagctagacgaggaggaaggggctcggcaaaagctgcagctggaaaaggtgacagcagaggccaagatcaagaagatggaagaggagattctgcttctcgaggaccaaaattccaagttcatcaaagaaaagaaactcatggaagatcgcattgctgagtgttcctctcagctggctgaagaggaagaaaaggcgaaaaacttggccaaaatcaggaataagcaagaagtgatgatctcagatttagaagaacgcttaaagaaggaagaaaagactcgtcaggaactggaaaaggccaaaagaaaactcgacggggagacgaccgacctgcaggaccagatcgcagagctgcaggcgcagattgatgagctcaagctgcagctggccaagaaggaggaggagctgcagggcgcactggccagaggtgatgatgaaacactccataagaacaatgcccttaaagttgtgcgagagctacaagcccaaattgctgaacttcaggaagactttgaatccgagaaggcttcacggaacaaggccgaaaagcagaaaagggacttgagtgaggaactggaagctctgaaaacagagctggaggacacgctggacaccacggcagcccagcaggaactacgtacaaaacgtgaacaagaagtggcagagctgaagaaagctcttgaggaggaaactaagaaccatgaagctcaaatccaggacatgagacaaagacacgcaacagccctggaggagctctcagagcagctggaacaggccaagcggttcaaagcaaatctagagaagaacaagcagggcctggagacagataacaaggagctggcgtgtgaggtgaaggtcctgcagcaggtcaaggctgagtctgagcacaagaggaagaagctcgacgcgcaggtccaggagctccatgccaaggtctctgaaggcgacaggctcagggtggagctggcggagaaagcaagtaagctgcagaatgagctagataatgtctccacccttctggaagaagcagagaagaagggtattaaatttgctaaggatgcagctagtcttgagtctcaactacaggatacacaggagcttcttcaggaggagacacgccagaaactaaacctgagcagtcggatccggcagctggaagaggagaagaacagtcttcaggagcagcaggaggaggaggaggaggccaggaagaacctggagaagcaagtgctggccctgcagtcccagttggctgataccaagaagaaagtagatgacgacctgggaacaattgaaagtctggaagaagccaagaagaagcttctgaaggacgcggaggccctgagccagcgcctggaggagaaggcactggcgtatgacaaactggagaagaccaagaaccgcctgcagcaggagctggacgacctcacggtggacctggaccaccagcgccaggtcgcctccaacttggagaagaagcagaagaagtttgaccagctgttagcagaagagaagagcatctctgctcgctatgccgaagagcgggaccgggccgaagccgaggccagagagaaagaaaccaaagccctgtcactggcccgggccctcgaggaagccctggaggccaaggaggagtttgagaggcagaacaagcagctccgagcagacatggaagacctcatgagctccaaagatgatgtgggaaaaaacgttcacgaacttgaaaaatccaaacgggccctagagcagcaggtggaggaaatgaggacccagctggaggagctggaagacgaactccaggccacggaagatgccaagcttcgtctggaggtcaacatgcaggccatgaaggcgcagttcgagagagacctgcaaaccagggatgagcagaatgaagagaagaagcggctgctgatcaaacaggtgcgggagctcgaggcggagctggaggatgagaggaaacagcgggcgcttgctgtagcttcaaagaaaaagatggagatagacctgaaggacctcgaagcccaaatcgaggctgcgaacaaagctcgggatgaggtgattaagcagctccgcaagctccaggctcagatgaaggattaccaacgtgaattagaagaagctcgtgcatccagagatgagatttttgctcaatccaaagagagtgaaaagaaattgaagagtctggaagcagaaatccttcaattgcaggaggaacttgcctcatctgagcgagcccgccgacacgccgagcaggagagagatgagctggcggacgagatcaccaacagcgcctctggcaagtccgcgctgctggatgagaagcggcgtctggaagctcggatcgcacagctggaggaggagctggaagaggagcagagcaacatggagctgctcaacgaccgcttccgcaagaccactctacaggtggacacactgaacgccgagctagcagccgagcgcagcgccgcccagaagagtgacaatgcacgccagcaactggagcggcagaacaaggagctgaaggccaagctgcaggaactcgagggtgctgtcaagtctaagttcaaggccaccatctcagccctggaggccaagattgggcagctggaggagcagcttgagcaggaagccaaggaacgagcagccgccaacaaattagtccgtcgcactgagaagaagctgaaagaaatcttcatgcaggttgaggatgagcgtcgacacgcggaccagtataaagagcagatggagaaggccaacgctcggatgaagcagcttaaacgccagctggaggaagcagaagaagaagcgacgcgtgccaacgcatctcggcgtaaactccagcgggaactggatgatgccaccgaggccaacgagggcctgagccgcgaggtcagcaccctgaagaaccggctgaggcggggtggccccatcagcttctcttccagccgatctggccggcgccagctgcaccttgaaggagcttccctggagctctccgacgatgacacagaaagtaagaccagtgatgtcaacgagacgcagccaccccagtcagagtaaagttgcaggaagccagaggaggcaatacagtgggacagttaggaatgcacccggggcctcctgcagatttcggaaattggcaagctacgggattccttcctgaaagatcaactgtgtcttaaggctctccagcctatgcatactgtatcctgcttcagacttaggtacaattgctcccctttttatatatagacacacacaggacacatatattaaacagattgtttcatcattgcatctattttccatatagtcatcaagagaccattttataaaacatggtaagaccctttttaaaacaaactccaggcccttggttgcgggtcgctgggttattggggcagcgccgtggtcgtcactcagtcgctctgcatgctctctgtcatacagacaggtaacctagttctgtgttcacgtggcccccgactcctcagccacatcaagtctcctagaccactgtggactctaaactgcacttgtctctctcatttccttcaaataatgatcaatgctatttcagtgagcaaactgtgaaaggggctttggaaagagtaggaggggtgggctggatcggaagcaacacccatttggggttaccatgtccatcccccaaggggggccctgcccctcgagtcgatggtgtcccgcatctactcatgtgaactggccttggcgagggctggtctgtgcatagaagggatagtggccacactgcagctgaggccccaggtggcagccatggatcatgtagacttccagatggtctcccgaaccgcctggctctgccggcgccctcctcacgtcaggagcaagcagccgtggacccctaagccgagctggtggaaggcccctccccatcgccagccgggccctcatgctgaccttgcaaattcagccgctgctttgagcccaaaatgggaatattggttttgtgtccgaggcttgttccaagtttgtcaatgaggtttatggagcctccagaacagatgccatcttcctgaatgttgacatgccagtgggtgtgactccttcatttttccttctcccttccctttggacagtgttacagtgaacacttagcatcctgtttttggttggtagttaagcaaactgacattacggaaagtgccttagacactacagtactaagacaatgttgaatatatcattcgcctctataacaatttaatgtattcagttttgactgtgcttcatatcatgtacctctctagtcaaagtggtattacagacattcagtgacaatgaatcagtgttaattctaaatccttgatcctctgcaatgtgcttgaaaacacaaaccttttgggttaaaagctttaacatctattaggaagaatttgtcctgtgggtttggaatcttggattttccccctttatgaactgtactggctgttgaccaccagacacctgaccgcaaatatcttttcttgtattcccatatttctagacaatgatttttgtaagacaataaatttattcattatagatatttgcgcctgctctgtttacttgaagaaaaaagcacccgtggagaataaagagacctcaataaacaagaataatcatgtgaa

SEQ ID NO: 1169 - DNA, 8164 bp, Homo sapiens
atggcgccgggttggccctcactatcagcgggctcccgacaggaggcgccccagcttgcggccgggggcagcgcctaccaggcagttggcaggcagttccagccccgggccacggcactgcagggcccgagccaggttacggcaaccgggggccctgcaaacagctcccgattagggggtgcttttgggtgggaaagcgcaggccctggatggaggcccgacctgcggcgctccagctcatcgccccgcctctttgcggcagagctcaggccggcgcaaaccggttcagtgctaggactgacgtctcgcgccgcccaaccgcagcacgcccccgcctccccagtcctctggaagagacagggaacgtctagccgccagggtcccgggaggcggctctgtaccagacggactatactgagagcctatgacaatagccgaaggccaagtcctgtatctgccatgtctgtggcgtccacctcaacaggctgcattcctgcctctactgtgtcttcttcggctgtttcacaaagaagcatattcacgagcatgcgaaggcgaagcggcacaacctggccattgatctgatgtacggaggcatctactgttttctgtgccaggactacatctatgacaaagacatggaaataatcgccaaggaggagcagcgaaaagcttggaaaatgcaaggcgttggagagaagttttcaacttgggaaccaaccaaacgggagcttgaactgctgaagcacaacccgaaaaggagaaagatcacctcgaactgcaccataggtctgcgtgggctgatcaaccttgggaacacatgcttcatgaactgcatcgtgcaggccctgacccacacgccacttctgcgggacttcttcctgtctgacaggcaccgctgtgagatgcagagccccagctcctgtctggtctgtgagatgtcctcactgtttcaggagacttattctggactcttctgtgtagttataaacccttacaagaatcttccaatttactctgagaatattattgaaatgtacagagggaagaagcgtcatgagatgcctccacacatctatgctatatctgaatctgcttacagatgcatgcttcaagatcgtgaggaccagtcaattctttgcacgggtgagtcaggtgctgggaagacagaaaatacaaagaaagttattcagtaccttgcccatgttgcttcttcacataaaggaagaaaggaccataatattcctgaatcgcctaaaccagtgaaacaccagggggaacttgaacggcagcttttgcaagcaaatccaattctggaatcatttggaaatgcgaagactgtgaaaaatgataactcatctcgttttggcaaatttattcggatcaactttgatgtaactggctatatcgttggggccaacattgaaacataccttctggaaaagtctcgtgctgttcgtcaagcaaaagatgaacgtacttttcatatcttttaccagttgttatctggagcaggagaacacctaaagtctgatttgcttcttgaaggatttaataactacaggtttctctccaatggctatattcctattccgggacagcaagacaaagataatttccaggagaccatggaagcaatgcacataatgggcttctcccatgaagagattctgtcaatgcttaaagtagtatcttcagtgctacagtttggaaatatttctttcaaaaaggagagaaatactgatcaagcttccatgccagaaaatacagttgcgcagaagctctgccatcttcttgggatgaatgtgatggagtttactcgggccatcctgactccccggatcaaggtcggccgagactatgtgcaaaaagcccagaccaaagaacaggcagattttgcagtagaagcattggcaaaagctacctatgagcggctctttcgctggctcgttcatcgcatcaataaagctctggataggaccaaacgtcagggagcatctttcattggaatcctggatattgctggatttgaaatttttgagctgaactcctttgaacaactttgcatcaactacaccaatgagaagctgcagcagctgttcaaccacaccatgtttatcctagaacaagaggaataccagcgcgaaggcatcgagtggaacttcatcgatttcgggctggatctgcagccatgcatcgacctaatagagagacctgcgaaccctcctggtgtactggcccttttggatgaagaatgctggttccctaaagccacagataaaacctttgttgaaaaactggttcaagagcaaggttcccactccaagtttcagaaacctcgacaattaaaagacaaagctgatttttgcattatacattatgcagggaaggtggactataaggcagatgagtggctgatgaagaatatggaccccctgaatgacaacgtggccacccttttgcaccagtcatcagacagatttgtggcagagctttggaaagatgtggaccgtatcgtgggtctggatcaagtcactggtatgactgagacagcttttggctccgcatataaaaccaagaagggcatgtttcgtaccgttgggcaactctacaaagaatctctcaccaagctgatggcaactctccgaaacaccaaccctaactttgttcgttgtatcattccaaatcacgagaagagggctggaaaattggatccacacctagtcctagatcagcttcgctgtaacggtgtcctggaagggatccgaatctgtcgccagggcttccctaaccgaatagttttccaggaattcagacagagatatgagatcctaactccaaatgctattcctaaaggttttatggatggtaaacaggcctgtgaacgaatgatccgggctttagaattggacccaaacttgtacagaattggacagagcaagatatttttcagagctggagttctggcacacttagaggaagaaagagatttaaaaatcaccgatatcattatcttcttccaggccgtttgcagaggttacctggccagaaaggcctttgccaagaagcagcagcaactaagtgccttaaaggtcttgcagcggaactgtgccgcgtacctgaaattacggcactggcagtggtggcgagtcttcacaaaggtgaagccgcttctacaagtgactcgccaggaggaagaacttcaggccaaagatgaagagctgttgaaggtgaaggagaagcagacgaaggtggaaggagagctggaggagatggagcggaagcaccagcagcttttagaagagaagaatatccttgcagaacaactacaagcagagactgagctctttgctgaagcagaagagatgagggcaagacttgctgctaaaaagcaggaattagaagagattctacatgacttggagtctagggttgaagaagaagaagaaagaaaccaaatcctccaaaatgaaaagaaaaaaatgcaagcacatattcaggacctggaagaacagctagacgaggaggaaggggctcggcaaaagctgcagctggaaaaggtgacagcagaggccaagatcaagaagatggaagaggagattctgcttctcgaggaccaaaattccaagttcatcaaagaaaagaaactcatggaagatcgcattgctgagtgttcctctcagctggctgaagaggaagaaaaggcgaaaaacttggccaaaatcaggaataagcaagaagtgatgatctcagatttagaagaacgcttaaagaaggaagaaaagactcgtcaggaactggaaaaggccaaaagaaaactcgacggggagacgaccgacctgcaggaccagatcgcagagctgcaggcgcagattgatgagctcaagctgcagctggccaagaaggaggaggagctgcagggcgcactggccagaggtgatgatgaaacactccataagaacaatgcccttaaagttgtgcgagagctacaagcccaaattgctgaacttcaggaagactttgaatccgagaaggcttcacggaacaaggccgaaaagcagaaaagggacttgagtgaggaactggaagctctgaaaacagagctggaggacacgctggacaccacggcagcccagcaggaactacgtacaaaacgtgaacaagaagtggcagagctgaagaaagctcttgaggaggaaactaagaaccatgaagctcaaatccaggacatgagacaaagacacgcaacagccctggaggagctctcagagcagctggaacaggccaagcggttcaaagcaaatctagagaagaacaagcagggcctggagacagataacaaggagctggcgtgtgaggtgaaggtcctgcagcaggtcaaggctgagtctgagcacaagaggaagaagctcgacgcgcaggtccaggagctccatgccaaggtctctgaaggcgacaggctcagggtggagctggcggagaaagcaagtaagctgcagaatgagctagataatgtctccacccttctggaagaagcagagaagaagggtattaaatttgctaaggatgcagctagtcttgagtctcaactacaggatacacaggagcttcttcaggaggagacacgccagaaactaaacctgagcagtcggatccggcagctggaagaggagaagaacagtcttcaggagcagcaggaggaggaggaggaggccaggaagaacctggagaagcaagtgctggccctgcagtcccagttggctgataccaagaagaaagtagatgacgacctgggaacaattgaaagtctggaagaagccaagaagaagcttctgaaggacgcggaggccctgagccagcgcctggaggagaaggcactggcgtatgacaaactggagaagaccaagaaccgcctgcagcaggagctggacgacctcacggtggacctggaccaccagcgccaggtcgcctccaacttggagaagaagcagaagaagtttgaccagctgttagcagaagagaagagcatctctgctcgctatgccgaagagcgggaccgggccgaagccgaggccagagagaaagaaaccaaagccctgtcactggcccgggccctcgaggaagccctggaggccaaggaggagtttgagaggcagaacaagcagctccgagcagacatggaagacctcatgagctccaaagatgatgtgggaaaaaacgttcacgaacttgaaaaatccaaacgggccctagagcagcaggtggaggaaatgaggacccagctggaggagctggaagacgaactccaggccacggaagatgccaagcttcgtctggaggtcaacatgcaggccatgaaggcgcagttcgagagagacctgcaaaccagggatgagcagaatgaagagaagaagcggctgctgatcaaacaggtgcgggagctcgaggcggagctggaggatgagaggaaacagcgggcgcttgctgtagcttcaaagaaaaagatggagatagacctgaaggacctcgaagcccaaatcgaggctgcgaacaaagctcgggatgaggtgattaagcagctccgcaagctccaggctcagatgaaggattaccaacgtgaattagaagaagctcgtgcatccagagatgagatttttgctcaatccaaagagagtgaaaagaaattgaagagtctggaagcagaaatccttcaattgcaggaggaacttgcctcatctgagcgagcccgccgacacgccgagcaggagagagatgagctggcggacgagatcaccaacagcgcctctggcaagtccgcgctgctggatgagaagcggcgtctggaagctcggatcgcacagctggaggaggagctggaagaggagcagagcaacatggagctgctcaacgaccgcttccgcaagaccactctacaggtggacacactgaacgccgagctagcagccgagcgcagcgccgcccagaagagtgacaatgcacgccagcaactggagcggcagaacaaggagctgaaggccaagctgcaggaactcgagggtgctgtcaagtctaagttcaaggccaccatctcagccctggaggccaagattgggcagctggaggagcagcttgagcaggaagccaaggaacgagcagccgccaacaaattagtccgtcgcactgagaagaagctgaaagaaatcttcatgcaggttgaggatgagcgtcgacacgcggaccagtataaagagcagatggagaaggccaacgctcggatgaagcagcttaaacgccagctggaggaagcagaagaagaagcgacgcgtgccaacgcatctcggcgtaaactccagcgggaactggatgatgccaccgaggccaacgagggcctgagccgcgaggtcagcaccctgaagaaccggctgaggcggggtggccccatcagcttctcttccagccgatctggccggcgccagctgcaccttgaaggagcttccctggagctctccgacgatgacacagaaagtaagaccagtgatgtcaacgagacgcagccaccccagtcagagtaaagttgcaggaagccagaggaggcaatacagtgggacagttaggaatgcacccggggcctcctgcagatttcggaaattggcaagctacgggattccttcctgaaagatcaactgtgtcttaaggctctccagcctatgcatactgtatcctgcttcagacttaggtacaattgctcccctttttatatatagacacacacaggacacatatattaaacagattgtttcatcattgcatctattttccatatagtcatcaagagaccattttataaaacatggtaagaccctttttaaaacaaactccaggcccttggttgcgggtcgctgggttattggggcagcgccgtggtcgtcactcagtcgctctgcatgctctctgtcatacagacaggtaacctagttctgtgttcacgtggcccccgactcctcagccacatcaagtctcctagaccactgtggactctaaactgcacttgtctctctcatttccttcaaataatgatcaatgctatttcagtgagcaaactgtgaaaggggctttggaaagagtaggaggggtgggctggatcggaagcaacacccatttggggttaccatgtccatcccccaaggggggccctgcccctcgagtcgatggtgtcccgcatctactcatgtgaactggccttggcgagggctggtctgtgcatagaagggatagtggccacactgcagctgaggccccaggtggcagccatggatcatgtagacttccagatggtctcccgaaccgcctggctctgccggcgccctcctcacgtcaggagcaagcagccgtggacccctaagccgagctggtggaaggcccctccccatcgccagccgggccctcatgctgaccttgcaaattcagccgctgctttgagcccaaaatgggaatattggttttgtgtccgaggcttgttccaagtttgtcaatgaggtttatggagcctccagaacagatgccatcttcctgaatgttgacatgccagtgggtgtgactccttcatttttccttctcccttccctttggacagtgttacagtgaacacttagcatcctgtttttggttggtagttaagcaaactgacattacggaaagtgccttagacactacagtactaagacaatgttgaatatatcattcgcctctataacaatttaatgtattcagttttgactgtgcttcatatcatgtacctctctagtcaaagtggtattacagacattcagtgacaatgaatcagtgttaattctaaatccttgatcctctgcaatgtgcttgaaaacacaaaccttttgggttaaaagctttaacatctattaggaagaatttgtcctgtgggtttggaatcttggattttccccctttatgaactgtactggctgttgaccaccagacacctgaccgcaaatatcttttcttgtattcccatatttctagacaatgatttttgtaagacaataaatttattcattatagatatttgcgcctgctctgtttacttgaagaaaaaagcacccgtggagaataaagagacctcaataaacaagaataatcatgtgaa

SEQ ID NO: 1170-1182 - skipped (13 entries)

SEQ ID NO: 1183 - DNA, 2247 bp, Homo sapiens
ggcggagcgagtggaggctgcagcccagctcgtctcggcgcccgcgtcgccgtcgcgaagccccccgccccgcttccgccgcgtcggaatgagctcccggaaagtgctggccattcaggcccgaaagcggaggccgaaaagagagaaacatccgaaaaaagctatactacaaaattcctggacagaagtcatggatttaatattgaaaccccgctctggagctgaaaagggctacttggttaaatgcagagaagaatgggcaaagaccaaagacccaactgctgccctcagaaaactacctgtcaaaaggtgtgtggaagggcagctgcttcgaggactttcaaaatatggaatgaagaatatagtctctgcatttggcataatacccagaaataatcgcttaatgtatattcatagctaccaaagctatgtgtggaataacatggtaagcaagaggatagaagactatggactaaaacctgttccaggggacctcgttctcaaaggagccacagccacctatattgaggaagatgatgttaataattactctatccatgatgtggtaatgcccttgcctggtttcgatgttatctacccaaagcataaaattcaagaagcctacagggaaatgctcacagctgacaatcttgatattgacaacatgagacacaaaattcgagattattccttgtcaggggcctaccgaaagatcattattcgtcctcagaatgttagctgggaagtcgttgcatatgatgatcccaaaattccacttttcaacacagatgtggacaacctagaagggaagacaccaccagtttttgcttctgaaggcaaatacagggctctgaaaatggatttttctctacccccttctacttacgccaccatggccattcgagaagtgctaaaaatggataccagtatcaagaaccagacgcagctgaatacaacctggcttcgctgagcagtaccttgtccacagattagaaaacgtacacaagtgtttgcttcctggctccctgtgcatttttgtcttagttcagactcatatatggatttcaaatctttgtaataaaaattatttgtatttttaagtttttattagcttaaagaaataatttgcaatatttgtacatgtacacaaatcctgaggttcttaattttagctcagaatataaattagtcaaaatacacttcaggtgcttaaatcagagtaaaatgtcagctttacaataataaaaaaaggactttggtttaaagtagcaggtttaggttttgctacattctcaaaagacagcaggagtatttgacacatctgtgatggagtatacaacaatgcattttaagagcaaatgcaacaaaacaaatctggactatggataaataatttgagagctgccacccacaaatataaatacagtactcatgctgactgaaataataagacatctacaaatttataaacaaaaagtgattgtcattatcctgcttatgtactagattcaggcaagcattatagactttttggttgcggtggcttttgcatttatattatcaatgccttgcaggaacgttgcattgataggcccattttatttttttattttttttttcgagacaggatctcactctgtagcacaggctggattgcagtgcaatcctgcaattctcaatcttgcactgcagcctcgacctcccaggctccagtgactctcccacctcagcctcctaagtagctgggagtacaggcgcgcaccaccacgcctagctgatttttgtatttttttgtagagacgggggtttggccatgttgccgaggctaactcctgggattacaggcatgagctgtgctggccgggtttttttttcttgatgtaaacgtgtacagctgttttattagttaaggtctaatttttactctaggtgccttttatgttcagaactctttccactggactggtatttgctcaaaaataaataatggtagagaagaaaactataaaaatggacaaggctttcttctatcagtagcgtttaccctttgtcaccagtggctttggtatttccatgtctggcattgcataaacttctctggtgtgaaaggataaatatgcctttctaaagttgtatatcaaaattgtatcaatttttattttctatgatttctagaaacaaatgtaataaatatttttaaaatctcctttctactggttatgtaaataaatcaaataaatatatcaa

SEQ ID NO: 1184 - DNA, 1665 bp, Homo sapiens
ggcggagcgagtggaggctgcagcccagctcgtctcggcgcccgcgtcgccgtcgcgaagccccccgccccgcttccgccgcgtcggaatgagctcccggaaagtgctggccattcaggcccgaaagcggaggccgaaaagagagaaacatccgaaaaaggaagtcgttgcatatgatgatcccaaaattccacttttcaacacagatgtggacaacctagaagggaagacaccaccagtttttgcttctgaaggcaaatacagggctctgaaaatggatttttctctacccccttctacttacgccaccatggccattcgagaagtgctaaaaatggataccagtatcaagaaccagacgcagctgaatacaacctggcttcgctgagcagtaccttgtccacagattagaaaacgtacacaagtgtttgcttcctggctccctgtgcatttttgtcttagttcagactcatatatggatttcaaatctttgtaataaaaattatttgtatttttaagtttttattagcttaaagaaataatttgcaatatttgtacatgtacacaaatcctgaggttcttaattttagctcagaatataaattagtcaaaatacacttcaggtgcttaaatcagagtaaaatgtcagctttacaataataaaaaaaggactttggtttaaagtagcaggtttaggttttgctacattctcaaaagacagcaggagtatttgacacatctgtgatggagtatacaacaatgcattttaagagcaaatgcaacaaaacaaatctggactatggataaataatttgagagctgccacccacaaatataaatacagtactcatgctgactgaaataataagacatctacaaatttataaacaaaaagtgattgtcattatcctgcttatgtactagattcaggcaagcattatagactttttggttgcggtggcttttgcatttatattatcaatgccttgcaggaacgttgcattgataggcccattttatttttttattttttttttcgagacaggatctcactctgtagcacaggctggattgcagtgcaatcctgcaattctcaatcttgcactgcagcctcgacctcccaggctccagtgactctcccacctcagcctcctaagtagctgggagtacaggcgcgcaccaccacgcctagctgatttttgtatttttttgtagagacgggggtttggccatgttgccgaggctaactcctgggattacaggcatgagctgtgctggccgggtttttttttcttgatgtaaacgtgtacagctgttttattagttaaggtctaatttttactctaggtgccttttatgttcagaactctttccactggactggtatttgctcaaaaataaataatggtagagaagaaaactataaaaatggacaaggctttcttctatcagtagcgtttaccctttgtcaccagtggctttggtatttccatgtctggcattgcataaacttctctggtgtgaaaggataaatatgcctttctaaagttgtatatcaaaattgtatcaatttttattttctatgatttctagaaacaaatgtaataaatatttttaaaatctcctttctactggttatgtaaataaatcaaataaatatatcaa

SEQ ID NO: 1185-1187 - skipped (3 entries)

SEQ ID NO: 1188 - DNA, 4328 bp, Homo sapiens
ggcggcgcgcaagggacgtgcggagtgagtggcgctgcgggtggggccgtcggcggcgctggtgagctttgcggagctgggcggtgccgaggaggaggaggtggcggcctgggtctgacgcggccctgttcgagggggcctctcttgtttatttatttattttccgtgggtgcctccgagtgtgcgcgcgctctcgctacccggcggggagggggtggggggagggcccgggaaaagggggagttggagccggggtcgaaacgccgcgtgacttgtaggtgagagaacgccgagccgtcgccgcagcctccgccgccgagaagcccttgttcccgctgctgggaaggagagtctgtgccgacaagatggcggacggggagctgaacgtggacagcctcatcacccggctgctggaggtacgaggatgtcgtccaggaaagattgtgcagatgactgaagcagaagttcgaggcttatgtatcaagtctcgggagatctttctcagccagcctattcttttggaattggaagcaccgctgaaaatttgtgacatcctccgggaattcaacccttccctgaagggcttctctgttggcactgggaaagaaaccagtcctaatgccttcttaaaccaggctgtggcaggaggccgagctgaggatctacctgtccaggccaggaggctggtggacctgatgaagaatgacacgaggatacactttcaggaagactggaagataataaccctgtttataggcggcaatgacctctgtgatttctgcaatgatctggtccactattctccccagaacttcacagacaacattggaaaggccctggacatcctccatgctgaggttcctcgggcatttgtgaacctggtgacggtgcttgagatcgtcaacctgagggagctgtaccaggagaaaaaagtctactgcccaaggatgatcctcaggtctctgtgtccctgtgtcctgaagtttgatgataactcaacagaacttgctaccctcatcgaattcaacaagaagtttcaggagaagacccaccaactgattgagagtgggcgatatgacacaagggaagattttactgtggttgtgcagccgttctttgaaaacgtggacatgccaaagacctcggaaggattgcctgacaactctttcttcgctcctgactgtttccacttcagcagcaagtctcactcccgagcagccagtgctctctggaacaatatgctggagcctgttggccagaagacgactcgtcataagtttgaaaacaagatcaatatcacatgtccgaaccaggtccagccgtttctgaggacctacaagaacagcatgcagggtcatgggacctggctgccatgcagggacagagccccttctgccttgcaccctacctcagtgcatgccctgagacctgcagacatccaagttgtggctgctctgggggattctctgaccgctggcaatggaattggctccaaaccagacgacctccccgatgtcaccacacagtatcggggactgtcatacagtgcaggaggggacggctccctggagaatgtgaccaccttacctaatatccttcgggagtttaacagaaacctcacaggctacgccgtgggcacgggtgatgccaatgacacgaatgcattcctcaatcaagctgttcccggagcaaaggctgaggatcttatgagccaagtccaaactctgatgcagaagatgaaagatgatcatagagtaaatttccatgaagactggaaggtcatcacagtgctgatcggaggcagcgatttatgtgactactgcacagattcgaatctgtattctgcagccaactttgttcaccatctccgcaatgccttggacgtcctgcatagagaggtgcccagagtcctggtcaacctcgtggacttcctgaaccccactatcatgcggcaggtgttcctgggaaacccagacaagtgcccagtgcagcaggccagcgttttgtgtaactgcgttctgaccctgcgggagaactcccaagagctagccaggctggaggccttcagccgagcctaccggagcagcatgcgcgagctggtggggtcaggccgctatgacacgcaggaggacttctctgtggtgctgcagcccttcttccagaacatccagctccctgtcctggcggatgggctcccagatacgtccttctttgccccagactgcatccacccaaatcagaaattccactcccagctggccagagccctttggaccaatatgcttgaaccacttggaagcaaaacagagaccctggacctgagagcagagatgcccatcacctgtcccactcagaatgagcccttcctgagaacccctcggaatagtaactacacgtaccccatcaagccagccattgagaactggggcagtgacttcctgtgtacagagtggaaggcttccaatagtgttccaacctctgtccaccagctccgaccagcagacatcaaagtggtggccgccctgggtgactctctgactacagcagtgggagctcgaccaaacaactccagtgacctacccacatcttggaggggactctcttggagcattggaggggatgggaacttggagactcacaccacactgcccaacattctgaagaagttcaacccttacctccttggcttctctaccagcacctgggaggggacagcaggactaaatgtggcagcggaaggggccagagctagggacatgccagcccaggcctgggacctggtagagcgaatgaaaaacagccccgacatcaacctggagaaagactggaagctggtcacactcttcattggggtcaacgacttgtgtcattactgtgagaatccggaggcccacttggccacggaatatgttcagcacatccaacaggccctggacatcctctctgaggagctcccaagggctttcgtcaacgtggtggaggtcatggagctggctagcctgtaccagggccaaggcgggaaatgtgccatgctggcagctcagaacaactgcacttgcctcagacactcgcaaagctccctggagaagcaagaactgaagaaagtgaactggaacctccagcatggcatctccagtttctcctactggcaccaatacacacagcgtgaggactttgcggttgtggtgcagcctttcttccaaaacacactcaccccactgaacgagagaggggacactgacctcaccttcttctccgaggactgttttcacttctcagaccgcgggcatgccgagatggccatcgcactctggaacaacatgctggaaccagtgggccgcaagactacctccaacaacttcacccacagccgagccaaactcaagtgcccctctcctgagagcccttacctctacaccctgcggaacagccgattgctcccagaccaggctgaagaagcccccgaggtgctctactgggctgtcccagtggcagcgggagtcggccttgtggtgggcatcatcgggacagtggtctggaggtgcaggagaggtggccggagggaagatcctccaatgagcctgcgcactgtggccctctaggcccgggggtgggtcctcaccctaaactccctatagccactctcttcaccgccctctgccccagccactcccggccaccaggacatgcttcaatgcctggtgccataggaagcccaggggacagtcacaacttcttggggcctgggcttcttccaggcctatgctcctggaatggatacatttaaataaagtccaaagctattttattcctgggtttgcctgcgtgaagcactcaccttccatctcttgtgcagcccaggtgtgggagctgccactttttgtggcctgcctccagcagggctgcccaagccacgaccaaccagagcccaaactgcctgccaccacgagcatatcctcaagtcaccaaacccactatttcaaaggcagaaaaaatgctggtcaccaggtggtggctggaattttggagctggctggttgccattcagtccaatccaacacatacctattaagcaactgttttgtatccaggacaatgcgaagcactgaggtgcctcctaggctgtgcatgtcgcagcctggcagagaggtcaaactccttcaataaccaagaagccacgtgatgatgtgtaactactagggcatcagtaggtaaatgtgtctgattgttttaaagaatagaaagggttcttcggggaaagtttcttgggggagagcaaccttcacatgtcattttgggaaaaggaataaaaaatgattgggacacaa

SEQ ID NO: 1189 - DNA, 3634 bp, Homo sapiens
ggcggcgcgcaagggacgtgcggagtgagtggcgctgcgggtggggccgtcggcggcgctggtgagctttgcggagctgggcggtgccgaggaggaggaggtggcggcctgggtctgacgcggccctgttcgagggggcctctcttgtttatttatttattttccgtgggtgcctccgagtgtgcgcgcgctctcgctacccggcggggagggggtggggggagggcccgggaaaagggggagttggagccggggtcgaaacgccgcgtgacttgtaggtgagagaacgccgagccgtcgccgcagcctccgccgccgagaagcccttgttcccgctgctgggaaggagagtctgtgccgacaagatggcggacggggagctgaacgtggacagcctcatcacccggctgctggaggtacgaggatgtcgtccaggaaagattgtgcagatgactgaagcagaagttcgaggcttatgtatcaagtctcgggagatctttctcagccagcctattcttttggaattggaagcaccgctgaaaatttgtgacatcctccgggaattcaacccttccctgaagggcttctctgttggcactgggaaagaaaccagtcctaatgccttcttaaaccaggctgtggcaggaggccgagctgaggatctacctgtccaggccaggaggctggtggacctgatgaagaatgacacgaggatacactttcaggaagactggaagataataaccctgtttataggcggcaatgacctctgtgatttctgcaatgatctggtccactattctccccagaacttcacagacaacattggaaaggccctggacatcctccatgctgaggttcctcgggcatttgtgaacctggtgacggtgcttgagatcgtcaacctgagggagctgtaccaggagaaaaaagtctactgcccaaggatgatcctcaggtctctgtgtccctgtgtcctgaagtttgatgataactcaacagaacttgctaccctcatcgaattcaacaagaagtttcaggagaagacccaccaactgattgagagtgggcgatatgacacaagggaagattttactgtggttgtgcagccgttctttgaaaacgtggacatgccaaagacctcggaaggattgcctgacaactctttcttcgctcctgactgtttccacttcagcagcaagtctcactcccgagcagccagtgctctctggaacaatatgctggagcctgttggccagaagacgactcgtcataagtttgaaaacaagatcaatatcacatgtccgaaccaggtccagccgtttctgaggacctacaagaacagcatgcagggtcatgggacctggctgccatgcagggacagagccccttctgccttgcaccctacctcagtgcatgccctgagacctgcagacatccaagttgtggctgctctgggggattctctgaccgctggcaatggaattggctccaaaccagacgacctccccgatgtcaccacacagtatcggggactgtcatacagagaaagtaaaccagggttcttatcagactcctgggtcagcaaatccaacaggaaatgcaccagaaaagcaccaaatccctgaatcttcacctccccgcttgcatgtatacgtgtacacgtggtgttcctacgtctctgtttactgtctttatgtgtttattcatgttgtcttgtagtcacacagctgcctttacatatatgtacacatctgcacagaaaacctctgaaacccatcgcacacttcgagaggccataaccaagacacaatcacaatcagccatgtcttgaaagattagcaattcgacaagaggaaagggtgagaaagggcatcccgaacacggaagtggagaagctcagggtgtgtcaggcgagcggttgcgtgtagatattctcaagtttctttctctcctaataaagttctcattcctgtaggcttcaaagtaagtggcgagtagctcagaatttacctgggaaaacaactagaacgaagctggccacaagggggcagcgtgctaatgagtggcggagccaggacagcacctttgctgccgcctcccttttcttctgagtcagtttgcttcctggggaagtgacagggagcagggagggggtgatcaagactgtgaaggttctctggccagacctgagcagagtcccagagaggatgggtttccagggcgagagggaggcgccatcactcggcctgtaccacccacaacgaggacctaggttgtccttagcatgaggacatcaacctctcaagaacagaggtcagtgccttcctgcgccaaggtccctgcgtttccacaagtccttggtcaggtacctggtcctaacaggctgccatggaacaaatcagagcctcactgactcaccattctgctcctaatgaggctacaagaaaaaaaaccagaggagagaaagcagagcttattacaatcaggaaagagcatgaggttctggcagctgcacttggtctcagctaaagaaggcaatgacctcatacgatagcatgggaaacaaaaatcaagcagacgaaccacattgcaggtgatagatacgcgacgtgcacctggtggggcagcctggggaagtgaggtgatgtgccctactttaaaacagatcgaccagctgggctcctgggattcagatatgaaccagcagtcctctactaaaagtttctttctgcagcgatgggaaaattcagccattgctctgtttcttccaacaagtgaagtccattacagcctaatgtctcaatcttttagttctagctctaaggcctcaggttcaatggctgctgtccctttaaacccttcatttgtcctaaatgtttcaaatagctgcccccaaatgcacgtgtgttaaagatggaagctctaggtcggggtctgagagacagcttgacacttggtagaatacatagactactgtgtctcaaagtgtgttccatggaacattaactccagacctgttcctggagaagagaaaatcctttgtatctgagggggaaacattaccataaccttcctttggggaattcatgtgtgtattagcatattaaaggctctcataaggcctgcaatgcagaaatctatttaagttttatctgtttaacccaatgtttcccttaattccagaacattttctttgttcataacacctgttaacacctcctgaaagtgttcacgtagtagacttatctgagaaaagcaatttttgagccgttaaagcttctagattggacaaactaggcaattaatgatactagatcaattcagaatgcaatttgagcctcttccccctgggaaacaaagtgaaaagagtggatctcatggaattaggggagaagtagacccagaattcatggggggtgggtggctgtgaacaggacctgcagaagaggctcggctgtgaatatttccaaggccccttgacctgtgagattctgtagtgaacggttccagctttggccagcttaacaatgtgctgggccccaaggtcttgagagcattgccttttcttccattgaaataagttcgcttgtttgggaccattcaaaggatcaaaataaaatttacttaccaa

SEQ ID NO: 1190 - DNA, 3918 bp, Homo sapiens
gctgcgtgacgcggcggcgcgcaagggacgtgcggagtgagtggcgctgcgggtggggccgtcggcggcgctgtacgaggatgtcgtccaggaaagattgtgcagatgactgaagcagaagttcgaggcttatgtatcaagtctcgggagatctttctcagccagcctattcttttggaattggaagcaccgctgaaaatttgtgacatcctccgggaattcaacccttccctgaagggcttctctgttggcactgggaaagaaaccagtcctaatgccttcttaaaccaggctgtggcaggaggccgagctgaggatctacctgtccaggccaggaggctggtggacctgatgaagaatgacacgaggatacactttcaggaagactggaagataataaccctgtttataggcggcaatgacctctgtgatttctgcaatgatctggttcctcgggcatttgtgaacctggtgacggtgcttgagatcgtcaacctgagggagctgtaccaggagaaaaaagtctactgcccaaggatgatcctcaggtctctgtgtccctgtgtcctgaagtttgatgataactcaacagaacttgctaccctcatcgaattcaacaagaagtttcaggagaagacccaccaactgattgagagtgggcgatatgacacaagggaagattttactgtggttgtgcagccgttctttgaaaacgtggacatgccaaagacctcggaaggattgcctgacaactctttcttcgctcctgactgtttccacttcagcagcaagtctcactcccgagcagccagtgctctctggaacaatatgctggagcctgttggccagaagacgactcgtcataagtttgaaaacaagatcaatatcacatgtccgaaccaggtccagccgtttctgaggacctacaagaacagcatgcagggtcatgggacctggctgccatgcagggacagagccccttctgccttgcaccctacctcagtgcatgccctgagacctgcagacatccaagttgtggctgctctgggggattctctgaccgctggcaatggaattggctccaaaccagacgacctccccgatgtcaccacacagtatcggggactgtcatacagtgcaggaggggacggctccctggagaatgtgaccaccttacctaatatccttcgggagtttaacagaaacctcacaggctacgccgtgggcacgggtgatgccaatgacacgaatgcattcctcaatcaagctgttcccggagcaaaggctgaggatcttatgagccaagtccaaactctgatgcagaagatgaaagatgatcatagagtaaatttccatgaagactggaaggtcatcacagtgctgatcggaggcagcgatttatgtgactactgcacagattcgaatctgtattctgcagccaactttgttcaccatctccgcaatgccttggacgtcctgcatagagaggtgcccagagtcctggtcaacctcgtggacttcctgaaccccactatcatgcggcaggtgttcctgggaaacccagacaagtgcccagtgcagcaggccagcgttttgtgtaactgcgttctgaccctgcgggagaactcccaagagctagccaggctggaggccttcagccgagcctaccggagcagcatgcgcgagctggtggggtcaggccgctatgacacgcaggaggacttctctgtggtgctgcagcccttcttccagaacatccagctccctgtcctggcggatgggctcccagatacgtccttctttgccccagactgcatccacccaaatcagaaattccactcccagctggccagagccctttggaccaatatgcttgaaccacttggaagcaaaacagagaccctggacctgagagcagagatgcccatcacctgtcccactcagaatgagcccttcctgagaacccctcggaatagtaactacacgtaccccatcaagccagccattgagaactggggcagtgacttcctgtgtacagagtggaaggcttccaatagtgttccaacctctgtccaccagctccgaccagcagacatcaaagtggtggccgccctgggtgactctctgactacagcagtgggagctcgaccaaacaactccagtgacctacccacatcttggaggggactctcttggagcattggaggggatgggaacttggagactcacaccacactgcccaacattctgaagaagttcaacccttacctccttggcttctctaccagcacctgggaggggacagcaggactaaatgtggcagcggaaggggccagagctagggacatgccagcccaggcctgggacctggtagagcgaatgaaaaacagccccgacatcaacctggagaaagactggaagctggtcacactcttcattggggtcaacgacttgtgtcattactgtgagaatccggaggcccacttggccacggaatatgttcagcacatccaacaggccctggacatcctctctgaggagctcccaagggctttcgtcaacgtggtggaggtcatggagctggctagcctgtaccagggccaaggcgggaaatgtgccatgctggcagctcagaacaactgcacttgcctcagacactcgcaaagctccctggagaagcaagaactgaagaaagtgaactggaacctccagcatggcatctccagtttctcctactggcaccaatacacacagcgtgaggactttgcggttgtggtgcagcctttcttccaaaacacactcaccccactgaacgagagaggggacactgacctcaccttcttctccgaggactgttttcacttctcagaccgcgggcatgccgagatggccatcgcactctggaacaacatgctggaaccagtgggccgcaagactacctccaacaacttcacccacagccgagccaaactcaagtgcccctctcctgagagcccttacctctacaccctgcggaacagccgattgctcccagaccaggctgaagaagcccccgaggtgctctactgggctgtcccagtggcagcgggagtcggccttgtggtgggcatcatcgggacagtggtctggaggtgcaggagaggtggccggagggaagatcctccaatgagcctgcgcactgtggccctctaggcccgggggtgggtcctcaccctaaactccctatagccactctcttcaccgccctctgccccagccactcccggccaccaggacatgcttcaatgcctggtgccataggaagcccaggggacagtcacaacttcttggggcctgggcttcttccaggcctatgctcctggaatggatacatttaaataaagtccaaagctattttattcctgggtttgcctgcgtgaagcactcaccttccatctcttgtgcagcccaggtgtgggagctgccactttttgtggcctgcctccagcagggctgcccaagccacgaccaaccagagcccaaactgcctgccaccacgagcatatcctcaagtcaccaaacccactatttcaaaggcagaaaaaatgctggtcaccaggtggtggctggaattttggagctggctggttgccattcagtccaatccaacacatacctattaagcaactgttttgtatccaggacaatgcgaagcactgaggtgcctcctaggctgtgcatgtcgcagcctggcagagaggtcaaactccttcaataaccaagaagccacgtgatgatgtgtaactactagggcatcagtaggtaaatgtgtctgattgttttaaagaatagaaagggttcttcggggaaagtttcttgggggagagcaaccttcacatgtcattttgggaaaaggaataaaaaatgattgggacacaa

SEQ ID NO: 1191 - DNA, 3679 bp, Homo sapiens
ggcggcgcgcaagggacgtgcggagtgagtggcgctgcgggtggggccgtcggcggcgctggtgagctttgcggagctgggcggtgccgaggaggaggaggtggcggcctgggtctgacgcggccctgttcgagggggcctctcttgtttatttatttattttccgtgggtgcctccgagtgtgcgcgcgctctcgctacccggcggggagggggtggggggagggcccgggaaaagggggagttggagccggggtcgaaacgccgcgtgacttgtaggtgagagaacgccgagccgtcgccgcagcctccgccgccgagaagcccttgttcccgctgctgggaaggagagtctgtgccgacaagatggcggacggggagctgaacgtggacagcctcatcacccggctgctggaggttcataggctgaagccggctgacatcaacgtaattggagccctgggtgactctctcacggcaggcaatggggccgggtccacacctgggaacgtcttggacgtcttgactcagtaccgaggcctgtcctggagcgtcggcggagatgagaacatcggcaccgttaccaccctggcgaacatcctccgggaattcaacccttccctgaagggcttctctgttggcactgggaaagaaaccagtcctaatgccttcttaaaccaggctgtggcaggaggccgagctgaggatctacctgtccaggccaggaggctggtggacctgatgaagaatgacacgaggatacactttcaggaagactggaagataataaccctgtttataggcggcaatgacctctgtgatttctgcaatgatctggtccactattctccccagaacttcacagacaacattggaaaggccctggacatcctccatgctgaggttcctcgggcatttgtgaacctggtgacggtgcttgagatcgtcaacctgagggagctgtaccaggagaaaaaagtctactgcccaaggatgatcctcaggtctctgtgtccctgtgtcctgaagtttgatgataactcaacagaacttgctaccctcatcgaattcaacaagaagtttcaggagaagacccaccaactgattgagagtgggcgatatgacacaagggaagattttactgtggttgtgcagccgttctttgaaaacgtggacatgccaaagacctcggaaggattgcctgacaactctttcttcgctcctgactgtttccacttcagcagcaagtctcactcccgagcagccagtgctctctggaacaatatgctggagcctgttggccagaagacgactcgtcataagtttgaaaacaagatcaatatcacatgtccgaaccaggtccagccgtttctgaggacctacaagaacagcatgcagggtcatgggacctggctgccatgcagggacagagccccttctgccttgcaccctacctcagtgcatgccctgagacctgcagacatccaagttgtggctgctctgggggattctctgaccgctggcaatggaattggctccaaaccagacgacctccccgatgtcaccacacagtatcggggactgtcatacagagaaagtaaaccagggttcttatcagactcctgggtcagcaaatccaacaggaaatgcaccagaaaagcaccaaatccctgaatcttcacctccccgcttgcatgtatacgtgtacacgtggtgttcctacgtctctgtttactgtctttatgtgtttattcatgttgtcttgtagtcacacagctgcctttacatatatgtacacatctgcacagaaaacctctgaaacccatcgcacacttcgagaggccataaccaagacacaatcacaatcagccatgtcttgaaagattagcaattcgacaagaggaaagggtgagaaagggcatcccgaacacggaagtggagaagctcagggtgtgtcaggcgagcggttgcgtgtagatattctcaagtttctttctctcctaataaagttctcattcctgtaggcttcaaagtaagtggcgagtagctcagaatttacctgggaaaacaactagaacgaagctggccacaagggggcagcgtgctaatgagtggcggagccaggacagcacctttgctgccgcctcccttttcttctgagtcagtttgcttcctggggaagtgacagggagcagggagggggtgatcaagactgtgaaggttctctggccagacctgagcagagtcccagagaggatgggtttccagggcgagagggaggcgccatcactcggcctgtaccacccacaacgaggacctaggttgtccttagcatgaggacatcaacctctcaagaacagaggtcagtgccttcctgcgccaaggtccctgcgtttccacaagtccttggtcaggtacctggtcctaacaggctgccatggaacaaatcagagcctcactgactcaccattctgctcctaatgaggctacaagaaaaaaaaccagaggagagaaagcagagcttattacaatcaggaaagagcatgaggttctggcagctgcacttggtctcagctaaagaaggcaatgacctcatacgatagcatgggaaacaaaaatcaagcagacgaaccacattgcaggtgatagatacgcgacgtgcacctggtggggcagcctggggaagtgaggtgatgtgccctactttaaaacagatcgaccagctgggctcctgggattcagatatgaaccagcagtcctctactaaaagtttctttctgcagcgatgggaaaattcagccattgctctgtttcttccaacaagtgaagtccattacagcctaatgtctcaatcttttagttctagctctaaggcctcaggttcaatggctgctgtccctttaaacccttcatttgtcctaaatgtttcaaatagctgcccccaaatgcacgtgtgttaaagatggaagctctaggtcggggtctgagagacagcttgacacttggtagaatacatagactactgtgtctcaaagtgtgttccatggaacattaactccagacctgttcctggagaagagaaaatcctttgtatctgagggggaaacattaccataaccttcctttggggaattcatgtgtgtattagcatattaaaggctctcataaggcctgcaatgcagaaatctatttaagttttatctgtttaacccaatgtttcccttaattccagaacattttctttgttcataacacctgttaacacctcctgaaagtgttcacgtagtagacttatctgagaaaagcaatttttgagccgttaaagcttctagattggacaaactaggcaattaatgatactagatcaattcagaatgcaatttgagcctcttccccctgggaaacaaagtgaaaagagtggatctcatggaattaggggagaagtagacccagaattcatggggggtgggtggctgtgaacaggacctgcagaagaggctcggctgtgaatatttccaaggccccttgacctgtgagattctgtagtgaacggttccagctttggccagcttaacaatgtgctgggccccaaggtcttgagagcattgccttttcttccattgaaataagttcgcttgtttgggaccattcaaaggatcaaaataaaatttacttaccaa

SEQ ID NO: 1192 - DNA, 5432 bp, Homo sapiens
ggcggcgcgcaagggacgtgcggagtgagtggcgctgcgggtggggccgtcggcggcgctggtgagctttgcggagctgggcggtgccgaggaggaggaggtggcggcctgggtctgacgcggccctgttcgagggggcctctcttgtttatttatttattttccgtgggtgcctccgagtgtgcgcgcgctctcgctacccggcggggagggggtggggggagggcccgggaaaagggggagttggagccggggtcgaaacgccgcgtgacttgtaggtgagagaacgccgagccgtcgccgcagcctccgccgccgagaagcccttgttcccgctgctgggaaggagagtctgtgccgacaagatggcggacggggagctgaacgtggacagcctcatcacccggctgctggaggggacccctcagatccatacctctcctagaaagagtacattggaagggcagctatggccagagaccctgaagaattctccattcccatgcaacccaaataaattaggagtgaatatgccttctaaatcagttcactctctgaagccttctgatattaaatttgtggcagccattggcaatctggaaattcctccagacccagggacgggcgatctggagaagcaagactggactgaaaggccacagcaggtgtgcatgggagtgatgacagtcctttcagacatcatcagatatttcagtccttctgttccaatgcctgtgtgccacactggaaagagagtcataccccacgatggtgctgaagacttgtggattcaggctcaagaactggtgagaaacatgaaagagaacctgcaacttgactttcaatttgactggaagctcatcaatgtgttcttcagtaatgcaagccagtgttacctgtgcccctctgctcaacaggcaccctcacttagcacggttctcctctcacagaatgggcttgcggcgggcggcgtggatgagctgatgggggtgctggactacctgcagcaggaggtccccagagcatttgtaaacctggtggacctctctgaggttgcagaggtctctcgtcagtatcacggcacttggctcagccctgcaccagagccctgtaattgctcagaggagaccacccggctggccaaggtggtgatgcagtggtcttatcaggaagcctggaacagcctcctggcctccagcaggtacagtgagcaggagtccttcaccgtggttttccagcctttcttctatgagaccaccccatctctacactcggaggacccccgactccaggattctaccacgctggcctggcatctctggaataggatgatggagccagcaggagagaaagatgagccattgagtgtaaaacacgggaggccaatgaagtgtccctctcaggagagcccctatctgttcagctacagaaacagcaactacctgaccagactgcagaaaccccaagacaagcttgaggtaagagaaggagcggaaatcagatgtcctgacaaagacccctccgatacggttcccacctcagttcataggctgaagccggctgacatcaacgtaattggagccctgggtgactctctcacggcaggcaatggggccgggtccacacctgggaacgtcttggacgtcttgactcagtaccgaggcctgtcctggagcgtcggcggagatgagaacatcggcaccgttaccaccctggcgaacatcctccgggaattcaacccttccctgaagggcttctctgttggcactgggaaagaaaccagtcctaatgccttcttaaaccaggctgtggcaggaggccgagctgaggatctacctgtccaggccaggaggctggtggacctgatgaagaatgacacgaggatacactttcaggaagactggaagataataaccctgtttataggcggcaatgacctctgtgatttctgcaatgatctggttcctcgggcatttgtgaacctggtgacggtgcttgagatcgtcaacctgagggagctgtaccaggagaaaaaagtctactgcccaaggatgatcctcaggtctctgtgtccctgtgtcctgaagtttgatgataactcaacagaacttgctaccctcatcgaattcaacaagaagtttcaggagaagacccaccaactgattgagagtgggcgatatgacacaagggaagattttactgtggttgtgcagccgttctttgaaaacgtggacatgccaaagacctcggaaggattgcctgacaactctttcttcgctcctgactgtttccacttcagcagcaagtctcactcccgagcagccagtgctctctggaacaatatgctggagcctgttggccagaagacgactcgtcataagtttgaaaacaagatcaatatcacatgtccgaaccaggtccagccgtttctgaggacctacaagaacagcatgcagggtcatgggacctggctgccatgcagggacagagccccttctgccttgcaccctacctcagtgcatgccctgagacctgcagacatccaagttgtggctgctctgggggattctctgaccgctggcaatggaattggctccaaaccagacgacctccccgatgtcaccacacagtatcggggactgtcatacagtgcaggaggggacggctccctggagaatgtgaccaccttacctaatatccttcgggagtttaacagaaacctcacaggctacgccgtgggcacgggtgatgccaatgacacgaatgcattcctcaatcaagctgttcccggagcaaaggctgaggatcttatgagccaagtccaaactctgatgcagaagatgaaagatgatcatagagtaaatttccatgaagactggaaggtcatcacagtgctgatcggaggcagcgatttatgtgactactgcacagattcgaatctgtattctgcagccaactttgttcaccatctccgcaatgccttggacgtcctgcatagagaggtgcccagagtcctggtcaacctcgtggacttcctgaaccccactatcatgcggcaggtgttcctgggaaacccagacaagtgcccagtgcagcaggccagcgttttgtgtaactgcgttctgaccctgcgggagaactcccaagagctagccaggctggaggccttcagccgagcctaccggagcagcatgcgcgagctggtggggtcaggccgctatgacacgcaggaggacttctctgtggtgctgcagcccttcttccagaacatccagctccctgtcctggcggatgggctcccagatacgtccttctttgccccagactgcatccacccaaatcagaaattccactcccagctggccagagccctttggaccaatatgcttgaaccacttggaagcaaaacagagaccctggacctgagagcagagatgcccatcacctgtcccactcagaatgagcccttcctgagaacccctcggaatagtaactacacgtaccccatcaagccagccattgagaactggggcagtgacttcctgtgtacagagtggaaggcttccaatagtgttccaacctctgtccaccagctccgaccagcagacatcaaagtggtggccgccctgggtgactctctgactacagcagtgggagctcgaccaaacaactccagtgacctacccacatcttggaggggactctcttggagcattggaggggatgggaacttggagactcacaccacactgcccaacattctgaagaagttcaacccttacctccttggcttctctaccagcacctgggaggggacagcaggactaaatgtggcagcggaaggggccagagctagggacatgccagcccaggcctgggacctggtagagcgaatgaaaaacagccccgacatcaacctggagaaagactggaagctggtcacactcttcattggggtcaacgacttgtgtcattactgtgagaatccggaggcccacttggccacggaatatgttcagcacatccaacaggccctggacatcctctctgaggagctcccaagggctttcgtcaacgtggtggaggtcatggagctggctagcctgtaccagggccaaggcgggaaatgtgccatgctggcagctcagaacaactgcacttgcctcagacactcgcaaagctccctggagaagcaagaactgaagaaagtgaactggaacctccagcatggcatctccagtttctcctactggcaccaatacacacagcgtgaggactttgcggttgtggtgcagcctttcttccaaaacacactcaccccactgaacgagagaggggacactgacctcaccttcttctccgaggactgttttcacttctcagaccgcgggcatgccgagatggccatcgcactctggaacaacatgctggaaccagtgggccgcaagactacctccaacaacttcacccacagccgagccaaactcaagtgcccctctcctgagagcccttacctctacaccctgcggaacagccgattgctcccagaccaggctgaagaagcccccgaggtgctctactgggctgtcccagtggcagcgggagtcggccttgtggtgggcatcatcgggacagtggtctggaggtgcaggagaggtggccggagggaagatcctccaatgagcctgcgcactgtggccctctaggcccgggggtgggtcctcaccctaaactccctatagccactctcttcaccgccctctgccccagccactcccggccaccaggacatgcttcaatgcctggtgccataggaagcccaggggacagtcacaacttcttggggcctgggcttcttccaggcctatgctcctggaatggatacatttaaataaagtccaaagctattttattcctgggtttgcctgcgtgaagcactcaccttccatctcttgtgcagcccaggtgtgggagctgccactttttgtggcctgcctccagcagggctgcccaagccacgaccaaccagagcccaaactgcctgccaccacgagcatatcctcaagtcaccaaacccactatttcaaaggcagaaaaaatgctggtcaccaggtggtggctggaattttggagctggctggttgccattcagtccaatccaacacatacctattaagcaactgttttgtatccaggacaatgcgaagcactgaggtgcctcctaggctgtgcatgtcgcagcctggcagagaggtcaaactccttcaataaccaagaagccacgtgatgatgtgtaactactagggcatcagtaggtaaatgtgtctgattgttttaaagaatagaaagggttcttcggggaaagtttcttgggggagagcaaccttcacatgtcattttgggaaaaggaataaaaaatgattgggacacaa

SEQ ID NO: 1193 - DNA, 3984 bp, Homo sapiens
gctgcgtgacgcggcggcgcgcaagggacgtgcggagtgagtggcgctgcgggtggggccgtcggcggcgctgtacgaggatgtcgtccaggaaagattgtgcagatgactgaagcagaagttcgaggcttatgtatcaagtctcgggagatctttctcagccagcctattcttttggaattggaagcaccgctgaaaatttgtgacatcctccgggaattcaacccttccctgaagggcttctctgttggcactgggaaagaaaccagtcctaatgccttcttaaaccaggctgtggcaggaggccgagctgaggatctacctgtccaggccaggaggctggtggacctgatgaagaatgacacgaggatacactttcaggaagactggaagataataaccctgtttataggcggcaatgacctctgtgatttctgcaatgatctggtccactattctccccagaacttcacagacaacattggaaaggccctggacatcctccatgctgaggttcctcgggcatttgtgaacctggtgacggtgcttgagatcgtcaacctgagggagctgtaccaggagaaaaaagtctactgcccaaggatgatcctcaggtctctgtgtccctgtgtcctgaagtttgatgataactcaacagaacttgctaccctcatcgaattcaacaagaagtttcaggagaagacccaccaactgattgagagtgggcgatatgacacaagggaagattttactgtggttgtgcagccgttctttgaaaacgtggacatgccaaagacctcggaaggattgcctgacaactctttcttcgctcctgactgtttccacttcagcagcaagtctcactcccgagcagccagtgctctctggaacaatatgctggagcctgttggccagaagacgactcgtcataagtttgaaaacaagatcaatatcacatgtccgaaccaggtccagccgtttctgaggacctacaagaacagcatgcagggtcatgggacctggctgccatgcagggacagagccccttctgccttgcaccctacctcagtgcatgccctgagacctgcagacatccaagttgtggctgctctgggggattctctgaccgctggcaatggaattggctccaaaccagacgacctccccgatgtcaccacacagtatcggggactgtcatacagtgcaggaggggacggctccctggagaatgtgaccaccttacctaatatccttcgggagtttaacagaaacctcacaggctacgccgtgggcacgggtgatgccaatgacacgaatgcattcctcaatcaagctgttcccggagcaaaggctgaggatcttatgagccaagtccaaactctgatgcagaagatgaaagatgatcatagagtaaatttccatgaagactggaaggtcatcacagtgctgatcggaggcagcgatttatgtgactactgcacagattcgaatctgtattctgcagccaactttgttcaccatctccgcaatgccttggacgtcctgcatagagaggtgcccagagtcctggtcaacctcgtggacttcctgaaccccactatcatgcggcaggtgttcctgggaaacccagacaagtgcccagtgcagcaggccagcgttttgtgtaactgcgttctgaccctgcgggagaactcccaagagctagccaggctggaggccttcagccgagcctaccggagcagcatgcgcgagctggtggggtcaggccgctatgacacgcaggaggacttctctgtggtgctgcagcccttcttccagaacatccagctccctgtcctggcggatgggctcccagatacgtccttctttgccccagactgcatccacccaaatcagaaattccactcccagctggccagagccctttggaccaatatgcttgaaccacttggaagcaaaacagagaccctggacctgagagcagagatgcccatcacctgtcccactcagaatgagcccttcctgagaacccctcggaatagtaactacacgtaccccatcaagccagccattgagaactggggcagtgacttcctgtgtacagagtggaaggcttccaatagtgttccaacctctgtccaccagctccgaccagcagacatcaaagtggtggccgccctgggtgactctctgactacagcagtgggagctcgaccaaacaactccagtgacctacccacatcttggaggggactctcttggagcattggaggggatgggaacttggagactcacaccacactgcccaacattctgaagaagttcaacccttacctccttggcttctctaccagcacctgggaggggacagcaggactaaatgtggcagcggaaggggccagagctagggacatgccagcccaggcctgggacctggtagagcgaatgaaaaacagccccgacatcaacctggagaaagactggaagctggtcacactcttcattggggtcaacgacttgtgtcattactgtgagaatccggaggcccacttggccacggaatatgttcagcacatccaacaggccctggacatcctctctgaggagctcccaagggctttcgtcaacgtggtggaggtcatggagctggctagcctgtaccagggccaaggcgggaaatgtgccatgctggcagctcagaacaactgcacttgcctcagacactcgcaaagctccctggagaagcaagaactgaagaaagtgaactggaacctccagcatggcatctccagtttctcctactggcaccaatacacacagcgtgaggactttgcggttgtggtgcagcctttcttccaaaacacactcaccccactgaacgagagaggggacactgacctcaccttcttctccgaggactgttttcacttctcagaccgcgggcatgccgagatggccatcgcactctggaacaacatgctggaaccagtgggccgcaagactacctccaacaacttcacccacagccgagccaaactcaagtgcccctctcctgagagcccttacctctacaccctgcggaacagccgattgctcccagaccaggctgaagaagcccccgaggtgctctactgggctgtcccagtggcagcgggagtcggccttgtggtgggcatcatcgggacagtggtctggaggtgcaggagaggtggccggagggaagatcctccaatgagcctgcgcactgtggccctctaggcccgggggtgggtcctcaccctaaactccctatagccactctcttcaccgccctctgccccagccactcccggccaccaggacatgcttcaatgcctggtgccataggaagcccaggggacagtcacaacttcttggggcctgggcttcttccaggcctatgctcctggaatggatacatttaaataaagtccaaagctattttattcctgggtttgcctgcgtgaagcactcaccttccatctcttgtgcagcccaggtgtgggagctgccactttttgtggcctgcctccagcagggctgcccaagccacgaccaaccagagcccaaactgcctgccaccacgagcatatcctcaagtcaccaaacccactatttcaaaggcagaaaaaatgctggtcaccaggtggtggctggaattttggagctggctggttgccattcagtccaatccaacacatacctattaagcaactgttttgtatccaggacaatgcgaagcactgaggtgcctcctaggctgtgcatgtcgcagcctggcagagaggtcaaactccttcaataaccaagaagccacgtgatgatgtgtaactactagggcatcagtaggtaaatgtgtctgattgttttaaagaatagaaagggttcttcggggaaagtttcttgggggagagcaaccttcacatgtcattttgggaaaaggaataaaaaatgattgggacacaa

SEQ ID NO: 1194 - DNA, 2943 bp, Homo sapiens
gctgcgtgacgcggcggcgcgcaagggacgtgcggagtgagtggcgctgcgggtggggccgtcggcggcgctgtacgaggatgtcgtccaggaaagattgtgcagatgactgaagcagaagttcgaggcttatgtatcaagtctcgggagatctttctcagccagcctattcttttggaattggaagcaccgctgaaaatttgtgatatccttcgggagtttaacagaaacctcacaggctacgccgtgggcacgggtgatgccaatgacacgaatgcattcctcaatcaagctgttcccggagcaaaggctgaggatcttatgagccaagtccaaactctgatgcagaagatgaaagatgatcatagagtaaatttccatgaagactggaaggtcatcacagtgctgatcggaggcagcgatttatgtgactactgcacagattcgaatctgtattctgcagccaactttgttcaccatctccgcaatgccttggacgtcctgcatagagaggtgcccagagtcctggtcaacctcgtggacttcctgaaccccactatcatgcggcaggtgttcctgggaaacccagacaagtgcccagtgcagcaggccagcgttttgtgtaactgcgttctgaccctgcgggagaactcccaagagctagccaggctggaggccttcagccgagcctaccggagcagcatgcgcgagctggtggggtcaggccgctatgacacgcaggaggacttctctgtggtgctgcagcccttcttccagaacatccagctccctgtcctggcggatgggctcccagatacgtccttctttgccccagactgcatccacccaaatcagaaattccactcccagctggccagagccctttggaccaatatgcttgaaccacttggaagcaaaacagagaccctggacctgagagcagagatgcccatcacctgtcccactcagaatgagcccttcctgagaacccctcggaatagtaactacacgtaccccatcaagccagccattgagaactggggcagtgacttcctgtgtacagagtggaaggcttccaatagtgttccaacctctgtccaccagctccgaccagcagacatcaaagtggtggccgccctgggtgactctctgactacagcagtgggagctcgaccaaacaactccagtgacctacccacatcttggaggggactctcttggagcattggaggggatgggaacttggagactcacaccacactgcccaacattctgaagaagttcaacccttacctccttggcttctctaccagcacctgggaggggacagcaggactaaatgtggcagcggaaggggccagagctagggacatgccagcccaggcctgggacctggtagagcgaatgaaaaacagccccgacatcaacctggagaaagactggaagctggtcacactcttcattggggtcaacgacttgtgtcattactgtgagaatccggaggcccacttggccacggaatatgttcagcacatccaacaggccctggacatcctctctgaggagctcccaagggctttcgtcaacgtggtggaggtcatggagctggctagcctgtaccagggccaaggcgggaaatgtgccatgctggcagctcagaacaactgcacttgcctcagacactcgcaaagctccctggagaagcaagaactgaagaaagtgaactggaacctccagcatggcatctccagtttctcctactggcaccaatacacacagcgtgaggactttgcggttgtggtgcagcctttcttccaaaacacactcaccccactgaacgagagaggggacactgacctcaccttcttctccgaggactgttttcacttctcagaccgcgggcatgccgagatggccatcgcactctggaacaacatgctggaaccagtgggccgcaagactacctccaacaacttcacccacagccgagccaaactcaagtgcccctctcctgagagcccttacctctacaccctgcggaacagccgattgctcccagaccaggctgaagaagcccccgaggtgctctactgggctgtcccagtggcagcgggagtcggccttgtggtgggcatcatcgggacagtggtctggaggtgcaggagaggtggccggagggaagatcctccaatgagcctgcgcactgtggccctctaggcccgggggtgggtcctcaccctaaactccctatagccactctcttcaccgccctctgccccagccactcccggccaccaggacatgcttcaatgcctggtgccataggaagcccaggggacagtcacaacttcttggggcctgggcttcttccaggcctatgctcctggaatggatacatttaaataaagtccaaagctattttattcctgggtttgcctgcgtgaagcactcaccttccatctcttgtgcagcccaggtgtgggagctgccactttttgtggcctgcctccagcagggctgcccaagccacgaccaaccagagcccaaactgcctgccaccacgagcatatcctcaagtcaccaaacccactatttcaaaggcagaaaaaatgctggtcaccaggtggtggctggaattttggagctggctggttgccattcagtccaatccaacacatacctattaagcaactgttttgtatccaggacaatgcgaagcactgaggtgcctcctaggctgtgcatgtcgcagcctggcagagaggtcaaactccttcaataaccaagaagccacgtgatgatgtgtaactactagggcatcagtaggtaaatgtgtctgattgttttaaagaatagaaagggttcttcggggaaagtttcttgggggagagcaaccttcacatgtcattttgggaaaaggaataaaaaatgattgggacacaa

SEQ ID NO: 1195 - DNA, 4262 bp, Homo sapiens
ggcggcgcgcaagggacgtgcggagtgagtggcgctgcgggtggggccgtcggcggcgctggtgagctttgcggagctgggcggtgccgaggaggaggaggtggcggcctgggtctgacgcggccctgttcgagggggcctctcttgtttatttatttattttccgtgggtgcctccgagtgtgcgcgcgctctcgctacccggcggggagggggtggggggagggcccgggaaaagggggagttggagccggggtcgaaacgccgcgtgacttgtaggtgagagaacgccgagccgtcgccgcagcctccgccgccgagaagcccttgttcccgctgctgggaaggagagtctgtgccgacaagatggcggacggggagctgaacgtggacagcctcatcacccggctgctggaggtacgaggatgtcgtccaggaaagattgtgcagatgactgaagcagaagttcgaggcttatgtatcaagtctcgggagatctttctcagccagcctattcttttggaattggaagcaccgctgaaaatttgtgacatcctccgggaattcaacccttccctgaagggcttctctgttggcactgggaaagaaaccagtcctaatgccttcttaaaccaggctgtggcaggaggccgagctgaggatctacctgtccaggccaggaggctggtggacctgatgaagaatgacacgaggatacactttcaggaagactggaagataataaccctgtttataggcggcaatgacctctgtgatttctgcaatgatctggttcctcgggcatttgtgaacctggtgacggtgcttgagatcgtcaacctgagggagctgtaccaggagaaaaaagtctactgcccaaggatgatcctcaggtctctgtgtccctgtgtcctgaagtttgatgataactcaacagaacttgctaccctcatcgaattcaacaagaagtttcaggagaagacccaccaactgattgagagtgggcgatatgacacaagggaagattttactgtggttgtgcagccgttctttgaaaacgtggacatgccaaagacctcggaaggattgcctgacaactctttcttcgctcctgactgtttccacttcagcagcaagtctcactcccgagcagccagtgctctctggaacaatatgctggagcctgttggccagaagacgactcgtcataagtttgaaaacaagatcaatatcacatgtccgaaccaggtccagccgtttctgaggacctacaagaacagcatgcagggtcatgggacctggctgccatgcagggacagagccccttctgccttgcaccctacctcagtgcatgccctgagacctgcagacatccaagttgtggctgctctgggggattctctgaccgctggcaatggaattggctccaaaccagacgacctccccgatgtcaccacacagtatcggggactgtcatacagtgcaggaggggacggctccctggagaatgtgaccaccttacctaatatccttcgggagtttaacagaaacctcacaggctacgccgtgggcacgggtgatgccaatgacacgaatgcattcctcaatcaagctgttcccggagcaaaggctgaggatcttatgagccaagtccaaactctgatgcagaagatgaaagatgatcatagagtaaatttccatgaagactggaaggtcatcacagtgctgatcggaggcagcgatttatgtgactactgcacagattcgaatctgtattctgcagccaactttgttcaccatctccgcaatgccttggacgtcctgcatagagaggtgcccagagtcctggtcaacctcgtggacttcctgaaccccactatcatgcggcaggtgttcctgggaaacccagacaagtgcccagtgcagcaggccagcgttttgtgtaactgcgttctgaccctgcgggagaactcccaagagctagccaggctggaggccttcagccgagcctaccggagcagcatgcgcgagctggtggggtcaggccgctatgacacgcaggaggacttctctgtggtgctgcagcccttcttccagaacatccagctccctgtcctggcggatgggctcccagatacgtccttctttgccccagactgcatccacccaaatcagaaattccactcccagctggccagagccctttggaccaatatgcttgaaccacttggaagcaaaacagagaccctggacctgagagcagagatgcccatcacctgtcccactcagaatgagcccttcctgagaacccctcggaatagtaactacacgtaccccatcaagccagccattgagaactggggcagtgacttcctgtgtacagagtggaaggcttccaatagtgttccaacctctgtccaccagctccgaccagcagacatcaaagtggtggccgccctgggtgactctctgactacagcagtgggagctcgaccaaacaactccagtgacctacccacatcttggaggggactctcttggagcattggaggggatgggaacttggagactcacaccacactgcccaacattctgaagaagttcaacccttacctccttggcttctctaccagcacctgggaggggacagcaggactaaatgtggcagcggaaggggccagagctagggacatgccagcccaggcctgggacctggtagagcgaatgaaaaacagccccgacatcaacctggagaaagactggaagctggtcacactcttcattggggtcaacgacttgtgtcattactgtgagaatccggaggcccacttggccacggaatatgttcagcacatccaacaggccctggacatcctctctgaggagctcccaagggctttcgtcaacgtggtggaggtcatggagctggctagcctgtaccagggccaaggcgggaaatgtgccatgctggcagctcagaacaactgcacttgcctcagacactcgcaaagctccctggagaagcaagaactgaagaaagtgaactggaacctccagcatggcatctccagtttctcctactggcaccaatacacacagcgtgaggactttgcggttgtggtgcagcctttcttccaaaacacactcaccccactgaacgagagaggggacactgacctcaccttcttctccgaggactgttttcacttctcagaccgcgggcatgccgagatggccatcgcactctggaacaacatgctggaaccagtgggccgcaagactacctccaacaacttcacccacagccgagccaaactcaagtgcccctctcctgagagcccttacctctacaccctgcggaacagccgattgctcccagaccaggctgaagaagcccccgaggtgctctactgggctgtcccagtggcagcgggagtcggccttgtggtgggcatcatcgggacagtggtctggaggtgcaggagaggtggccggagggaagatcctccaatgagcctgcgcactgtggccctctaggcccgggggtgggtcctcaccctaaactccctatagccactctcttcaccgccctctgccccagccactcccggccaccaggacatgcttcaatgcctggtgccataggaagcccaggggacagtcacaacttcttggggcctgggcttcttccaggcctatgctcctggaatggatacatttaaataaagtccaaagctattttattcctgggtttgcctgcgtgaagcactcaccttccatctcttgtgcagcccaggtgtgggagctgccactttttgtggcctgcctccagcagggctgcccaagccacgaccaaccagagcccaaactgcctgccaccacgagcatatcctcaagtcaccaaacccactatttcaaaggcagaaaaaatgctggtcaccaggtggtggctggaattttggagctggctggttgccattcagtccaatccaacacatacctattaagcaactgttttgtatccaggacaatgcgaagcactgaggtgcctcctaggctgtgcatgtcgcagcctggcagagaggtcaaactccttcaataaccaagaagccacgtgatgatgtgtaactactagggcatcagtaggtaaatgtgtctgattgttttaaagaatagaaagggttcttcggggaaagtttcttgggggagagcaaccttcacatgtcattttgggaaaaggaataaaaaatgattgggacacaa

SEQ ID NO: 1196 - DNA, 4373 bp, Homo sapiens
ggcggcgcgcaagggacgtgcggagtgagtggcgctgcgggtggggccgtcggcggcgctggtgagctttgcggagctgggcggtgccgaggaggaggaggtggcggcctgggtctgacgcggccctgttcgagggggcctctcttgtttatttatttattttccgtgggtgcctccgagtgtgcgcgcgctctcgctacccggcggggagggggtggggggagggcccgggaaaagggggagttggagccggggtcgaaacgccgcgtgacttgtaggtgagagaacgccgagccgtcgccgcagcctccgccgccgagaagcccttgttcccgctgctgggaaggagagtctgtgccgacaagatggcggacggggagctgaacgtggacagcctcatcacccggctgctggaggttcataggctgaagccggctgacatcaacgtaattggagccctgggtgactctctcacggcaggcaatggggccgggtccacacctgggaacgtcttggacgtcttgactcagtaccgaggcctgtcctggagcgtcggcggagatgagaacatcggcaccgttaccaccctggcgaacatcctccgggaattcaacccttccctgaagggcttctctgttggcactgggaaagaaaccagtcctaatgccttcttaaaccaggctgtggcaggaggccgagctgaggatctacctgtccaggccaggaggctggtggacctgatgaagaatgacacgaggatacactttcaggaagactggaagataataaccctgtttataggcggcaatgacctctgtgatttctgcaatgatctggtccactattctccccagaacttcacagacaacattggaaaggccctggacatcctccatgctgaggttcctcgggcatttgtgaacctggtgacggtgcttgagatcgtcaacctgagggagctgtaccaggagaaaaaagtctactgcccaaggatgatcctcaggtctctgtgtccctgtgtcctgaagtttgatgataactcaacagaacttgctaccctcatcgaattcaacaagaagtttcaggagaagacccaccaactgattgagagtgggcgatatgacacaagggaagattttactgtggttgtgcagccgttctttgaaaacgtggacatgccaaagacctcggaaggattgcctgacaactctttcttcgctcctgactgtttccacttcagcagcaagtctcactcccgagcagccagtgctctctggaacaatatgctggagcctgttggccagaagacgactcgtcataagtttgaaaacaagatcaatatcacatgtccgaaccaggtccagccgtttctgaggacctacaagaacagcatgcagggtcatgggacctggctgccatgcagggacagagccccttctgccttgcaccctacctcagtgcatgccctgagacctgcagacatccaagttgtggctgctctgggggattctctgaccgctggcaatggaattggctccaaaccagacgacctccccgatgtcaccacacagtatcggggactgtcatacagtgcaggaggggacggctccctggagaatgtgaccaccttacctaatatccttcgggagtttaacagaaacctcacaggctacgccgtgggcacgggtgatgccaatgacacgaatgcattcctcaatcaagctgttcccggagcaaaggctgaggatcttatgagccaagtccaaactctgatgcagaagatgaaagatgatcatagagtaaatttccatgaagactggaaggtcatcacagtgctgatcggaggcagcgatttatgtgactactgcacagattcgaatctgtattctgcagccaactttgttcaccatctccgcaatgccttggacgtcctgcatagagaggtgcccagagtcctggtcaacctcgtggacttcctgaaccccactatcatgcggcaggtgttcctgggaaacccagacaagtgcccagtgcagcaggccagcgttttgtgtaactgcgttctgaccctgcgggagaactcccaagagctagccaggctggaggccttcagccgagcctaccggagcagcatgcgcgagctggtggggtcaggccgctatgacacgcaggaggacttctctgtggtgctgcagcccttcttccagaacatccagctccctgtcctggcggatgggctcccagatacgtccttctttgccccagactgcatccacccaaatcagaaattccactcccagctggccagagccctttggaccaatatgcttgaaccacttggaagcaaaacagagaccctggacctgagagcagagatgcccatcacctgtcccactcagaatgagcccttcctgagaacccctcggaatagtaactacacgtaccccatcaagccagccattgagaactggggcagtgacttcctgtgtacagagtggaaggcttccaatagtgttccaacctctgtccaccagctccgaccagcagacatcaaagtggtggccgccctgggtgactctctgactacagcagtgggagctcgaccaaacaactccagtgacctacccacatcttggaggggactctcttggagcattggaggggatgggaacttggagactcacaccacactgcccaacattctgaagaagttcaacccttacctccttggcttctctaccagcacctgggaggggacagcaggactaaatgtggcagcggaaggggccagagctagggacatgccagcccaggcctgggacctggtagagcgaatgaaaaacagccccgacatcaacctggagaaagactggaagctggtcacactcttcattggggtcaacgacttgtgtcattactgtgagaatccggaggcccacttggccacggaatatgttcagcacatccaacaggccctggacatcctctctgaggagctcccaagggctttcgtcaacgtggtggaggtcatggagctggctagcctgtaccagggccaaggcgggaaatgtgccatgctggcagctcagaacaactgcacttgcctcagacactcgcaaagctccctggagaagcaagaactgaagaaagtgaactggaacctccagcatggcatctccagtttctcctactggcaccaatacacacagcgtgaggactttgcggttgtggtgcagcctttcttccaaaacacactcaccccactgaacgagagaggggacactgacctcaccttcttctccgaggactgttttcacttctcagaccgcgggcatgccgagatggccatcgcactctggaacaacatgctggaaccagtgggccgcaagactacctccaacaacttcacccacagccgagccaaactcaagtgcccctctcctgagagcccttacctctacaccctgcggaacagccgattgctcccagaccaggctgaagaagcccccgaggtgctctactgggctgtcccagtggcagcgggagtcggccttgtggtgggcatcatcgggacagtggtctggaggtgcaggagaggtggccggagggaagatcctccaatgagcctgcgcactgtggccctctaggcccgggggtgggtcctcaccctaaactccctatagccactctcttcaccgccctctgccccagccactcccggccaccaggacatgcttcaatgcctggtgccataggaagcccaggggacagtcacaacttcttggggcctgggcttcttccaggcctatgctcctggaatggatacatttaaataaagtccaaagctattttattcctgggtttgcctgcgtgaagcactcaccttccatctcttgtgcagcccaggtgtgggagctgccactttttgtggcctgcctccagcagggctgcccaagccacgaccaaccagagcccaaactgcctgccaccacgagcatatcctcaagtcaccaaacccactatttcaaaggcagaaaaaatgctggtcaccaggtggtggctggaattttggagctggctggttgccattcagtccaatccaacacatacctattaagcaactgttttgtatccaggacaatgcgaagcactgaggtgcctcctaggctgtgcatgtcgcagcctggcagagaggtcaaactccttcaataaccaagaagccacgtgatgatgtgtaactactagggcatcagtaggtaaatgtgtctgattgttttaaagaatagaaagggttcttcggggaaagtttcttgggggagagcaaccttcacatgtcattttgggaaaaggaataaaaaatgattgggacacaa

SEQ ID NO: 1197 - DNA, 4307 bp, Homo sapiens
ggcggcgcgcaagggacgtgcggagtgagtggcgctgcgggtggggccgtcggcggcgctggtgagctttgcggagctgggcggtgccgaggaggaggaggtggcggcctgggtctgacgcggccctgttcgagggggcctctcttgtttatttatttattttccgtgggtgcctccgagtgtgcgcgcgctctcgctacccggcggggagggggtggggggagggcccgggaaaagggggagttggagccggggtcgaaacgccgcgtgacttgtaggtgagagaacgccgagccgtcgccgcagcctccgccgccgagaagcccttgttcccgctgctgggaaggagagtctgtgccgacaagatggcggacggggagctgaacgtggacagcctcatcacccggctgctggaggttcataggctgaagccggctgacatcaacgtaattggagccctgggtgactctctcacggcaggcaatggggccgggtccacacctgggaacgtcttggacgtcttgactcagtaccgaggcctgtcctggagcgtcggcggagatgagaacatcggcaccgttaccaccctggcgaacatcctccgggaattcaacccttccctgaagggcttctctgttggcactgggaaagaaaccagtcctaatgccttcttaaaccaggctgtggcaggaggccgagctgaggatctacctgtccaggccaggaggctggtggacctgatgaagaatgacacgaggatacactttcaggaagactggaagataataaccctgtttataggcggcaatgacctctgtgatttctgcaatgatctggttcctcgggcatttgtgaacctggtgacggtgcttgagatcgtcaacctgagggagctgtaccaggagaaaaaagtctactgcccaaggatgatcctcaggtctctgtgtccctgtgtcctgaagtttgatgataactcaacagaacttgctaccctcatcgaattcaacaagaagtttcaggagaagacccaccaactgattgagagtgggcgatatgacacaagggaagattttactgtggttgtgcagccgttctttgaaaacgtggacatgccaaagacctcggaaggattgcctgacaactctttcttcgctcctgactgtttccacttcagcagcaagtctcactcccgagcagccagtgctctctggaacaatatgctggagcctgttggccagaagacgactcgtcataagtttgaaaacaagatcaatatcacatgtccgaaccaggtccagccgtttctgaggacctacaagaacagcatgcagggtcatgggacctggctgccatgcagggacagagccccttctgccttgcaccctacctcagtgcatgccctgagacctgcagacatccaagttgtggctgctctgggggattctctgaccgctggcaatggaattggctccaaaccagacgacctccccgatgtcaccacacagtatcggggactgtcatacagtgcaggaggggacggctccctggagaatgtgaccaccttacctaatatccttcgggagtttaacagaaacctcacaggctacgccgtgggcacgggtgatgccaatgacacgaatgcattcctcaatcaagctgttcccggagcaaaggctgaggatcttatgagccaagtccaaactctgatgcagaagatgaaagatgatcatagagtaaatttccatgaagactggaaggtcatcacagtgctgatcggaggcagcgatttatgtgactactgcacagattcgaatctgtattctgcagccaactttgttcaccatctccgcaatgccttggacgtcctgcatagagaggtgcccagagtcctggtcaacctcgtggacttcctgaaccccactatcatgcggcaggtgttcctgggaaacccagacaagtgcccagtgcagcaggccagcgttttgtgtaactgcgttctgaccctgcgggagaactcccaagagctagccaggctggaggccttcagccgagcctaccggagcagcatgcgcgagctggtggggtcaggccgctatgacacgcaggaggacttctctgtggtgctgcagcccttcttccagaacatccagctccctgtcctggcggatgggctcccagatacgtccttctttgccccagactgcatccacccaaatcagaaattccactcccagctggccagagccctttggaccaatatgcttgaaccacttggaagcaaaacagagaccctggacctgagagcagagatgcccatcacctgtcccactcagaatgagcccttcctgagaacccctcggaatagtaactacacgtaccccatcaagccagccattgagaactggggcagtgacttcctgtgtacagagtggaaggcttccaatagtgttccaacctctgtccaccagctccgaccagcagacatcaaagtggtggccgccctgggtgactctctgactacagcagtgggagctcgaccaaacaactccagtgacctacccacatcttggaggggactctcttggagcattggaggggatgggaacttggagactcacaccacactgcccaacattctgaagaagttcaacccttacctccttggcttctctaccagcacctgggaggggacagcaggactaaatgtggcagcggaaggggccagagctagggacatgccagcccaggcctgggacctggtagagcgaatgaaaaacagccccgacatcaacctggagaaagactggaagctggtcacactcttcattggggtcaacgacttgtgtcattactgtgagaatccggaggcccacttggccacggaatatgttcagcacatccaacaggccctggacatcctctctgaggagctcccaagggctttcgtcaacgtggtggaggtcatggagctggctagcctgtaccagggccaaggcgggaaatgtgccatgctggcagctcagaacaactgcacttgcctcagacactcgcaaagctccctggagaagcaagaactgaagaaagtgaactggaacctccagcatggcatctccagtttctcctactggcaccaatacacacagcgtgaggactttgcggttgtggtgcagcctttcttccaaaacacactcaccccactgaacgagagaggggacactgacctcaccttcttctccgaggactgttttcacttctcagaccgcgggcatgccgagatggccatcgcactctggaacaacatgctggaaccagtgggccgcaagactacctccaacaacttcacccacagccgagccaaactcaagtgcccctctcctgagagcccttacctctacaccctgcggaacagccgattgctcccagaccaggctgaagaagcccccgaggtgctctactgggctgtcccagtggcagcgggagtcggccttgtggtgggcatcatcgggacagtggtctggaggtgcaggagaggtggccggagggaagatcctccaatgagcctgcgcactgtggccctctaggcccgggggtgggtcctcaccctaaactccctatagccactctcttcaccgccctctgccccagccactcccggccaccaggacatgcttcaatgcctggtgccataggaagcccaggggacagtcacaacttcttggggcctgggcttcttccaggcctatgctcctggaatggatacatttaaataaagtccaaagctattttattcctgggtttgcctgcgtgaagcactcaccttccatctcttgtgcagcccaggtgtgggagctgccactttttgtggcctgcctccagcagggctgcccaagccacgaccaaccagagcccaaactgcctgccaccacgagcatatcctcaagtcaccaaacccactatttcaaaggcagaaaaaatgctggtcaccaggtggtggctggaattttggagctggctggttgccattcagtccaatccaacacatacctattaagcaactgttttgtatccaggacaatgcgaagcactgaggtgcctcctaggctgtgcatgtcgcagcctggcagagaggtcaaactccttcaataaccaagaagccacgtgatgatgtgtaactactagggcatcagtaggtaaatgtgtctgattgttttaaagaatagaaagggttcttcggggaaagtttcttgggggagagcaaccttcacatgtcattttgggaaaaggaataaaaaatgattgggacacaa

SEQ ID NO: 1198 - DNA, 5465 bp, Homo sapiens
ggcggcgcgcaagggacgtgcggagtgagtggcgctgcgggtggggccgtcggcggcgctggtgagctttgcggagctgggcggtgccgaggaggaggaggtggcggcctgggtctgacgcggccctgttcgagggggcctctcttgtttatttatttattttccgtgggtgcctccgagtgtgcgcgcgctctcgctacccggcggggagggggtggggggagggcccgggaaaagggggagttggagccggggtcgaaacgccgcgtgacttgtaggtgagagaacgccgagccgtcgccgcagcctccgccgccgagaagcccttgttcccgctgctgggaaggagagtctgtgccgacaagatggcggacggggagctgaacgtggacagcctcatcacccggctgctggaggggacccctcagatccatacctctcctagaaagagtacattggaagggcagctatggccagagaccctgaagaattctccattcccatgcaacccaaataaattaggagtgaatatgccttctaaatcagttcactctctgaagccttctgatattaaatttgtggcagccattggcaatctggaaattcctccagacccagggacgggcgatctggagaagcaagactggactgaaaggccacagcaggtgtgcatgggagtgatgacagtcctttcagacatcatcagatatttcagtccttctgttccaatgcctgtgtgccacactggaaagagagtcataccccacgatggtgctgaagacttgtggattcaggctcaagaactggtgagaaacatgaaagagaacctgcaacttgactttcaatttgactggaagctcatcaatgtgttcttcagtaatgcaagccagtgttacctgtgcccctctgctcaacagaatgggcttgcggcgggcggcgtggatgagctgatgggggtgctggactacctgcagcaggaggtccccagagcatttgtaaacctggtggacctctctgaggttgcagaggtctctcgtcagtatcacggcacttggctcagccctgcaccagagccctgtaattgctcagaggagaccacccggctggccaaggtggtgatgcagtggtcttatcaggaagcctggaacagcctcctggcctccagcaggtacagtgagcaggagtccttcaccgtggttttccagcctttcttctatgagaccaccccatctctacactcggaggacccccgactccaggattctaccacgctggcctggcatctctggaataggatgatggagccagcaggagagaaagatgagccattgagtgtaaaacacgggaggccaatgaagtgtccctctcaggagagcccctatctgttcagctacagaaacagcaactacctgaccagactgcagaaaccccaagacaagcttgaggtaagagaaggagcggaaatcagatgtcctgacaaagacccctccgatacggttcccacctcagttcataggctgaagccggctgacatcaacgtaattggagccctgggtgactctctcacggcaggcaatggggccgggtccacacctgggaacgtcttggacgtcttgactcagtaccgaggcctgtcctggagcgtcggcggagatgagaacatcggcaccgttaccaccctggcgaacatcctccgggaattcaacccttccctgaagggcttctctgttggcactgggaaagaaaccagtcctaatgccttcttaaaccaggctgtggcaggaggccgagctgaggatctacctgtccaggccaggaggctggtggacctgatgaagaatgacacgaggatacactttcaggaagactggaagataataaccctgtttataggcggcaatgacctctgtgatttctgcaatgatctggtccactattctccccagaacttcacagacaacattggaaaggccctggacatcctccatgctgaggttcctcgggcatttgtgaacctggtgacggtgcttgagatcgtcaacctgagggagctgtaccaggagaaaaaagtctactgcccaaggatgatcctcaggtctctgtgtccctgtgtcctgaagtttgatgataactcaacagaacttgctaccctcatcgaattcaacaagaagtttcaggagaagacccaccaactgattgagagtgggcgatatgacacaagggaagattttactgtggttgtgcagccgttctttgaaaacgtggacatgccaaagacctcggaaggattgcctgacaactctttcttcgctcctgactgtttccacttcagcagcaagtctcactcccgagcagccagtgctctctggaacaatatgctggagcctgttggccagaagacgactcgtcataagtttgaaaacaagatcaatatcacatgtccgaaccaggtccagccgtttctgaggacctacaagaacagcatgcagggtcatgggacctggctgccatgcagggacagagccccttctgccttgcaccctacctcagtgcatgccctgagacctgcagacatccaagttgtggctgctctgggggattctctgaccgctggcaatggaattggctccaaaccagacgacctccccgatgtcaccacacagtatcggggactgtcatacagtgcaggaggggacggctccctggagaatgtgaccaccttacctaatatccttcgggagtttaacagaaacctcacaggctacgccgtgggcacgggtgatgccaatgacacgaatgcattcctcaatcaagctgttcccggagcaaaggctgaggatcttatgagccaagtccaaactctgatgcagaagatgaaagatgatcatagagtaaatttccatgaagactggaaggtcatcacagtgctgatcggaggcagcgatttatgtgactactgcacagattcgaatctgtattctgcagccaactttgttcaccatctccgcaatgccttggacgtcctgcatagagaggtgcccagagtcctggtcaacctcgtggacttcctgaaccccactatcatgcggcaggtgttcctgggaaacccagacaagtgcccagtgcagcaggccagcgttttgtgtaactgcgttctgaccctgcgggagaactcccaagagctagccaggctggaggccttcagccgagcctaccggagcagcatgcgcgagctggtggggtcaggccgctatgacacgcaggaggacttctctgtggtgctgcagcccttcttccagaacatccagctccctgtcctggcggatgggctcccagatacgtccttctttgccccagactgcatccacccaaatcagaaattccactcccagctggccagagccctttggaccaatatgcttgaaccacttggaagcaaaacagagaccctggacctgagagcagagatgcccatcacctgtcccactcagaatgagcccttcctgagaacccctcggaatagtaactacacgtaccccatcaagccagccattgagaactggggcagtgacttcctgtgtacagagtggaaggcttccaatagtgttccaacctctgtccaccagctccgaccagcagacatcaaagtggtggccgccctgggtgactctctgactacagcagtgggagctcgaccaaacaactccagtgacctacccacatcttggaggggactctcttggagcattggaggggatgggaacttggagactcacaccacactgcccaacattctgaagaagttcaacccttacctccttggcttctctaccagcacctgggaggggacagcaggactaaatgtggcagcggaaggggccagagctagggacatgccagcccaggcctgggacctggtagagcgaatgaaaaacagccccgacatcaacctggagaaagactggaagctggtcacactcttcattggggtcaacgacttgtgtcattactgtgagaatccggaggcccacttggccacggaatatgttcagcacatccaacaggccctggacatcctctctgaggagctcccaagggctttcgtcaacgtggtggaggtcatggagctggctagcctgtaccagggccaaggcgggaaatgtgccatgctggcagctcagaacaactgcacttgcctcagacactcgcaaagctccctggagaagcaagaactgaagaaagtgaactggaacctccagcatggcatctccagtttctcctactggcaccaatacacacagcgtgaggactttgcggttgtggtgcagcctttcttccaaaacacactcaccccactgaacgagagaggggacactgacctcaccttcttctccgaggactgttttcacttctcagaccgcgggcatgccgagatggccatcgcactctggaacaacatgctggaaccagtgggccgcaagactacctccaacaacttcacccacagccgagccaaactcaagtgcccctctcctgagagcccttacctctacaccctgcggaacagccgattgctcccagaccaggctgaagaagcccccgaggtgctctactgggctgtcccagtggcagcgggagtcggccttgtggtgggcatcatcgggacagtggtctggaggtgcaggagaggtggccggagggaagatcctccaatgagcctgcgcactgtggccctctaggcccgggggtgggtcctcaccctaaactccctatagccactctcttcaccgccctctgccccagccactcccggccaccaggacatgcttcaatgcctggtgccataggaagcccaggggacagtcacaacttcttggggcctgggcttcttccaggcctatgctcctggaatggatacatttaaataaagtccaaagctattttattcctgggtttgcctgcgtgaagcactcaccttccatctcttgtgcagcccaggtgtgggagctgccactttttgtggcctgcctccagcagggctgcccaagccacgaccaaccagagcccaaactgcctgccaccacgagcatatcctcaagtcaccaaacccactatttcaaaggcagaaaaaatgctggtcaccaggtggtggctggaattttggagctggctggttgccattcagtccaatccaacacatacctattaagcaactgttttgtatccaggacaatgcgaagcactgaggtgcctcctaggctgtgcatgtcgcagcctggcagagaggtcaaactccttcaataaccaagaagccacgtgatgatgtgtaactactagggcatcagtaggtaaatgtgtctgattgttttaaagaatagaaagggttcttcggggaaagtttcttgggggagagcaaccttcacatgtcattttgggaaaaggaataaaaaatgattgggacacaa

SEQ ID NO: 1199 - DNA, 5195 bp, Homo sapiens
ggcggcgcgcaagggacgtgcggagtgagtggcgctgcgggtggggccgtcggcggcgctggtgagctttgcggagctgggcggtgccgaggaggaggaggtggcggcctgggtctgacgcggccctgttcgagggggcctctcttgtttatttatttattttccgtgggtgcctccgagtgtgcgcgcgctctcgctacccggcggggagggggtggggggagggcccgggaaaagggggagttggagccggggtcgaaacgccgcgtgacttgtaggtgagagaacgccgagccgtcgccgcagcctccgccgccgagaagcccttgttcccgctgctgggaaggagagtctgtgccgacaagatggcggacggggagctgaacgtggacagcctcatcacccggctgctggaggtcctttcagacatcatcagatatttcagtccttctgttccaatgcctgtgtgccacactggaaagagagtcataccccacgatggtgctgaagacttgtggattcaggctcaagaactggtgagaaacatgaaagagaacctgcaacttgactttcaatttgactggaagctcatcaatgtgttcttcagtaatgcaagccagtgttacctgtgcccctctgctcaacagaatgggcttgcggcgggcggcgtggatgagctgatgggggtgctggactacctgcagcaggaggtccccagagcatttgtaaacctggtggacctctctgaggttgcagaggtctctcgtcagtatcacggcacttggctcagccctgcaccagagccctgtaattgctcagaggagaccacccggctggccaaggtggtgatgcagtggtcttatcaggaagcctggaacagcctcctggcctccagcaggtacagtgagcaggagtccttcaccgtggttttccagcctttcttctatgagaccaccccatctctacactcggaggacccccgactccaggattctaccacgctggcctggcatctctggaataggatgatggagccagcaggagagaaagatgagccattgagtgtaaaacacgggaggccaatgaagtgtccctctcaggagagcccctatctgttcagctacagaaacagcaactacctgaccagactgcagaaaccccaagacaagcttgaggtaagagaaggagcggaaatcagatgtcctgacaaagacccctccgatacggttcccacctcagttcataggctgaagccggctgacatcaacgtaattggagccctgggtgactctctcacggcaggcaatggggccgggtccacacctgggaacgtcttggacgtcttgactcagtaccgaggcctgtcctggagcgtcggcggagatgagaacatcggcaccgttaccaccctggcgaacatcctccgggaattcaacccttccctgaagggcttctctgttggcactgggaaagaaaccagtcctaatgccttcttaaaccaggctgtggcaggaggccgagctgaggatctacctgtccaggccaggaggctggtggacctgatgaagaatgacacgaggatacactttcaggaagactggaagataataaccctgtttataggcggcaatgacctctgtgatttctgcaatgatctggtccactattctccccagaacttcacagacaacattggaaaggccctggacatcctccatgctgaggttcctcgggcatttgtgaacctggtgacggtgcttgagatcgtcaacctgagggagctgtaccaggagaaaaaagtctactgcccaaggatgatcctcaggtctctgtgtccctgtgtcctgaagtttgatgataactcaacagaacttgctaccctcatcgaattcaacaagaagtttcaggagaagacccaccaactgattgagagtgggcgatatgacacaagggaagattttactgtggttgtgcagccgttctttgaaaacgtggacatgccaaagacctcggaaggattgcctgacaactctttcttcgctcctgactgtttccacttcagcagcaagtctcactcccgagcagccagtgctctctggaacaatatgctggagcctgttggccagaagacgactcgtcataagtttgaaaacaagatcaatatcacatgtccgaaccaggtccagccgtttctgaggacctacaagaacagcatgcagggtcatgggacctggctgccatgcagggacagagccccttctgccttgcaccctacctcagtgcatgccctgagacctgcagacatccaagttgtggctgctctgggggattctctgaccgctggcaatggaattggctccaaaccagacgacctccccgatgtcaccacacagtatcggggactgtcatacagtgcaggaggggacggctccctggagaatgtgaccaccttacctaatatccttcgggagtttaacagaaacctcacaggctacgccgtgggcacgggtgatgccaatgacacgaatgcattcctcaatcaagctgttcccggagcaaaggctgaggatcttatgagccaagtccaaactctgatgcagaagatgaaagatgatcatagagtaaatttccatgaagactggaaggtcatcacagtgctgatcggaggcagcgatttatgtgactactgcacagattcgaatctgtattctgcagccaactttgttcaccatctccgcaatgccttggacgtcctgcatagagaggtgcccagagtcctggtcaacctcgtggacttcctgaaccccactatcatgcggcaggtgttcctgggaaacccagacaagtgcccagtgcagcaggccagcgttttgtgtaactgcgttctgaccctgcgggagaactcccaagagctagccaggctggaggccttcagccgagcctaccggagcagcatgcgcgagctggtggggtcaggccgctatgacacgcaggaggacttctctgtggtgctgcagcccttcttccagaacatccagctccctgtcctggcggatgggctcccagatacgtccttctttgccccagactgcatccacccaaatcagaaattccactcccagctggccagagccctttggaccaatatgcttgaaccacttggaagcaaaacagagaccctggacctgagagcagagatgcccatcacctgtcccactcagaatgagcccttcctgagaacccctcggaatagtaactacacgtaccccatcaagccagccattgagaactggggcagtgacttcctgtgtacagagtggaaggcttccaatagtgttccaacctctgtccaccagctccgaccagcagacatcaaagtggtggccgccctgggtgactctctgactacagcagtgggagctcgaccaaacaactccagtgacctacccacatcttggaggggactctcttggagcattggaggggatgggaacttggagactcacaccacactgcccaacattctgaagaagttcaacccttacctccttggcttctctaccagcacctgggaggggacagcaggactaaatgtggcagcggaaggggccagagctagggacatgccagcccaggcctgggacctggtagagcgaatgaaaaacagccccgacatcaacctggagaaagactggaagctggtcacactcttcattggggtcaacgacttgtgtcattactgtgagaatccggaggcccacttggccacggaatatgttcagcacatccaacaggccctggacatcctctctgaggagctcccaagggctttcgtcaacgtggtggaggtcatggagctggctagcctgtaccagggccaaggcgggaaatgtgccatgctggcagctcagaacaactgcacttgcctcagacactcgcaaagctccctggagaagcaagaactgaagaaagtgaactggaacctccagcatggcatctccagtttctcctactggcaccaatacacacagcgtgaggactttgcggttgtggtgcagcctttcttccaaaacacactcaccccactgaacgagagaggggacactgacctcaccttcttctccgaggactgttttcacttctcagaccgcgggcatgccgagatggccatcgcactctggaacaacatgctggaaccagtgggccgcaagactacctccaacaacttcacccacagccgagccaaactcaagtgcccctctcctgagagcccttacctctacaccctgcggaacagccgattgctcccagaccaggctgaagaagcccccgaggtgctctactgggctgtcccagtggcagcgggagtcggccttgtggtgggcatcatcgggacagtggtctggaggtgcaggagaggtggccggagggaagatcctccaatgagcctgcgcactgtggccctctaggcccgggggtgggtcctcaccctaaactccctatagccactctcttcaccgccctctgccccagccactcccggccaccaggacatgcttcaatgcctggtgccataggaagcccaggggacagtcacaacttcttggggcctgggcttcttccaggcctatgctcctggaatggatacatttaaataaagtccaaagctattttattcctgggtttgcctgcgtgaagcactcaccttccatctcttgtgcagcccaggtgtgggagctgccactttttgtggcctgcctccagcagggctgcccaagccacgaccaaccagagcccaaactgcctgccaccacgagcatatcctcaagtcaccaaacccactatttcaaaggcagaaaaaatgctggtcaccaggtggtggctggaattttggagctggctggttgccattcagtccaatccaacacatacctattaagcaactgttttgtatccaggacaatgcgaagcactgaggtgcctcctaggctgtgcatgtcgcagcctggcagagaggtcaaactccttcaataaccaagaagccacgtgatgatgtgtaactactagggcatcagtaggtaaatgtgtctgattgttttaaagaatagaaagggttcttcggggaaagtttcttgggggagagcaaccttcacatgtcattttgggaaaaggaataaaaaatgattgggacacaa

SEQ ID NO: 1200 - DNA, 3290 bp, Homo sapiens
gctgcgtgacgcggcggcgcgcaagggacgtgcggagtgagtggcgctgcgggtggggccgtcggcggcgctgtacgaggatgtcgtccaggaaagattgtgcagatgactgaagcagaagttcgaggcttatgtatcaagtctcgggagatctttctcagccagcctattcttttggaattggaagcaccgctgaaaatttgtgacatcctccgggaattcaacccttccctgaagggcttctctgttggcactgggaaagaaaccagtcctaatgccttcttaaaccaggctgtggcaggaggccgagctgaggatctacctgtccaggccaggaggctggtggacctgatgaagaatgacacgaggatacactttcaggaagactggaagataataaccctgtttataggcggcaatgacctctgtgatttctgcaatgatctggtccactattctccccagaacttcacagacaacattggaaaggccctggacatcctccatgctgaggttcctcgggcatttgtgaacctggtgacggtgcttgagatcgtcaacctgagggagctgtaccaggagaaaaaagtctactgcccaaggatgatcctcaggtctctgtgtccctgtgtcctgaagtttgatgataactcaacagaacttgctaccctcatcgaattcaacaagaagtttcaggagaagacccaccaactgattgagagtgggcgatatgacacaagggaagattttactgtggttgtgcagccgttctttgaaaacgtggacatgccaaagacctcggaaggattgcctgacaactctttcttcgctcctgactgtttccacttcagcagcaagtctcactcccgagcagccagtgctctctggaacaatatgctggagcctgttggccagaagacgactcgtcataagtttgaaaacaagatcaatatcacatgtccgaaccaggtccagccgtttctgaggacctacaagaacagcatgcagggtcatgggacctggctgccatgcagggacagagccccttctgccttgcaccctacctcagtgcatgccctgagacctgcagacatccaagttgtggctgctctgggggattctctgaccgctggcaatggaattggctccaaaccagacgacctccccgatgtcaccacacagtatcggggactgtcatacagagaaagtaaaccagggttcttatcagactcctgggtcagcaaatccaacaggaaatgcaccagaaaagcaccaaatccctgaatcttcacctccccgcttgcatgtatacgtgtacacgtggtgttcctacgtctctgtttactgtctttatgtgtttattcatgttgtcttgtagtcacacagctgcctttacatatatgtacacatctgcacagaaaacctctgaaacccatcgcacacttcgagaggccataaccaagacacaatcacaatcagccatgtcttgaaagattagcaattcgacaagaggaaagggtgagaaagggcatcccgaacacggaagtggagaagctcagggtgtgtcaggcgagcggttgcgtgtagatattctcaagtttctttctctcctaataaagttctcattcctgtaggcttcaaagtaagtggcgagtagctcagaatttacctgggaaaacaactagaacgaagctggccacaagggggcagcgtgctaatgagtggcggagccaggacagcacctttgctgccgcctcccttttcttctgagtcagtttgcttcctggggaagtgacagggagcagggagggggtgatcaagactgtgaaggttctctggccagacctgagcagagtcccagagaggatgggtttccagggcgagagggaggcgccatcactcggcctgtaccacccacaacgaggacctaggttgtccttagcatgaggacatcaacctctcaagaacagaggtcagtgccttcctgcgccaaggtccctgcgtttccacaagtccttggtcaggtacctggtcctaacaggctgccatggaacaaatcagagcctcactgactcaccattctgctcctaatgaggctacaagaaaaaaaaccagaggagagaaagcagagcttattacaatcaggaaagagcatgaggttctggcagctgcacttggtctcagctaaagaaggcaatgacctcatacgatagcatgggaaacaaaaatcaagcagacgaaccacattgcaggtgatagatacgcgacgtgcacctggtggggcagcctggggaagtgaggtgatgtgccctactttaaaacagatcgaccagctgggctcctgggattcagatatgaaccagcagtcctctactaaaagtttctttctgcagcgatgggaaaattcagccattgctctgtttcttccaacaagtgaagtccattacagcctaatgtctcaatcttttagttctagctctaaggcctcaggttcaatggctgctgtccctttaaacccttcatttgtcctaaatgtttcaaatagctgcccccaaatgcacgtgtgttaaagatggaagctctaggtcggggtctgagagacagcttgacacttggtagaatacatagactactgtgtctcaaagtgtgttccatggaacattaactccagacctgttcctggagaagagaaaatcctttgtatctgagggggaaacattaccataaccttcctttggggaattcatgtgtgtattagcatattaaaggctctcataaggcctgcaatgcagaaatctatttaagttttatctgtttaacccaatgtttcccttaattccagaacattttctttgttcataacacctgttaacacctcctgaaagtgttcacgtagtagacttatctgagaaaagcaatttttgagccgttaaagcttctagattggacaaactaggcaattaatgatactagatcaattcagaatgcaatttgagcctcttccccctgggaaacaaagtgaaaagagtggatctcatggaattaggggagaagtagacccagaattcatggggggtgggtggctgtgaacaggacctgcagaagaggctcggctgtgaatatttccaaggccccttgacctgtgagattctgtagtgaacggttccagctttggccagcttaacaatgtgctgggccccaaggtcttgagagcattgccttttcttccattgaaataagttcgcttgtttgggaccattcaaaggatcaaaataaaatttacttaccaa

SEQ ID NO: 1201 - DNA, 3287 bp, Homo sapiens
ggcggcgcgcaagggacgtgcggagtgagtggcgctgcgggtggggccgtcggcggcgctggtgagctttgcggagctgggcggtgccgaggaggaggaggtggcggcctgggtctgacgcggccctgttcgagggggcctctcttgtttatttatttattttccgtgggtgcctccgagtgtgcgcgcgctctcgctacccggcggggagggggtggggggagggcccgggaaaagggggagttggagccggggtcgaaacgccgcgtgacttgtaggtgagagaacgccgagccgtcgccgcagcctccgccgccgagaagcccttgttcccgctgctgggaaggagagtctgtgccgacaagatggcggacggggagctgaacgtggacagcctcatcacccggctgctggaggtacgaggatgtcgtccaggaaagattgtgcagatgactgaagcagaagttcgaggcttatgtatcaagtctcgggagatctttctcagccagcctattcttttggaattggaagcaccgctgaaaatttgtgatatccttcgggagtttaacagaaacctcacaggctacgccgtgggcacgggtgatgccaatgacacgaatgcattcctcaatcaagctgttcccggagcaaaggctgaggatcttatgagccaagtccaaactctgatgcagaagatgaaagatgatcatagagtaaatttccatgaagactggaaggtcatcacagtgctgatcggaggcagcgatttatgtgactactgcacagattcgaatctgtattctgcagccaactttgttcaccatctccgcaatgccttggacgtcctgcatagagaggtgcccagagtcctggtcaacctcgtggacttcctgaaccccactatcatgcggcaggtgttcctgggaaacccagacaagtgcccagtgcagcaggccagcgttttgtgtaactgcgttctgaccctgcgggagaactcccaagagctagccaggctggaggccttcagccgagcctaccggagcagcatgcgcgagctggtggggtcaggccgctatgacacgcaggaggacttctctgtggtgctgcagcccttcttccagaacatccagctccctgtcctggcggatgggctcccagatacgtccttctttgccccagactgcatccacccaaatcagaaattccactcccagctggccagagccctttggaccaatatgcttgaaccacttggaagcaaaacagagaccctggacctgagagcagagatgcccatcacctgtcccactcagaatgagcccttcctgagaacccctcggaatagtaactacacgtaccccatcaagccagccattgagaactggggcagtgacttcctgtgtacagagtggaaggcttccaatagtgttccaacctctgtccaccagctccgaccagcagacatcaaagtggtggccgccctgggtgactctctgactacagcagtgggagctcgaccaaacaactccagtgacctacccacatcttggaggggactctcttggagcattggaggggatgggaacttggagactcacaccacactgcccaacattctgaagaagttcaacccttacctccttggcttctctaccagcacctgggaggggacagcaggactaaatgtggcagcggaaggggccagagctagggacatgccagcccaggcctgggacctggtagagcgaatgaaaaacagccccgacatcaacctggagaaagactggaagctggtcacactcttcattggggtcaacgacttgtgtcattactgtgagaatccggaggcccacttggccacggaatatgttcagcacatccaacaggccctggacatcctctctgaggagctcccaagggctttcgtcaacgtggtggaggtcatggagctggctagcctgtaccagggccaaggcgggaaatgtgccatgctggcagctcagaacaactgcacttgcctcagacactcgcaaagctccctggagaagcaagaactgaagaaagtgaactggaacctccagcatggcatctccagtttctcctactggcaccaatacacacagcgtgaggactttgcggttgtggtgcagcctttcttccaaaacacactcaccccactgaacgagagaggggacactgacctcaccttcttctccgaggactgttttcacttctcagaccgcgggcatgccgagatggccatcgcactctggaacaacatgctggaaccagtgggccgcaagactacctccaacaacttcacccacagccgagccaaactcaagtgcccctctcctgagagcccttacctctacaccctgcggaacagccgattgctcccagaccaggctgaagaagcccccgaggtgctctactgggctgtcccagtggcagcgggagtcggccttgtggtgggcatcatcgggacagtggtctggaggtgcaggagaggtggccggagggaagatcctccaatgagcctgcgcactgtggccctctaggcccgggggtgggtcctcaccctaaactccctatagccactctcttcaccgccctctgccccagccactcccggccaccaggacatgcttcaatgcctggtgccataggaagcccaggggacagtcacaacttcttggggcctgggcttcttccaggcctatgctcctggaatggatacatttaaataaagtccaaagctattttattcctgggtttgcctgcgtgaagcactcaccttccatctcttgtgcagcccaggtgtgggagctgccactttttgtggcctgcctccagcagggctgcccaagccacgaccaaccagagcccaaactgcctgccaccacgagcatatcctcaagtcaccaaacccactatttcaaaggcagaaaaaatgctggtcaccaggtggtggctggaattttggagctggctggttgccattcagtccaatccaacacatacctattaagcaactgttttgtatccaggacaatgcgaagcactgaggtgcctcctaggctgtgcatgtcgcagcctggcagagaggtcaaactccttcaataaccaagaagccacgtgatgatgtgtaactactagggcatcagtaggtaaatgtgtctgattgttttaaagaatagaaagggttcttcggggaaagtttcttgggggagagcaaccttcacatgtcattttgggaaaaggaataaaaaatgattgggacacaa

SEQ ID NO: 1202 - DNA, 5162 bp, Homo sapiens
ggcggcgcgcaagggacgtgcggagtgagtggcgctgcgggtggggccgtcggcggcgctggtgagctttgcggagctgggcggtgccgaggaggaggaggtggcggcctgggtctgacgcggccctgttcgagggggcctctcttgtttatttatttattttccgtgggtgcctccgagtgtgcgcgcgctctcgctacccggcggggagggggtggggggagggcccgggaaaagggggagttggagccggggtcgaaacgccgcgtgacttgtaggtgagagaacgccgagccgtcgccgcagcctccgccgccgagaagcccttgttcccgctgctgggaaggagagtctgtgccgacaagatggcggacggggagctgaacgtggacagcctcatcacccggctgctggaggtcctttcagacatcatcagatatttcagtccttctgttccaatgcctgtgtgccacactggaaagagagtcataccccacgatggtgctgaagacttgtggattcaggctcaagaactggtgagaaacatgaaagagaacctgcaacttgactttcaatttgactggaagctcatcaatgtgttcttcagtaatgcaagccagtgttacctgtgcccctctgctcaacaggcaccctcacttagcacggttctcctctcacagaatgggcttgcggcgggcggcgtggatgagctgatgggggtgctggactacctgcagcaggaggtccccagagcatttgtaaacctggtggacctctctgaggttgcagaggtctctcgtcagtatcacggcacttggctcagccctgcaccagagccctgtaattgctcagaggagaccacccggctggccaaggtggtgatgcagtggtcttatcaggaagcctggaacagcctcctggcctccagcaggtacagtgagcaggagtccttcaccgtggttttccagcctttcttctatgagaccaccccatctctacactcggaggacccccgactccaggattctaccacgctggcctggcatctctggaataggatgatggagccagcaggagagaaagatgagccattgagtgtaaaacacgggaggccaatgaagtgtccctctcaggagagcccctatctgttcagctacagaaacagcaactacctgaccagactgcagaaaccccaagacaagcttgaggtaagagaaggagcggaaatcagatgtcctgacaaagacccctccgatacggttcccacctcagttcataggctgaagccggctgacatcaacgtaattggagccctgggtgactctctcacggcaggcaatggggccgggtccacacctgggaacgtcttggacgtcttgactcagtaccgaggcctgtcctggagcgtcggcggagatgagaacatcggcaccgttaccaccctggcgaacatcctccgggaattcaacccttccctgaagggcttctctgttggcactgggaaagaaaccagtcctaatgccttcttaaaccaggctgtggcaggaggccgagctgaggatctacctgtccaggccaggaggctggtggacctgatgaagaatgacacgaggatacactttcaggaagactggaagataataaccctgtttataggcggcaatgacctctgtgatttctgcaatgatctggttcctcgggcatttgtgaacctggtgacggtgcttgagatcgtcaacctgagggagctgtaccaggagaaaaaagtctactgcccaaggatgatcctcaggtctctgtgtccctgtgtcctgaagtttgatgataactcaacagaacttgctaccctcatcgaattcaacaagaagtttcaggagaagacccaccaactgattgagagtgggcgatatgacacaagggaagattttactgtggttgtgcagccgttctttgaaaacgtggacatgccaaagacctcggaaggattgcctgacaactctttcttcgctcctgactgtttccacttcagcagcaagtctcactcccgagcagccagtgctctctggaacaatatgctggagcctgttggccagaagacgactcgtcataagtttgaaaacaagatcaatatcacatgtccgaaccaggtccagccgtttctgaggacctacaagaacagcatgcagggtcatgggacctggctgccatgcagggacagagccccttctgccttgcaccctacctcagtgcatgccctgagacctgcagacatccaagttgtggctgctctgggggattctctgaccgctggcaatggaattggctccaaaccagacgacctccccgatgtcaccacacagtatcggggactgtcatacagtgcaggaggggacggctccctggagaatgtgaccaccttacctaatatccttcgggagtttaacagaaacctcacaggctacgccgtgggcacgggtgatgccaatgacacgaatgcattcctcaatcaagctgttcccggagcaaaggctgaggatcttatgagccaagtccaaactctgatgcagaagatgaaagatgatcatagagtaaatttccatgaagactggaaggtcatcacagtgctgatcggaggcagcgatttatgtgactactgcacagattcgaatctgtattctgcagccaactttgttcaccatctccgcaatgccttggacgtcctgcatagagaggtgcccagagtcctggtcaacctcgtggacttcctgaaccccactatcatgcggcaggtgttcctgggaaacccagacaagtgcccagtgcagcaggccagcgttttgtgtaactgcgttctgaccctgcgggagaactcccaagagctagccaggctggaggccttcagccgagcctaccggagcagcatgcgcgagctggtggggtcaggccgctatgacacgcaggaggacttctctgtggtgctgcagcccttcttccagaacatccagctccctgtcctggcggatgggctcccagatacgtccttctttgccccagactgcatccacccaaatcagaaattccactcccagctggccagagccctttggaccaatatgcttgaaccacttggaagcaaaacagagaccctggacctgagagcagagatgcccatcacctgtcccactcagaatgagcccttcctgagaacccctcggaatagtaactacacgtaccccatcaagccagccattgagaactggggcagtgacttcctgtgtacagagtggaaggcttccaatagtgttccaacctctgtccaccagctccgaccagcagacatcaaagtggtggccgccctgggtgactctctgactacagcagtgggagctcgaccaaacaactccagtgacctacccacatcttggaggggactctcttggagcattggaggggatgggaacttggagactcacaccacactgcccaacattctgaagaagttcaacccttacctccttggcttctctaccagcacctgggaggggacagcaggactaaatgtggcagcggaaggggccagagctagggacatgccagcccaggcctgggacctggtagagcgaatgaaaaacagccccgacatcaacctggagaaagactggaagctggtcacactcttcattggggtcaacgacttgtgtcattactgtgagaatccggaggcccacttggccacggaatatgttcagcacatccaacaggccctggacatcctctctgaggagctcccaagggctttcgtcaacgtggtggaggtcatggagctggctagcctgtaccagggccaaggcgggaaatgtgccatgctggcagctcagaacaactgcacttgcctcagacactcgcaaagctccctggagaagcaagaactgaagaaagtgaactggaacctccagcatggcatctccagtttctcctactggcaccaatacacacagcgtgaggactttgcggttgtggtgcagcctttcttccaaaacacactcaccccactgaacgagagaggggacactgacctcaccttcttctccgaggactgttttcacttctcagaccgcgggcatgccgagatggccatcgcactctggaacaacatgctggaaccagtgggccgcaagactacctccaacaacttcacccacagccgagccaaactcaagtgcccctctcctgagagcccttacctctacaccctgcggaacagccgattgctcccagaccaggctgaagaagcccccgaggtgctctactgggctgtcccagtggcagcgggagtcggccttgtggtgggcatcatcgggacagtggtctggaggtgcaggagaggtggccggagggaagatcctccaatgagcctgcgcactgtggccctctaggcccgggggtgggtcctcaccctaaactccctatagccactctcttcaccgccctctgccccagccactcccggccaccaggacatgcttcaatgcctggtgccataggaagcccaggggacagtcacaacttcttggggcctgggcttcttccaggcctatgctcctggaatggatacatttaaataaagtccaaagctattttattcctgggtttgcctgcgtgaagcactcaccttccatctcttgtgcagcccaggtgtgggagctgccactttttgtggcctgcctccagcagggctgcccaagccacgaccaaccagagcccaaactgcctgccaccacgagcatatcctcaagtcaccaaacccactatttcaaaggcagaaaaaatgctggtcaccaggtggtggctggaattttggagctggctggttgccattcagtccaatccaacacatacctattaagcaactgttttgtatccaggacaatgcgaagcactgaggtgcctcctaggctgtgcatgtcgcagcctggcagagaggtcaaactccttcaataaccaagaagccacgtgatgatgtgtaactactagggcatcagtaggtaaatgtgtctgattgttttaaagaatagaaagggttcttcggggaaagtttcttgggggagagcaaccttcacatgtcattttgggaaaaggaataaaaaatgattgggacacaa

SEQ ID NO: 1203-1204 - skipped (2 entries)

SEQ ID NO: 1205 - DNA, 2147 bp, Homo sapiens
gcccagggcggggaatcgcgtaatggcggacacaggcagggcgagcgcggctgggggcgtagcgcgctgagggggtccggccgtttggcagcccgcgaggcggtccgcgggagcacactctgtgcggagactgggcggccggccgacccttcctgtcgctgacggcgactgcgggaggccaggttgtttttcaccattcagaacattgcctgaagcaggtccaccatgccgttagtaacgaggaacatcgagccaaggcacctgtgccgtcagacgttgcctagcgttagaagcgagctggaatgcgtgaccaacatcaccctggcaaatgtcatccgacagctgggcagcctgaatgggagcttgcctgattgtcaacccatcggcctggaccccagagcccacccagttgagcgtgtgcagagggccccgagtgcggggcgacgctcaggccgttgcagagaccaccctggagatgctgatgaagacaggcctttcctgctgagcccagcctatcttcgcagcctgctcagaaaggggaactgaggctcatggatatacagtgagtcctacctcctagcctgaggactcttccctgcgccttgatgacctgagagaactgggaggagaaaggggttgtgacaatgaccaggactcagggcagaggtggaaaccagagtgcctgatgtgtgcagctgctgacccccccaggacacctctctaccggagtctgtggaagcagagaactgggaggccaaggattggtatgaagaattaaatgaaacgatgcctggacagcttccagcccagtacctggcgcgcagtaggtgctcactaaacctgagctgcgatggtcctttccaggcgctgtccacgccccgaggcctgggctcaggccgaagttgctccacagcacccccagctgacagccagcgactggcagagcccccaggcacgggggccctctctcttccagagatctccagtgtgacagcccaggcggcagagccgagggtcctggtcccggcttctcgcaccctcatgtcagccccggccccgcccggcggcctgcggaggacaaggtcaggatgcgtgtgaagccccagggcctggtggtgacttccagtgccgtgtgcagctctcctgactacctccgggaacccaacccgtcctgtctcacaggcccgctgccccacaccggtcggagacggcagcagctcccgacgctgctgggacaacgggcgggtgaacctgcgaccagtggtgcagctgattgacatcatgaaggacctgacacgcctctcccaggacctgcagcacagtggtgtacacctggactgtggtgggctccgactgagccgcccgcctgcaccgccacccggcgacctacagtacagcttcttctcctcacccagtttggccaacagcatccgtagccctgaggagcgggccaccccacacgccaagtcggagcggcccagccatcccctctacgagcctgagcctgagcctagggacagtccccagcctggccaaggccatagtcccggagccacggctgcggccacgggtctgcccccagagcctgagccagacagcactgattactcagaacttgctgacgccgacatccttagtgagctggcctccctcacttgcccagaggcccagctgctagaggcccaggccctcgagccaccatcgcccgagccggagcctcagctcctggacccccagccccgcttcctggacccgcaggcactagagccgctcggggaagctctggagctgccacccctgcaacctcttgctgatcctctggggctgccgggcctggctctccaggccctggacaccctgcctgactccttggagtcgcagctgcttgacccccaggcactcgaccccctgcccaagctgcttgacgtcccaggtcgccgtctggagccccagcagcccctggggcactgcccactggccgagcccttgcgcctggacttgtgctcaccgcacggcccccccgggcctgagggtcaccccaagtacgccttgcggcgcactgataggccaaagatcctgtgtcgccggcggaaagccggacggggacgcaaggcagacgccggacccgagggccgcctactgcccct

SEQ ID NO: 1206 - DNA, 5612 bp, Homo sapiens
gcccagggcggggaatcgcgtaatggcggacacaggcagggcgagcgcggctgggggcgtagcgcgctgagggggtccggccgtttggcagcccgcgaggcggtccgcgggagcacactctgtgcggagactgggcggccggccgacccttcctgtcgctgacggcgactgcgggaggccaggttgtttttcaccattcagaacattgcctgaagcaggtccaccatgccgttagtaacgaggaacatcgagccaaggcacctgtgccgtcagacgttgcctagcgttagaagcgagctggaatgcgtgaccaacatcaccctggcaaatgtcatccgacagctgggcagcctgaatgggagcttgcctgattgtcaacccatcggcctggaccccagagcccacccagttgagcgtgtgcagagggccccgagtgcggggcgacgctcaggccgttgcagagaccaccctggagatgctgatgaagacaggcctttcctgctgagcccagcctatcttcgcagcctgctcaggcgctgtccacgccccgaggcctgggctcaggccgaagttgctccacagcacccccagctgacagccagcgactggcagagcccccaggcacgggggccctctctcttccagagatctccagtgtgacagcccaggcggcagagccgagggtcctggtcccggcttctcgcaccctcatgtcagccccggccccgcccggcggcctgcggaggacaaggtcaggatgcgtgtgaagccccagggcctggtggtgacttccagtgccgtgtgcagctctcctgactacctccgggaacccaagtactaccccggcggcccccccaccccccggcccctgcttcccacccggccccctgccagcccacctgacaaggccttctccacccacgccttctccgagaacccacgcccacccccacgccgggaccccagcacccggcgcccaccagtccttgccaagggggacgacccgctgcccccacgggcagcccgtcctgtctcacaggcccgctgccccacaccggtcggagacggcagcagctcccgacgctgctgggacaacgggcgggtgaacctgcgaccagtggtgcagctgattgacatcatgaaggacctgacacgcctctcccaggacctgcagcacagtggtgtacacctggactgtggtgggctccgactgagccgcccgcctgcaccgccacccggcgacctacagtacagcttcttctcctcacccagtttggccaacagcatccgtagccctgaggagcgggccaccccacacgccaagtcggagcggcccagccatcccctctacgagcctgagcctgagcctagggacagtccccagcctggccaaggccatagtcccggagccacggctgcggccacgggtctgcccccagagcctgagccagacagcactgattactcagaacttgctgacgccgacatccttagtgagctggcctccctcacttgcccagaggcccagctgctagaggcccaggccctcgagccaccatcgcccgagccggagcctcagctcctggacccccagccccgcttcctggacccgcaggcactagagccgctcggggaagctctggagctgccacccctgcaacctcttgctgatcctctggggctgccgggcctggctctccaggccctggacaccctgcctgactccttggagtcgcagctgcttgacccccaggcactcgaccccctgcccaagctgcttgacgtcccaggtcgccgtctggagccccagcagcccctggggcactgcccactggccgagcccttgcgcctggacttgtgctcaccgcacggcccccccgggcctgagggtcaccccaagtacgccttgcggcgcactgataggccaaagatcctgtgtcgccggcggaaagccggacggggacgcaaggcagacgccggacccgagggccgcctactgcccctgcctatgcccacggggctggtggctgccctggccgaacccccaccaccaccgcctcctccaccccctgccctgccaggcccaggcccggtctcagtcccagagttgaagccggaatcttcccagaccccagtggtctctacccgcaaaggcaagtgccggggcgtgcggcgcatggtggtgaagatggccaagatccccgtatcgctggggcggcggaacaagaccacatacaaagtgtcttccttgagcagcagcctgagcgtggagggcaaggagctgggcctgcgcgtgtcggctgagcccaccccgctgctgaagatgaagaacaatgggcggaacgtggtagtggtcttcccacccggtgagatgcccattattctcaaacgtaagcgcggccgccctcctaagaacctgctgctgggtcccggcaagcccaaggagccagctgtggtggcggccgaggcagccactgtggcagcggccaccatggccatgccagaggtaaaaaaacgacggcggcggaagcagaagctggcatctccccagccatcctatgcagcagacgccaacgacagcaaggccgagtactcagacgtcctggccaagctggccttcctgaaccgccagagccagtgcgctggacggtgctcaccgccccgctgctggacacccagtgagccggagtcggtgcaccaggcccccgacacccagagcatctcccacttcctgcatcgtgtgcagggcttccggcggcgtgggggcaaagcaggcggttttggtggccggggtgggggccatgcggccaagtcagcccgatgctccttcagtgacttctttgagggcatcggcaagaaaaagaaggtggtggccgtggcagccgctggggtcgggggcccgggccttactgagttggggcacccacgcaaacggggccggggggaggtagacgctgtgactgggaagccaaagcgcaagagacggtcccggaagaatgggactctgttcccagagcaggtgcccagtggcccaggctttggggaggcaggtgctgagtgggccggggataagggtggtggctgggcccctcaccatgggcacccaggcggacaagctggccgaaactgtgggtttcaggggaccgaggcccgggcctttgcctccactgggctggagagtggagcctcaggccgtggcagctactacagcacgggtgcaccctcaggccagaccgagctcagccaggagcgccaaaacctcttcaccggctactttcgctcgctgctcgattcggatgactcctccgatctcttggactttgccctctcagcctctcgcccagagtcccggaaggcatcgggcacctatgcagggccacccaccagtgccctgcctgcccagcggggcctggccaccttccctagccggggagccaaggccagcccagtggcagtgggtagcagcggggctggggcggacccctcctttcagcctgtcctgtccgcgcgccagaccttcccaccaggacgagcagcaagctatgggctaactccagccgcttcagactgccgggcagccgagaccttccccaagctggtgcccccgccctcagccatggcccgctcacctaccacccacccgcctgccaacacctacctgccccagtacggcggctatggggccggacaaagcgtattcgccccaactaagccctttacaggccaggactgcgctaacagcaaggactgcagcttcgcctatggcagtggcaacagcctccctgcctcacccagcagcgcccacagcgccggctatgccccaccgcctaccgggggcccctgcctgccaccaagcaaggcctccttcttcagcagctctgagggggcccccttctctggttcagcccccacgcccctgcgctgtgacagccgggccagcacagtctcgcccggtggctacatggtacccaagggcaccacagcctctgccacctctgcagcctctgccgcctcctcctcctcctcctccttccagccctcgcccgagaactgtcggcagtttgcgggggcttctcagtggcctttccggcagggctatggaggcctggactgggcctcagaggcctttagtcagctctacaatcccagttttgactgccacgtcagcgagcccaacgtgatcctggacatctccaactacacaccgcagaaggtgaagcagcagacggctgtgtcggagaccttctctgagtcatcctccgacagcacccagttcaatcagccggttggtggcggggggtttcggcgtgccaacagcgaggcctcaagtagtgagggccagtcgagcctgtccagcctggagaaactgatgatggactggaacgaggcatcatctgcccccggctacaactggaaccagagtgtcctctttcagagtagctccaagccgggccgtggacggcggaagaaggtggacctgttcgaggcctcacatctgggcttcccgacatccgcctctgccgctgcctcaggctacccatccaaacggagcactgggccccggcagccgcgaggtggacggggcggtggggcctgctcagccaagaaggagcggggtggcgcagcggccaaagccaagttcatccccaagccacagccagtcaacccactgttccaggacagtcctgacctcggcctggactactatagcggggacagcagcatgtcaccactgccctcacagtcgagggccttcggcgtgggagagcgagacccctgtgacttcataggaccctactccatgaacccgtccacgccttccgatggcacctttggccaaggcttccactgcgactcgcccagcctgggtgctcccgagcttgatggcaagcatttcccaccgctggcccacccacccacggtgtttgacgccggcctgcagaaggcatactcgcccacctgctcgcctacactgggcttcaaggaagagctgcggccaccgcccacaaagctggctgcctgcgagcccctcaagcatggactccagggggccagcctgggccacgcagctgcagcccaggcccacctgagctgccgggacctgccgctgggccagccccactacgattcccccagctgcaagggcacagcctattggtaccctccaggctcagctgcccgcagcccgccctatgaaggcaaggtgggtacagggctgctggctgacttcctgggcaggacggaggccgcgtgcctcagtgcccctcacctggctagcccaccagccacgcccaaggccgacaaggagccactggaaatggcccggccccctggcccaccccgtggccctgctgcagccgctgctggctatggctgcccactccttagtgacttgaccctgtcccccgtgccgagggactcgctgctgcccctgcaggacaccgcctacaggtacccaggctttatgccccaggcgcatcctggcctgggtgggggccccaagagcggcttcctggggcccatggcggaacctcaccccgaggacacattcaccgtcacatccctgtagtgccaactgaagtgccgactggaccgcgaggttttgttcctgg

SEQ ID NO: 1207 - DNA, 3186 bp, Homo sapiens
gagcaggacccgtggtaccattggccctggcaagtatggctatggtaaggccccatatatcttaccactgcagacagacactgcacacacgccacagaggctccggagacagaagctctcatcccgccattccaggtcccagggagcatcttctgctaggcatggctacagttcaccagcccaccaggtcccccaacatgggcctttgtaccaaagtgacagtggccctcgctctggactgcaggctgcggaggcccccatctaccagctacctttgacccatgatcaaggctaccctgcagcttcaagtctctttcacagcccagaaacaagcaacaaccacggtgtggggacccatggggcaactcagagcttctctcagcctgcccgatctacagcaatctcatgcatcggggcctatcggcagtacaagctgtgcaacaccaacgtatgtccagaaagcagtagaagtatccgggaggtacagtgtgcatcctacaacaacaagccattcatgggccggttttatgagtgggaaccatttgcagaagtaaaaggcaatcgcaaatgtgagttgaactgccaggcaatgggctaccgcttctatgtacggcaagctgagaaagtcatcgatggcaccccctgtgaccagaacggcacggccatctgtgtgtctgggcagtgcaaggtgaactgcgggcttcatctggttattcaaacatcatcgcttcctgaaaaaaacaaagttgaattcaagctaaataaagacacatcgtcattccccggtagacttttacaacatgaccttgaaagaaactactcaagtaggcaaggtgatcatattaatttggtgagctcatcattgtcatcatttcctattcttcaacgttcttctgaagagaaaattctttactcagacaggttgagcctagaaagacaaaagctgaccgtatgtcctatcatcaatggggaagaccaccttcgtttgttgaactttcaacacaattttataactcggatacaaaatatttctaatctacagaagttaatatcgttggatttatatgataaccagattgaagaaattagtgggctttcgactctgagatgtcttcgtgtccttctgttggggaaaaacagaatcaagaaaatctcaaatctggagaatctaaaaagcttagatgtcttggatcttcatggaaatcagattaccaaaattgaaaatattaatcatttgtgtgagttgagagttttaaatcttgccaggaactttttaagtcatgttgataatcttaatgggctggattcactaactgaacttaacttgcgacacaatcaaatcactttcgtgagagatgtggataatttgccctgcctccaacatctctttctcagctttaacaatatatctagttttgacagtgtttcctgccttgctgactcttcttccctctcggacatcacctttgatggcaatcccatagctcaagagtcatggtacaaacacactgtccttcagaatatgatgcagctgcgccagctagatatgaagagaatcacggaagaagaaaggcgtatggcatctgttttagccaaaaaagaggaagagaagaagcgggaaagtcataaacaatctttgcttaaggagaagaaaaggttaacaattaacaacgtagctcgacagtgggacttgcaacaacaacgagtagccaatattgctacaaatgaagatagaaaagattctgactctcctcaggacccctgtcagattgatggaagcaccctctctgcattcccagaggaaacagggcctctagactcaggactcaacaatgctttacaaggtttatctgtcatagacacataccttgttgaagtggacggggatacactttccctatatggctcaggagcactggaatctctggataggaattggagtgttcaaacagcaggaatgatcacaacagtctccttcactttcatagaatttgatgaaatcgtccaagtgcttcctaaactgaagattaagtttcctaattctctgcaccttaaattcaaggaaacaaatcttgtaatgctgcagcaatttaacgcactagcccaactccgtcgtattgaccagttgacaattgatcctcaaggaaatccagttgtcaattttacactctggaaatactatgtactgtttaggctaagccatttcagtatgcagaaaataaatggaacagaggtgacacagaatgatatgataatggctgaaaggctctttggaatcctagcacatgtagcatcttctgagttaccccagtatcgtctgatttccattctgggtgatgccaggaaaaagcaatttcggtatctactagaatccaaaggaaaaaaacctggtattatcaacgaagaaaataatgacagcaaaagacttgtaggagaaaacacaaatcgtgctacattaaattatactacaagagacttttataatgaaaagctagaggaaataaaggaaaagaagaaattctgtaaaacatatatagaagaccttgtgaaggaagccacagaaatcaacatgaaaaatgaggctttgcagaagctttggccacagatgttcattgagcttgttagggatgcagtcatagaaattcgcaataaaaattcctatatgaagctctgcctacagcagataacagaccaaaaataaaaatggcctttagttacagttgattttggcagttttattttttgaaggttgaaaatatgcaggttatacatgttaaaacaacaacaacactatcctataaactagaaagactagtataaaagcattattgcccactgttctcatagctaaaagttaagaaggaaggaaggaaagcaggagaaaggaaggattaattgcctgtatgtgaggaccaaacaacctttgggaactaaacagttttcagagatggcgtggcactgcatccttggttcttgctttgattggtgccctgctatagcccaaagcacgtagtatttgctgatgattcagcatgagctgcatctacctacttttagctgataattttcagttatttccctttttattttatgtcatgatttcaaagccaaaaatatgttctttttatgagtgaagaataaacttactaacaaattagtcaaaataaagtatgtttgcctccttaa

SEQ ID NO: 1208 - DNA, 1803 bp, Homo sapiens
gacttgaacgcaactcccaattgcagaaaattggcaacgtctctgaagagcccttgcttttgcctggacccccagcatcatggtttcccatttcatggggtctctcagtgtcctgtgtttccttctgctgcttggattccagttcgtctgcccacagccctccactcaacacaggaaggaagaagaaaggcgtatggcatctgttttagccaaaaaagaggaagagaagaagcgggaaagtcataaacaatctttgcttaaggagaagaaaaggttaacaattaacaacgtagctcgacagtgggacttgcaacaacaacgagtagccaatattgctacaaatgaagatagaaaagattctgactctcctcaggacccctgtcagattgatggaagcaccctctctgcattcccagaggaaacagggcctctagactcaggactcaacaatgctttacaaggtttatctgtcatagacacataccttgttgaagtggacggggatacactttccctatatggctcaggagcactggaatctctggataggaattggagtgttcaaacagcaggaatgatcacaacagtctccttcactttcatagaatttgatgaaatcgtccaagtgcttcctaaactgaagattaagtttcctaattctctgcaccttaaattcaaggaaacaaatcttgtaatgctgcagcaatttaacgcactagcccaactccgtcgtattgaccagttgacaattgatcctcaaggaaatccagttgtcaattttacactctggaaatactatgtactgtttaggctaagccatttcagtatgcagaaaataaatggaacagaggtgacacagaatgatatgataatggctgaaaggctctttggaatcctagcacatgtagcatcttctgagttaccccagtatcgtctgatttccattctgggtgatgccaggaaaaagcaatttcggtatctactagaatccaaaggaaaaaaacctggtattatcaacgaagaaaataatgacagcaaaagacttgtaggagaaaacacaaatcgtgctacattaaattatactacaagagacttttataatgaaaagctagaggaaataaaggaaaagaagaaattctgtaaaacatatatagaagaccttgtgaaggaagccacagaaatcaacatgaaaaatgaggctttgcagaagctttggccacagatgttcattgagcttgttagggatgcagtcatagaaattcgcaataaaaattcctatatgaagctctgcctacagcagataacagaccaaaaataaaaatggcctttagttacagttgattttggcagttttattttttgaaggttgaaaatatgcaggttatacatgttaaaacaacaacaacactatcctataaactagaaagactagtataaaagcattattgcccactgttctcatagctaaaagttaagaaggaaggaaggaaagcaggagaaaggaaggattaattgcctgtatgtgaggaccaaacaacctttgggaactaaacagttttcagagatggcgtggcactgcatccttggttcttgctttgattggtgccctgctatagcccaaagcacgtagtatttgctgatgattcagcatgagctgcatctacctacttttagctgataattttcagttatttccctttttattttatgtcatgatttcaaagccaaaaatatgttctttttatgagtgaagaataaacttactaacaaattagtcaaaataaagtatgtttgcctccttaa

SEQ ID NO: 1209 - DNA, 951 bp, Homo sapiens
gacttgaacgcaactcccaattgcagaaaattggcaacgtctctgaagagcccttgcttttgcctggacccccagcatcatggtttcccatttcatggggtctctcaggaaaaagcaatttcggtatctactagaatccaaaggaaaaaaacctggtattatcaacgaagaaaataatgacagcaaaagacttgtaggagaaaacacaaatcgtgctacattaaattatactacaagagacttttataatgaaaagctagaggaaataaaggaaaagaagaaattctgtaaaacatatatagaagaccttgtgaaggaagccacagaaatcaacatgaaaaatgaggctttgcagaagctttggccacagatgttcattgagcttgttagggatgcagtcatagaaattcgcaataaaaattcctatatgaagctctgcctacagcagataacagaccaaaaataaaaatggcctttagttacagttgattttggcagttttattttttgaaggttgaaaatatgcaggttatacatgttaaaacaacaacaacactatcctataaactagaaagactagtataaaagcattattgcccactgttctcatagctaaaagttaagaaggaaggaaggaaagcaggagaaaggaaggattaattgcctgtatgtgaggaccaaacaacctttgggaactaaacagttttcagagatggcgtggcactgcatccttggttcttgctttgattggtgccctgctatagcccaaagcacgtagtatttgctgatgattcagcatgagctgcatctacctacttttagctgataattttcagttatttccctttttattttatgtcatgatttcaaagccaaaaatatgttctttttatgagtgaagaataaacttactaacaaattagtcaaaataaagtatgtttgcctccttaa

SEQ ID NO: 1210 - DNA, 1920 bp, Homo sapiens
gacttgaacgcaactcccaattgcagaaaattggcaacgtctctgaagagcccttgcttttgcctggacccccagcatcatggtttcccatttcatggggtctctcagtgtcctgtgtttccttctgctgcttggattccagttcgtctgcccacagccctccactcaacacaggaaggtcccgcagcggatggcggcggagggcgcccccgaggacgacggcggcggcggcgccccgggagtgtggggcgcctggggcccctggtcggcctgctcgcgtagctgcagcggcggcgtgatggagcagacgcggccctgcctgccccgctcctaccgcctgcgcggcggccagcggcctggcgcccctgcgcgcgccttcgcggaccacgtggtgtcggcggtgcgcacgtcggtgccactgcaccggagccgcgacgagacgccagcgctggccggtacggacgccagccgccagggccccacggtgctgcgaggcagccggcacccacagccccagggcctcgaagtcactggggacagaaggagcaggacccgtggtaccattggccctggcaagtatggctatggtaaggccccatatatcttaccactgcagacagacactgcacacacgccacagaggctccggagacagaagctctcatcccgccattccaggtcccagggagcatcttctgctaggcatggctacagttcaccagcccaccaggtcccccaacatgggcctttgtaccaaagtgacagtggccctcgctctggactgcaggctgcggaggcccccatctaccagctacctttgacccatgatcaaggctaccctgcagcttcaagtctctttcacagcccagaaacaagcaacaaccacggtgtggggacccatggggcaactcagagcttctctcagcctgcccgatctacagcaatctcatgcatcggggcctatcggcagtacaagctgtgcaacaccaacgtatgtccagaaagcagtagaagtatccgggaggtacagtgtgcatcctacaacaacaagccattcatgggccggttttatgagtgggaaccatttgcagaagtaaaaggcaatcgcaaatgtgagttgaactgccaggcaatgggctaccgcttctatgtacggcaagctgagaaagtcatcgatggcaccccctgtgaccagaacggcacggccatctgtgtgtctgggcagtgcaaggaaataaaggaaaagaagaaattctgtaaaacatatatagaagaccttgtgaaggaagccacagaaatcaacatgaaaaatgaggctttgcagaagctttggccacagatgttcattgagcttgttagggatgcagtcatagaaattcgcaataaaaattcctatatgaagctctgcctacagcagataacagaccaaaaataaaaatggcctttagttacagttgattttggcagttttattttttgaaggttgaaaatatgcaggttatacatgttaaaacaacaacaacactatcctataaactagaaagactagtataaaagcattattgcccactgttctcatagctaaaagttaagaaggaaggaaggaaagcaggagaaaggaaggattaattgcctgtatgtgaggaccaaacaacctttgggaactaaacagttttcagagatggcgtggcactgcatccttggttcttgctttgattggtgccctgctatagcccaaagcacgtagtatttgctgatgattcagcatgagctgcatctacctacttttagctgataattttcagttatttccctttttattttatgtcatgatttcaaagccaaaaatatgttctttttatgagtgaagaataaacttactaacaaattagtcaaaataaagtatgtttgcctccttaa

SEQ ID NO: 1211 - DNA, 867 bp, Homo sapiens
gacttgaacgcaactcccaattgcagaaaattggcaacgtctctgaagagcccttgcttttgcctggacccccagcatcatggtttcccatttcatggggtctctcagtgtcctgtgtttccttctgctgcttggattccagttcgtctgcccacagccctccactcaacacaggaaggaaataaaggaaaagaagaaattctgtaaaacatatatagaagaccttgtgaaggaagccacagaaatcaacatgaaaaatgaggctttgcagaagctttggccacagatgttcattgagcttgttagggatgcagtcatagaaattcgcaataaaaattcctatatgaagctctgcctacagcagataacagaccaaaaataaaaatggcctttagttacagttgattttggcagttttattttttgaaggttgaaaatatgcaggttatacatgttaaaacaacaacaacactatcctataaactagaaagactagtataaaagcattattgcccactgttctcatagctaaaagttaagaaggaaggaaggaaagcaggagaaaggaaggattaattgcctgtatgtgaggaccaaacaacctttgggaactaaacagttttcagagatggcgtggcactgcatccttggttcttgctttgattggtgccctgctatagcccaaagcacgtagtatttgctgatgattcagcatgagctgcatctacctacttttagctgataattttcagttatttccctttttattttatgtcatgatttcaaagccaaaaatatgttctttttatgagtgaagaataaacttactaacaaattagtcaaaataaagtatgtttgcctccttaa

SEQ ID NO: 1212 - DNA, 1719 bp, Homo sapiens
gacttgaacgcaactcccaattgcagaaaattggcaacgtctctgaagagcccttgcttttgcctggacccccagcatcatggtttcccatttcatggggtctctcagtgtcctgtgtttccttctgctgcttggattccagttcgtctgcccacagccctccactcaacacaggaaggagaagaaaaggttaacaattaacaacgtagctcgacagtgggacttgcaacaacaacgagtagccaatattgctacaaatgaagatagaaaagattctgactctcctcaggacccctgtcagattgatggaagcaccctctctgcattcccagaggaaacagggcctctagactcaggactcaacaatgctttacaaggtttatctgtcatagacacataccttgttgaagtggacggggatacactttccctatatggctcaggagcactggaatctctggataggaattggagtgttcaaacagcaggaatgatcacaacagtctccttcactttcatagaatttgatgaaatcgtccaagtgcttcctaaactgaagattaagtttcctaattctctgcaccttaaattcaaggaaacaaatcttgtaatgctgcagcaatttaacgcactagcccaactccgtcgtattgaccagttgacaattgatcctcaaggaaatccagttgtcaattttacactctggaaatactatgtactgtttaggctaagccatttcagtatgcagaaaataaatggaacagaggtgacacagaatgatatgataatggctgaaaggctctttggaatcctagcacatgtagcatcttctgagttaccccagtatcgtctgatttccattctgggtgatgccaggaaaaagcaatttcggtatctactagaatccaaaggaaaaaaacctggtattatcaacgaagaaaataatgacagcaaaagacttgtaggagaaaacacaaatcgtgctacattaaattatactacaagagacttttataatgaaaagctagaggaaataaaggaaaagaagaaattctgtaaaacatatatagaagaccttgtgaaggaagccacagaaatcaacatgaaaaatgaggctttgcagaagctttggccacagatgttcattgagcttgttagggatgcagtcatagaaattcgcaataaaaattcctatatgaagctctgcctacagcagataacagaccaaaaataaaaatggcctttagttacagttgattttggcagttttattttttgaaggttgaaaatatgcaggttatacatgttaaaacaacaacaacactatcctataaactagaaagactagtataaaagcattattgcccactgttctcatagctaaaagttaagaaggaaggaaggaaagcaggagaaaggaaggattaattgcctgtatgtgaggaccaaacaacctttgggaactaaacagttttcagagatggcgtggcactgcatccttggttcttgctttgattggtgccctgctatagcccaaagcacgtagtatttgctgatgattcagcatgagctgcatctacctacttttagctgataattttcagttatttccctttttattttatgtcatgatttcaaagccaaaaatatgttctttttatgagtgaagaataaacttactaacaaattagtcaaaataaagtatgtttgcctccttaa

SEQ ID NO: 1213 - DNA, 2316 bp, Homo sapiens
gacttgaacgcaactcccaattgcagaaaattggcaacgtctctgaagagcccttgcttttgcctggacccccagcatcatggtttcccatttcatggggtctctcagtgtcctgtgtttccttctgctgcttggattccagttcgtctgcccacagccctccactcaacacaggaaggtcccgcagcggatggcggcggagggcgcccccgaggacgacggcggcggcggcgccccgggagtgtggggcgcctggggcccctggtcggcctgctcgcgtagctgcagcggcggcgtgatggagcagacgcggccctgcctgccccgctcctaccgcctgcgcggcggccagcggcctggcgcccctgcgcgcgccttcgcggaccacgtggtgtcggcggtgcgcacgtcggtgccactgcaccggagccgcgacgagacgccagcgctggccggtacggacgccagccgccagggccccacggtgctgcgaggcagccggcacccacagccccagggcctcgaagtcactggggacagaagttttgacagtgtttcctgccttgctgactcttcttccctctcggacatcacctttgatggcaatcccatagctcaagagtcatggtacaaacacactgtccttcagaatatgatgcagctgcgccagctagatatgaagagaatcacggaagaagaaaggcgtatggcatctgttttagccaaaaaagaggaagagaagaagcgggaaagtcataaacaatctttgcttaaggagaagaaaaggttaacaattaacaacgtagctcgacagtgggacttgcaacaacaacgagtagccaatattgctacaaatgaagatagaaaagattctgactctcctcaggacccctgtcagattgatggaagcaccctctctgcattcccagaggaaacagggcctctagactcaggactcaacaatgctttacaaggtttatctgtcatagacacataccttgttgaagtggacggggatacactttccctatatggctcaggagcactggaatctctggataggaattggagtgttcaaacagcaggaatgatcacaacagtctccttcactttcatagaatttgatgaaatcgtccaagtgcttcctaaactgaagattaagtttcctaattctctgcaccttaaattcaaggaaacaaatcttgtaatgctgcagcaatttaacgcactagcccaactccgtcgtattgaccagttgacaattgatcctcaaggaaatccagttgtcaattttacactctggaaatactatgtactgtttaggctaagccatttcagtatgcagaaaataaatggaacagaggtgacacagaatgatatgataatggctgaaaggctctttggaatcctagcacatgtagcatcttctgagttaccccagtatcgtctgatttccattctgggtgatgccaggaaaaagcaatttcggtatctactagaatccaaaggaaaaaaacctggtattatcaacgaagaaaataatgacagcaaaagacttgtaggagaaaacacaaatcgtgctacattaaattatactacaagagacttttataatgaaaagctagaggaaataaaggaaaagaagaaattctgtaaaacatatatagaagaccttgtgaaggaagccacagaaatcaacatgaaaaatgaggctttgcagaagctttggccacagatgttcattgagcttgttagggatgcagtcatagaaattcgcaataaaaattcctatatgaagctctgcctacagcagataacagaccaaaaataaaaatggcctttagttacagttgattttggcagttttattttttgaaggttgaaaatatgcaggttatacatgttaaaacaacaacaacactatcctataaactagaaagactagtataaaagcattattgcccactgttctcatagctaaaagttaagaaggaaggaaggaaagcaggagaaaggaaggattaattgcctgtatgtgaggaccaaacaacctttgggaactaaacagttttcagagatggcgtggcactgcatccttggttcttgctttgattggtgccctgctatagcccaaagcacgtagtatttgctgatgattcagcatgagctgcatctacctacttttagctgataattttcagttatttccctttttattttatgtcatgatttcaaagccaaaaatatgttctttttatgagtgaagaataaacttactaacaaattagtcaaaataaagtatgtttgcctccttaa

SEQ ID NO: 1214 - DNA, 1377 bp, Homo sapiens
gagcaggacccgtggtaccattggccctggcaagtatggctatggtaaggccccatatatcttaccactgcagacagacactgcacacacgccacagaggctccggagacagaagctctcatcccgccattccaggtcccagggagcatcttctgctaggcatggctacagttcaccagcccaccaggtcccccaacatgggcctttgtaccaaagtgacagtggccctcgctctggactgcaggctgcggaggcccccatctaccagctacctttgacccatgatcaaggctaccctgcagcttcaagtctctttcacagcccagaaacaagcaacaaccacggtgtggggacccatggggcaactcagagcttctctcagcctgcccgatctacagcaatctcatgcatcggggcctatcggcagtacaagctgtgcaacaccaacgtatgtccagaaagcagtagaagtatccgggaggtacagtgtgcatcctacaacaacaagccattcatgggccggttttatgagtgggaaccatttgcagaagtaaaaggcaatcgcaaatgtgagttgaactgccaggcaatgggctaccgcttctatgtacggcaagctgagaaagtcatcgatggcaccccctgtgaccagaacggcacggccatctgtgtgtctgggcagtgcaaggaaataaaggaaaagaagaaattctgtaaaacatatatagaagaccttgtgaaggaagccacagaaatcaacatgaaaaatgaggctttgcagaagctttggccacagatgttcattgagcttgttagggatgcagtcatagaaattcgcaataaaaattcctatatgaagctctgcctacagcagataacagaccaaaaataaaaatggcctttagttacagttgattttggcagttttattttttgaaggttgaaaatatgcaggttatacatgttaaaacaacaacaacactatcctataaactagaaagactagtataaaagcattattgcccactgttctcatagctaaaagttaagaaggaaggaaggaaagcaggagaaaggaaggattaattgcctgtatgtgaggaccaaacaacctttgggaactaaacagttttcagagatggcgtggcactgcatccttggttcttgctttgattggtgccctgctatagcccaaagcacgtagtatttgctgatgattcagcatgagctgcatctacctacttttagctgataattttcagttatttccctttttattttatgtcatgatttcaaagccaaaaatatgttctttttatgagtgaagaataaacttactaacaaattagtcaaaataaagtatgtttgcctccttaa

SEQ ID NO: 1215 - DNA, 3729 bp, Homo sapiens
gacttgaacgcaactcccaattgcagaaaattggcaacgtctctgaagagcccttgcttttgcctggacccccagcatcatggtttcccatttcatggggtctctcagtgtcctgtgtttccttctgctgcttggattccagttcgtctgcccacagccctccactcaacacaggaaggtcccgcagcggatggcggcggagggcgcccccgaggacgacggcggcggcggcgccccgggagtgtggggcgcctggggcccctggtcggcctgctcgcgtagctgcagcggcggcgtgatggagcagacgcggccctgcctgccccgctcctaccgcctgcgcggcggccagcggcctggcgcccctgcgcgcgccttcgcggaccacgtggtgtcggcggtgcgcacgtcggtgccactgcaccggagccgcgacgagacgccagcgctggccggtacggacgccagccgccagggccccacggtgctgcgaggcagccggcacccacagccccagggcctcgaagtcactggggacagaaggagcaggacccgtggtaccattggccctggcaagtatggctatggtaaggccccatatatcttaccactgcagacagacactgcacacacgccacagaggctccggagacagaagctctcatcccgccattccaggtcccagggagcatcttctgctaggcatggctacagttcaccagcccaccaggtcccccaacatgggcctttgtaccaaagtgacagtggccctcgctctggactgcaggctgcggaggcccccatctaccagctacctttgacccatgatcaaggctaccctgcagcttcaagtctctttcacagcccagaaacaagcaacaaccacggtgtggggacccatggggcaactcagagcttctctcagcctgcccgatctacagcaatctcatgcatcggggcctatcggcagtacaagctgtgcaacaccaacgtatgtccagaaagcagtagaagtatccgggaggtacagtgtgcatcctacaacaacaagccattcatgggccggttttatgagtgggaaccatttgcagaagtaaaaggcaatcgcaaatgtgagttgaactgccaggcaatgggctaccgcttctatgtacggcaagctgagaaagtcatcgatggcaccccctgtgaccagaacggcacggccatctgtgtgtctgggcagtgcaaggtgaactgcgggcttcatctggttattcaaacatcatcgcttcctgaaaaaaacaaagttgaattcaagctaaataaagacacatcgtcattccccggtagacttttacaacatgaccttgaaagaaactactcaagtaggcaaggtgatcatattaatttggtgagctcatcattgtcatcatttcctattcttcaacgttcttctgaagagaaaattctttactcagacaggttgagcctagaaagacaaaagctgaccgtatgtcctatcatcaatggggaagaccaccttcgtttgttgaactttcaacacaattttataactcggatacaaaatatttctaatctacagaagttaatatcgttggatttatatgataaccagattgaagaaattagtgggctttcgactctgagatgtcttcgtgtccttctgttggggaaaaacagaatcaagaaaatctcaaatctggagaatctaaaaagcttagatgtcttggatcttcatggaaatcagattaccaaaattgaaaatattaatcatttgtgtgagttgagagttttaaatcttgccaggaactttttaagtcatgttgataatcttaatgggctggattcactaactgaacttaacttgcgacacaatcaaatcactttcgtgagagatgtggataatttgccctgcctccaacatctctttctcagctttaacaatatatctagttttgacagtgtttcctgccttgctgactcttcttccctctcggacatcacctttgatggcaatcccatagctcaagagtcatggtacaaacacactgtccttcagaatatgatgcagctgcgccagctagatatgaagagaatcacggaagaagaaaggcgtatggcatctgttttagccaaaaaagaggaagagaagaagcgggaaagtcataaacaatctttgcttaaggagaagaaaaggttaacaattaacaacgtagctcgacagtgggacttgcaacaacaacgagtagccaatattgctacaaatgaagatagaaaagattctgactctcctcaggacccctgtcagattgatggaagcaccctctctgcattcccagaggaaacagggcctctagactcaggactcaacaatgctttacaaggtttatctgtcatagacacataccttgttgaagtggacggggatacactttccctatatggctcaggagcactggaatctctggataggaattggagtgttcaaacagcaggaatgatcacaacagtctccttcactttcatagaatttgatgaaatcgtccaagtgcttcctaaactgaagattaagtttcctaattctctgcaccttaaattcaaggaaacaaatcttgtaatgctgcagcaatttaacgcactagcccaactccgtcgtattgaccagttgacaattgatcctcaaggaaatccagttgtcaattttacactctggaaatactatgtactgtttaggctaagccatttcagtatgcagaaaataaatggaacagaggtgacacagaatgatatgataatggctgaaaggctctttggaatcctagcacatgtagcatcttctgagttaccccagtatcgtctgatttccattctgggtgatgccaggaaaaagcaatttcggtatctactagaatccaaaggaaaaaaacctggtattatcaacgaagaaaataatgacagcaaaagacttgtaggagaaaacacaaatcgtgctacattaaattatactacaagagacttttataatgaaaagctagaggaaataaaggaaaagaagaaattctgtaaaacatatatagaagaccttgtgaaggaagccacagaaatcaacatgaaaaatgaggctttgcagaagctttggccacagatgttcattgagcttgttagggatgcagtcatagaaattcgcaataaaaattcctatatgaagctctgcctacagcagataacagaccaaaaataaaaatggcctttagttacagttgattttggcagttttattttttgaaggttgaaaatatgcaggttatacatgttaaaacaacaacaacactatcctataaactagaaagactagtataaaagcattattgcccactgttctcatagctaaaagttaagaaggaaggaaggaaagcaggagaaaggaaggattaattgcctgtatgtgaggaccaaacaacctttgggaactaaacagttttcagagatggcgtggcactgcatccttggttcttgctttgattggtgccctgctatagcccaaagcacgtagtatttgctgatgattcagcatgagctgcatctacctacttttagctgataattttcagttatttccctttttattttatgtcatgatttcaaagccaaaaatatgttctttttatgagtgaagaataaacttactaacaaattagtcaaaataaagtatgtttgcctccttaa

SEQ ID NO: 1216 - DNA, 3673 bp, Homo sapiens
ggtgtgcctcctggaagccggcagcacagcctgtgtgtgtggactctgctggcccgctggctggcactttttttctttttctttttttttcttgtgagagagttacttcaagttgtgtttggagctgacgtgagcgaggttggtcatgtgctcgggtgccagtgacggggtggcccgtgagctgatgacgaggactggcttttaatccttggtggtgattaagagaaagcttattggggcctgggagcagctccccgccgacccccaccaccatgtcgggatccacacagcctgtggcacagacgtggagggccactgagccccgctacccgccccacagcctttcctacccagtgcagatcgcccggacgcacacggacgtcgggctcctggagtaccagcaccactcccgcgactatgcctcccacctgtcgcccggctccatcatccagccccagcggcggaggccctccctgctgtctgagttccagcccgggaatgaacggtcccaggagctccacctgcggccagagtcccactcatacctgcccgagctggggaagtcagagatggagttcattgaaagcaagcgccctcggctagagctgctgcctgaccccctgctgcgaccgtcacccctgctggccacgggccagcctgcgggatctgaagacctcaccaaggaccgtagcctgacgggcaagctggaaccggtgtctccccccagccccccgcacactgaccctgagctggagctggtgccgccacggctgtccaaggaggagctgatccagaacatggaccgcgtggaccgagagatcaccatggtagagcagcagatctctaagctgaagaagaagcagcaacagctggaggaggaggctgccaagccgcccgagcctgagaagcccgtgtcaccgccgcccatcgagtcgaagcaccgcagcctggtgcagatcatctacgacgagaaccggaagaaggctgaagctgcacatcggattctggaaggcctggggccccaggtggagctgccgctgtacaaccagccctccgacacccggcagtatcatgagaacatcaaaataaaccaggcgatgcggaagaagctaatcttgtacttcaagaggaggaatcacgctcggaaacaatgggagcagaagttctgccagcgctatgaccagctcatggaggcctgggagaagaaggtggagcgcatcgagaacaacccccggcggcgggccaaggagagcaaggtgcgcgagtactacgagaagcagttccctgagatccgcaagcagcgcgagctgcaggagcgcatgcagagcagggtgggccagcggggcagtgggctgtccatgtcggccgcccgcagcgagcacgaggtgtcagagatcatcgatggcctctcagagcaggagaacctggagaagcagatgcgccagctggccgtgatcccgcccatgctgtacgacgctgaccagcagcgcatcaagttcatcaacatgaacgggcttatggccgaccccatgaaggtgtacaaagaccgccaggtcatgaacatgtggagtgagcaggagaaggagaccttccgggagaagttcatgcagcatcccaagaactttggcctgatcgcatcattcctggagaggaagacagtggctgagtgcgtcctctattactacctgactaagaagaatgagaactataagagcctggtgagacggagctatcggcgccgcggcaagagccagaacgtgcgcatcgaccccagtagcctgtccttcaacatgtggaaggagatccctatccccttctatctctccgtctacttctttgacgtcatgaaccccagcgagatcctgaagggcgagaagccgcaggtgcgggagcgcgggccctacgtgtacagggagttcaggcacaaaagcaacatcaccttcaacaacaacgacaccgtgtccttcctcgagtaccgcaccttccagttccagccctccaagtcccacggctcggagagcgactacatcgtcatgcccaacatcctggtcttgggtgcggcggtgatgatggagaataagcccatgaccctgaagctcatcatgaccttggcattcaccaccctcggcgaacgtgccttcatgaaccgcactgtgggtgagatcatgtggggctacaaggacccccttgtgaatctcatcaacaagtactttccaggcatgttccccttcaaggacaagttcggattatttgctgagctcaacaactccgactctgggctcttcacggtgttcacgggggtccagaacatcagcaggatccacctcgtggacaagtggaacgggctgagcaaggttgacttctggcattccgatcagtgcaacatgatcaatggaacttctgggcaaatgtggccgcccttcatgactcctgagtcctcgctggagttctacagcccggaggcctgccgatccatgaagctaatgtacaaggagtcaggggtgtttgaaggcatccccacctatcgcttcgtggctcccaaaaccctgtttgccaacgggtccatctacccacccaacgaaggcttctgcccgtgcctggagtctggaattcagaacgtcagcacctgcaggttcagtgcccccttgtttctctcccatcctcacttcctcaacgctgacccggttctggcagaagcggtgactggcctgcaccctaaccaggaggcacactccttgttcctggacatccacccggtcacgggaatccccatgaactgctctgtgaaactgcagctgagcctctacatgaaatctgtcgcaggcattggacaaactgggaagattgagcctgtggtcctgccgctgctctggtttgcagagagcggggccatggagggggagactcttcacacattctacactcagctggtgttgatgcccaaggtgatgcactatgcccagtacgtcctcctggcgctgggctgcgtcctgctgctggtccctgtcatctgccaaatccggagccaagtaggtgctggccagagggcagcccgggctgacagccattcgcttgcctgctgggggaaaggggcctcagatcggaccctctggccaaccgcagcctggagcccacctccagcagcagtcctgcgtctctgccggagtgggagcggtcactgctgggggctgcgcagcacgcttgcgtcttttgcatgccgcgttgccactactctgcctgttctggaaggcctgggaccctcccttggagggggcacaggtgggctttgagtaatgagacctggtacttgcatcatccattcatcaagtcagcacccggggatgccaggttctgttaggggcgaggggacgtacagcagtagaggagacagctgagatccctgctcagggggattgaggggggctggcatcccagccggggagacagatgaaaaccaagtaaatcagcagaaaagataatttcactcatgataggagctgtgaggggttagagccaaatagaaatacagcgtgagccacgtgtgaggttttcagtttaaattttctaatagccacttaacagtcaaaggaaacaggtggaattaattttaatcttatttaacccaaatatatgcaaagtattatcacttcaacatgtaatcagtataaacggc

SEQ ID NO: 1217 - DNA, 2953 bp, Homo sapiens
ggtgtgcctcctggaagccggcagcacagcctgtgtgtgtggactctgctggcccgctggctggcactttttttctttttctttttttttcttgtgagagagttacttcaagttgtgtttggagctgacgtgagcgaggttggtcatgtgctcgggtgccagtgacggggtggcccgtgagctgatgacgaggactggcttttaatccttggtggtgattaagagaaagcttattggggcctgggagcagctccccgccgacccccaccaccatgtcgggatccacacagcctgtggcacagacgtggagggccactgagccccgctacccgccccacagcctttcctacccagtgcagatcgcccggacgcacacggacgtcgggctcctggagtaccagcaccactcccgcgactatgcctcccacctgtcgcccggctccatcatccagccccagcggcggaggccctccctgctgtctgagttccagcccgggaatgaacggtcccaggagctccacctgcggccagagtcccactcatacctgcccgagctggggaagtcagagatggagttcattgaaagcaagcgccctcggctagagctgctgcctgaccccctgctgcgaccgtcacccctgctggccacgggccagcctgcgggatctgaagacctcaccaaggaccgtagcctgacgggcaagctggaaccggtgtctccccccagccccccgcacactgaccctgagctggagctggtgccgccacggctgtccaaggaggagctgatccagaacatggaccgcgtggaccgagagatcaccatggtagagcagcagatctctaagctgaagaagaagcagcaacagctggaggaggaggctgccaagccgcccgagcctgagaagcccgtgtcaccgccgcccatcgagtcgaagcaccgcagcctggtgcagatcatctacgacgagaaccggaagaaggctgaagctgcacatcggattctggaaggcctggggccccaggtggagctgaacgtgcgcatcgaccccagtagcctgtccttcaacatgtggaaggagatccctatccccttctatctctccgtctacttctttgacgtcatgaaccccagcgagatcctgaagggcgagaagccgcaggtgcgggagcgcgggccctacgtgtacagggagttcaggcacaaaagcaacatcaccttcaacaacaacgacaccgtgtccttcctcgagtaccgcaccttccagttccagccctccaagtcccacggctcggagagcgactacatcgtcatgcccaacatcctggtcttgggtgcggcggtgatgatggagaataagcccatgaccctgaagctcatcatgaccttggcattcaccaccctcggcgaacgtgccttcatgaaccgcactgtgggtgagatcatgtggggctacaaggacccccttgtgaatctcatcaacaagtactttccaggcatgttccccttcaaggacaagttcggattatttgctgagctcaacaactccgactctgggctcttcacggtgttcacgggggtccagaacatcagcaggatccacctcgtggacaagtggaacgggctgagcaaggttgacttctggcattccgatcagtgcaacatgatcaatggaacttctgggcaaatgtggccgcccttcatgactcctgagtcctcgctggagttctacagcccggaggcctgccgatccatgaagctaatgtacaaggagtcaggggtgtttgaaggcatccccacctatcgcttcgtggctcccaaaaccctgtttgccaacgggtccatctacccacccaacgaaggcttctgcccgtgcctggagtctggaattcagaacgtcagcacctgcaggttcagtgcccccttgtttctctcccatcctcacttcctcaacgctgacccggttctggcagaagcggtgactggcctgcaccctaaccaggaggcacactccttgttcctggacatccacccggtcacgggaatccccatgaactgctctgtgaaactgcagctgagcctctacatgaaatctgtcgcaggcattggacaaactgggaagattgagcctgtggtcctgccgctgctctggtttgcagagagcggggccatggagggggagactcttcacacattctacactcagctggtgttgatgcccaaggtgatgcactatgcccagtacgtcctcctggcgctgggctgcgtcctgctgctggtccctgtcatctgccaaatccggagccaagtaggtgctggccagagggcagcccgggctgacagccattcgcttgcctgctgggggaaaggggcctcagatcggaccctctggccaaccgcagcctggagcccacctccagcagcagtcctgcgtctctgccggagtgggagcggtcactgctgggggctgcgcagcacgcttgcgtcttttgcatgccgcgttgccactactctgcctgttctggaaggcctgggaccctcccttggagggggcacaggtgggctttgagtaatgagacctggtacttgcatcatccattcatcaagtcagcacccggggatgccaggttctgttaggggcgaggggacgtacagcagtagaggagacagctgagatccctgctcagggggattgaggggggctggcatcccagccggggagacagatgaaaaccaagtaaatcagcagaaaagataatttcactcatgataggagctgtgaggggttagagccaaatagaaatacagcgtgagccacgtgtgaggttttcagtttaaattttctaatagccacttaacagtcaaaggaaacaggtggaattaattttaatcttatttaacccaaatatatgcaaagtattatcacttcaacatgtaatcagtataaacggc

SEQ ID NO: 1218 - DNA, 3341 bp, Homo sapiens
gccggcgccctaggaggcggcggcgggaggatcgcgtcccgacccgaggccgggcctgctgcgcgcccccagcccgatcggcaccgccacttgcctgagcgccccggcggcccgagcgcgccccaagcccgggcgccaccgctgccacctccgcgaggtctccctgagtctttgaggacacagcctcgctggaggcagtttctggtgccagtgacggggtggcccgtgagctgatgacgaggactggcttttaatccttggtggtgattaagagaaagcttattggggcctgggagcagctccccgccgacccccaccaccatgtcgggatccacacagcctgtggcacagacgtggagggccactgagccccgctacccgccccacagcctttcctacccagtgcagatcgcccggacgcacacggacgtcgggctcctggagtaccagcaccactcccgcgactatgcctcccacctgtcgcccggctccatcatccagccccagcggcggaggccctccctgctgtctgagttccagcccgggaatgaacggtcccaggagctccacctgcggccagagtcccactcatacctgcccgagctggggaagtcagagatggagttcattgaaagcaagcgccctcggctagagctgctgcctgaccccctgctgcgaccgtcacccctgctggccacgggccagcctgcgggatctgaagacctcaccaaggaccgtagcctgacgggcaagctggaaccggtgtctccccccagccccccgcacactgaccctgagctggagctggtgccgccacggctgtccaaggaggagctgatccagaacatggaccgcgtggaccgagagatcaccatggtagagcagcagatctctaagctgaagaagaagcagcaacagctggaggaggaggctgccaagccgcccgagcctgagaagcccgtgtcaccgccgcccatcgagtcgaagcaccgcagcctggtgcagatcatctacgacgagaaccggaagaaggctgaagctgcacatcggattctggaaggcctggggccccaggtggagctgccgctgtacaaccagccctccgacacccggcagtatcatgagaacatcaaaatggagttcaggcacaaaagcaacatcaccttcaacaacaacgacaccgtgtccttcctcgagtaccgcaccttccagttccagccctccaagtcccacggctcggagagcgactacatcgtcatgcccaacatcctggtcttgggtgcggcggtgatgatggagaataagcccatgaccctgaagctcatcatgaccttggcattcaccaccctcggcgaacgtgccttcatgaaccgcactgtgggtgagatcatgtggggctacaaggacccccttgtgaatctcatcaacaagtactttccaggcatgttccccttcaaggacaagttcggattatttgctgagctcaacaactccgactctgggctcttcacggtgttcacgggggtccagaacatcagcaggatccacctcgtggacaagtggaacgggctgagcaaggttgacttctggcattccgatcagtgcaacatgatcaatggaacttctgggcaaatgtggccgcccttcatgactcctgagtcctcgctggagttctacagcccggaggcctgccgatccatgaagctaatgtacaaggagtcaggggtgtttgaaggcatccccacctatcgcttcgtggctcccaaaaccctgtttgccaacgggtccatctacccacccaacgaaggcttctgcccgtgcctggagtctggaattcagaacgtcagcacctgcaggttcagtgcccccttgtttctctcccatcctcacttcctcaacgctgacccggttctggcagaagcggtgactggcctgcaccctaaccaggaggcacactccttgttcctggacatccacccggtcacgggaatccccatgaactgctctgtgaaactgcagctgagcctctacatgaaatctgtcgcaggcattggacaaactgggaagattgagcctgtggtcctgccgctgctctggtttgcagagagcggggccatggagggggagactcttcacacattctacactcagctggtgttgatgcccaaggtgatgcactatgcccagtacgtcctcctggcgctgggctgcgtcctgctgctggtccctgtcatctgccaaatccggagccaagagaaatgctatttattttggagtagtagtaaaaagggctcaaaggataaggaggccattcaggcctattctgaatccctgatgacatcagctcccaagggctctgtgctgcaggaagcaaaactgtagggtcctgaggacaccgtgagccagccaggcctggccgctgggcctgaccggccccccagcccctacaccccgcttctcccggactctcccagcggacagccccccagccccacagcctgagcctcccagctgccatgtgcctgttgcacacctgcacacacgccctggcacacatacacacatgcgtgcaggcttgtgcagacactcagggatggagctgctgctgaagggacttgtagggagaggctcgtcaacaagcactgttctggaaccttctctccacgtggcccacaggcctgaccacaggggctgtgggtcctgcgtccccttcctcgggtgagcctggcctgtcccgttcagccgttgggcccaggcttcctcccctccaaggtgaaacactgcagtcccggtgtggtggctccccatgcaggacgggccaggctgggagtgccgccttcctgtgccaaattcagtggggactcagtgcccaggccctggccacgagctttggccttggtctacctgccaggccaggcaaagcgcctttacacaggcctcggaaaacaatggagtgagcacaagatgccctgtgcagctgcccgagggtctccgcccaccccggccggactttgatccccccgaagtcttcacaggcactgcatcgggttgtctggcgcccttttcctccagcctaaactgacatcatcctatggactgagccggccactctctggccgaagtggccgcaggctgtgcccccgagctgcccccaccccctcacagggtccctcagattataggtgcccaggctgaggtgaagaggcctgggggccctgccttccgggcgctcctggaccctggggcaaacctgtgacccttttctactggaatagaaatgagttttatcatctttgaaaaataattcactcttgaagtaataaacgtttaaaaaaatggga

SEQ ID NO: 1219 - DNA, 2896 bp, Homo sapiens
ggtgtgcctcctggaagccggcagcacagcctgtgtgtgtggactctgctggcccgctggctggcactttttttctttttctttttttttcttgtgagagagttacttcaagttgtgtttggagctgacgtgagcgaggttggtcatgtgctcgggtgccagtgacggggtggcccgtgagctgatgacgaggactggcttttaatccttggtggtgattaagagaaagcttattggggcctgggagcagctccccgccgacccccaccaccatgtcgggatccacacagcctgtggcacagacgtggagggccactgagccccgctacccgccccacagcctttcctacccagtgcagatcgcccggacgcacacggacgtcgggctcctggagtaccagcaccactcccgcgactatgcctcccacctgtcgcccggctccatcatccagccccagcggcggaggccctccctgctgtctgagttccagcccgggaatgaacggtcccaggagctccacctgcggccagagtcccactcatacctgcccgagctggggaagtcagagatggagttcattgaaagcaagcgccctcggctagagctgctgcctgaccccctgctgcgaccgtcacccctgctggccacgggccagcctgcgggatctgaagacctcaccaaggaccgtagcctgacgggcaagctggaaccggtgtctccccccagccccccgcacactgaccctgagctggagctggtgccgccacggctgtccaaggaggagctgatccagaacatggaccgcgtggaccgagagatcaccatggtagagcagcagatctctaagctgaagaagaagcagcaacagctggaggaggaggctgccaagccgcccgagcctgagaagcccgtgtcaccgccgcccatcgagtcgaagcaccgcagcctggtgcagatcatctacgacgagaaccggaacgtgcgcatcgaccccagtagcctgtccttcaacatgtggaaggagatccctatccccttctatctctccgtctacttctttgacgtcatgaaccccagcgagatcctgaagggcgagaagccgcaggtgcgggagcgcgggccctacgtgtacagggagttcaggcacaaaagcaacatcaccttcaacaacaacgacaccgtgtccttcctcgagtaccgcaccttccagttccagccctccaagtcccacggctcggagagcgactacatcgtcatgcccaacatcctggtcttgggtgcggcggtgatgatggagaataagcccatgaccctgaagctcatcatgaccttggcattcaccaccctcggcgaacgtgccttcatgaaccgcactgtgggtgagatcatgtggggctacaaggacccccttgtgaatctcatcaacaagtactttccaggcatgttccccttcaaggacaagttcggattatttgctgagctcaacaactccgactctgggctcttcacggtgttcacgggggtccagaacatcagcaggatccacctcgtggacaagtggaacgggctgagcaaggttgacttctggcattccgatcagtgcaacatgatcaatggaacttctgggcaaatgtggccgcccttcatgactcctgagtcctcgctggagttctacagcccggaggcctgccgatccatgaagctaatgtacaaggagtcaggggtgtttgaaggcatccccacctatcgcttcgtggctcccaaaaccctgtttgccaacgggtccatctacccacccaacgaaggcttctgcccgtgcctggagtctggaattcagaacgtcagcacctgcaggttcagtgcccccttgtttctctcccatcctcacttcctcaacgctgacccggttctggcagaagcggtgactggcctgcaccctaaccaggaggcacactccttgttcctggacatccacccggtcacgggaatccccatgaactgctctgtgaaactgcagctgagcctctacatgaaatctgtcgcaggcattggacaaactgggaagattgagcctgtggtcctgccgctgctctggtttgcagagagcggggccatggagggggagactcttcacacattctacactcagctggtgttgatgcccaaggtgatgcactatgcccagtacgtcctcctggcgctgggctgcgtcctgctgctggtccctgtcatctgccaaatccggagccaagtaggtgctggccagagggcagcccgggctgacagccattcgcttgcctgctgggggaaaggggcctcagatcggaccctctggccaaccgcagcctggagcccacctccagcagcagtcctgcgtctctgccggagtgggagcggtcactgctgggggctgcgcagcacgcttgcgtcttttgcatgccgcgttgccactactctgcctgttctggaaggcctgggaccctcccttggagggggcacaggtgggctttgagtaatgagacctggtacttgcatcatccattcatcaagtcagcacccggggatgccaggttctgttaggggcgaggggacgtacagcagtagaggagacagctgagatccctgctcagggggattgaggggggctggcatcccagccggggagacagatgaaaaccaagtaaatcagcagaaaagataatttcactcatgataggagctgtgaggggttagagccaaatagaaatacagcgtgagccacgtgtgaggttttcagtttaaattttctaatagccacttaacagtcaaaggaaacaggtggaattaattttaatcttatttaacccaaatatatgcaaagtattatcacttcaacatgtaatcagtataaacggc

SEQ ID NO: 1220 - DNA, 3719 bp, Homo sapiens
gccggcgccctaggaggcggcggcgggaggatcgcgtcccgacccgaggccgggcctgctgcgcgcccccagcccgatcggcaccgccacttgcctgagcgccccggcggcccgagcgcgccccaagcccgggcgccaccgctgccacctccgcgaggtctccctgagtctttgaggacacagcctcgctggaggcagtttctggtgccagtgacggggtggcccgtgagctgatgacgaggactggcttttaatccttggtggtgattaagagaaagcttattggggcctgggagcagctccccgccgacccccaccaccatgtcgggatccacacagcctgtggcacagacgtggagggccactgagccccgctacccgccccacagcctttcctacccagtgcagatcgcccggacgcacacggacgtcgggctcctggagtaccagcaccactcccgcgactatgcctcccacctgtcgcccggctccatcatccagccccagcggcggaggccctccctgctgtctgagttccagcccgggaatgaacggtcccaggagctccacctgcggccagagtcccactcatacctgcccgagctggggaagtcagagatggagttcattgaaagcaagcgccctcggctagagctgctgcctgaccccctgctgcgaccgtcacccctgctggccacgggccagcctgcgggatctgaagacctcaccaaggaccgtagcctgacgggcaagctggaaccggtgtctccccccagccccccgcacactgaccctgagctggagctggtgccgccacggctgtccaaggaggagctgatccagaacatggaccgcgtggaccgagagatcaccatggtagagcagcagatctctaagctgaagaagaagcagcaacagctggaggaggaggctgccaagccgcccgagcctgagaagcccgtgtcaccgccgcccatcgagtcgaagcaccgcagcctggtgcagatcatctacgacgagaaccggaagaaggctgaagctgcacatcggattctggaaggcctggggccccaggtggagctgccgctgtacaaccagccctccgacacccggcagtatcatgagaacatcaaaataaaccaggcgatgcggaagaagctaatcttgtacttcaagaggaggaatcacgctcggaaacaatgggagcagaagttctgccagcgctatgaccagctcatggaggcctgggagaagaaggtggagcgcatcgagaacaacccccggcggcgggccaaggagagcaaggtgcgcgagtactacgagaagcagttccctgagatccgcaagcagcgcgagctgcaggagcgcatgcagagggtgggccagcggggcagtgggctgtccatgtcggccgcccgcagcgagcacgaggtgtcagagatcatcgatggcctctcagagcaggagaacctggagaagcagatgcgccagctggccgtgatcccgcccatgctgtacgacgctgaccagcagcgcatcaagttcatcaacatgaacgggcttatggccgaccccatgaaggtgtacaaagaccgccaggtcatgaacatgtggagtgagcaggagaaggagaccttccgggagaagttcatgcagcatcccaagaactttggcctgatcgcatcattcctggagaggaagacagtggctgagtgcgtcctctattactacctgactaagaagaatgagaactataagagcctggtgagacggagctatcggcgccgcggcaagagccagaacgtgcgcatcgaccccagtagcctgtccttcaacatgtggaaggagatccctatccccttctatctctccgtctacttctttgacgtcatgaaccccagcgagatcctgaagggcgagaagccgcaggtgcgggagcgcgggccctacgtgtacagggagttcaggcacaaaagcaacatcaccttcaacaacaacgacaccgtgtccttcctcgagtaccgcaccttccagttccagccctccaagtcccacggctcggagagcgactacatcgtcatgcccaacatcctggtcttgggtgcggcggtgatgatggagaataagcccatgaccctgaagctcatcatgaccttggcattcaccaccctcggcgaacgtgccttcatgaaccgcactgtgggtgagatcatgtggggctacaaggacccccttgtgaatctcatcaacaagtactttccaggcatgttccccttcaaggacaagttcggattatttgctgagctcaacaactccgactctgggctcttcacggtgttcacgggggtccagaacatcagcaggatccacctcgtggacaagtggaacgggctgagcaaggttgacttctggcattccgatcagtgcaacatgatcaatggaacttctgggcaaatgtggccgcccttcatgactcctgagtcctcgctggagttctacagcccggaggcctgccgatccatgaagctaatgtacaaggagtcaggggtgtttgaaggcatccccacctatcgcttcgtggctcccaaaaccctgtttgccaacgggtccatctacccacccaacgaaggcttctgcccgtgcctggagtctggaattcagaacgtcagcacctgcaggttcagtgcccccttgtttctctcccatcctcacttcctcaacgctgacccggttctggcagaagcggtgactggcctgcaccctaaccaggaggcacactccttgttcctggacatccacccggtcacgggaatccccatgaactgctctgtgaaactgcagctgagcctctacatgaaatctgtcgcaggcattggacaaactgggaagattgagcctgtggtcctgccgctgctctggtttgcagagagcggggccatggagggggagactcttcacacattctacactcagctggtgttgatgcccaaggtgatgcactatgcccagtacgtcctcctggcgctgggctgcgtcctgctgctggtccctgtcatctgccaaatccggagccaagtaggtgctggccagagggcagcccgggctgacagccattcgcttgcctgctgggggaaaggggcctcagatcggaccctctggccaaccgcagcctggagcccacctccagcagcagtcctgcgtctctgccggagtgggagcggtcactgctgggggctgcgcagcacgcttgcgtcttttgcatgccgcgttgccactactctgcctgttctggaaggcctgggaccctcccttggagggggcacaggtgggctttgagtaatgagacctggtacttgcatcatccattcatcaagtcagcacccggggatgccaggttctgttaggggcgaggggacgtacagcagtagaggagacagctgagatccctgctcagggggattgaggggggctggcatcccagccggggagacagatgaaaaccaagtaaatcagcagaaaagataatttcactcatgataggagctgtgaggggttagagccaaatagaaatacagcgtgagccacgtgtgaggttttcagtttaaattttctaatagccacttaacagtcaaaggaaacaggtggaattaattttaatcttatttaacccaaatatatgcaaagtattatcacttcaacatgtaatcagtataaacggc

SEQ ID NO: 1221 - DNA, 3567 bp, Homo sapiens
gccggcgccctaggaggcggcggcgggaggatcgcgtcccgacccgaggccgggcctgctgcgcgcccccagcccgatcggcaccgccacttgcctgagcgccccggcggcccgagcgcgccccaagcccgggcgccaccgctgccacctccgcgaggtctccctgagtctttgaggacacagcctcgctggaggcagtttctggtgccagtgacggggtggcccgtgagctgatgacgaggactggcttttaatccttggtggtgattaagagaaagcttattggggcctgggagcagctccccgccgacccccaccaccatgtcgggatccacacagcctgtggcacagacgtggagggccactgagccccgctacccgccccacagcctttcctacccagtgcagatcgcccggacgcacacggacgtcgggctcctggagtaccagcaccactcccgcgactatgcctcccacctgtcgcccggctccatcatccagccccagcggcggaggccctccctgctgtctgagttccagcccgggaatgaacggtcccaggagctccacctgcggccagagtcccactcatacctgcccgagctggggaagtcagagatggagttcattgaaagcaagcgccctcggctagagctgctgcctgaccccctgctgcgaccgtcacccctgctggccacgggccagcctgcgggatctgaagacctcaccaaggaccgtagcctgacgggcaagctggaaccggtgtctccccccagccccccgcacactgaccctgagctggagctggtgccgccacggctgtccaaggaggagctgatccagaacatggaccgcgtggaccgagagatcaccatggtagagcagcagatctctaagctgaagaagaagcagcaacagctggaggaggaggctgccaagccgcccgagcctgagaagcccgtgtcaccgccgcccatcgagtcgaagcaccgcagcctggtgcagatcatctacgacgagaaccggaagaaggctgaagctgcacatcggattctggaaggcctggggccccaggtggagctgaacgtgcgcatcgaccccagtagcctgtccttcaacatgtggaaggagatccctatccccttctatctctccgtctacttctttgacgtcatgaaccccagcgagatcctgaagggcgagaagccgcaggtgcgggagcgcgggccctacgtgtacagggagttcaggcacaaaagcaacatcaccttcaacaacaacgacaccgtgtccttcctcgagtaccgcaccttccagttccagccctccaagtcccacggctcggagagcgactacatcgtcatgcccaacatcctggtcttgggtgcggcggtgatgatggagaataagcccatgaccctgaagctcatcatgaccttggcattcaccaccctcggcgaacgtgccttcatgaaccgcactgtgggtgagatcatgtggggctacaaggacccccttgtgaatctcatcaacaagtactttccaggcatgttccccttcaaggacaagttcggattatttgctgagctcaacaactccgactctgggctcttcacggtgttcacgggggtccagaacatcagcaggatccacctcgtggacaagtggaacgggctgagcaaggttgacttctggcattccgatcagtgcaacatgatcaatggaacttctgggcaaatgtggccgcccttcatgactcctgagtcctcgctggagttctacagcccggaggcctgccgatccatgaagctaatgtacaaggagtcaggggtgtttgaaggcatccccacctatcgcttcgtggctcccaaaaccctgtttgccaacgggtccatctacccacccaacgaaggcttctgcccgtgcctggagtctggaattcagaacgtcagcacctgcaggttcagtgcccccttgtttctctcccatcctcacttcctcaacgctgacccggttctggcagaagcggtgactggcctgcaccctaaccaggaggcacactccttgttcctggacatccacccggtcacgggaatccccatgaactgctctgtgaaactgcagctgagcctctacatgaaatctgtcgcaggcattggacaaactgggaagattgagcctgtggtcctgccgctgctctggtttgcagagagcggggccatggagggggagactcttcacacattctacactcagctggtgttgatgcccaaggtgatgcactatgcccagtacgtcctcctggcgctgggctgcgtcctgctgctggtccctgtcatctgccaaatccggagccaagtaggtgctggccagagggcagcccgggctgacagccattcgcttgcctgctgggggaaaggggcctcagatcggaccctctggccaaccgcagcctggagcccacctccagcagcagtcctgcgtctctgccggagtgggagcggtcactgctgggggctgcgcagcacgcttgcgtcttttgcatgccgcgttgccactactctgcctgttctggaaggcctgggaccctcccttggagggggcacagggtcctgaggacaccgtgagccagccaggcctggccgctgggcctgaccggccccccagcccctacaccccgcttctcccggactctcccagcggacagccccccagccccacagcctgagcctcccagctgccatgtgcctgttgcacacctgcacacacgccctggcacacatacacacatgcgtgcaggcttgtgcagacactcagggatggagctgctgctgaagggacttgtagggagaggctcgtcaacaagcactgttctggaaccttctctccacgtggcccacaggcctgaccacaggggctgtgggtcctgcgtccccttcctcgggtgagcctggcctgtcccgttcagccgttgggcccaggcttcctcccctccaaggtgaaacactgcagtcccggtgtggtggctccccatgcaggacgggccaggctgggagtgccgccttcctgtgccaaattcagtggggactcagtgcccaggccctggccacgagctttggccttggtctacctgccaggccaggcaaagcgcctttacacaggcctcggaaaacaatggagtgagcacaagatgccctgtgcagctgcccgagggtctccgcccaccccggccggactttgatccccccgaagtcttcacaggcactgcatcgggttgtctggcgcccttttcctccagcctaaactgacatcatcctatggactgagccggccactctctggccgaagtggccgcaggctgtgcccccgagctgcccccaccccctcacagggtccctcagattataggtgcccaggctgaggtgaagaggcctgggggccctgccttccgggcgctcctggaccctggggcaaacctgtgacccttttctactggaatagaaatgagttttatcatctttgaaaaataattcactcttgaagtaataaacgtttaaaaaaatggga

SEQ ID NO: 1222 - DNA, 3362 bp, Homo sapiens
gccggcgccctaggaggcggcggcgggaggatcgcgtcccgacccgaggccgggcctgctgcgcgcccccagcccgatcggcaccgccacttgcctgagcgccccggcggcccgagcgcgccccaagcccgggcgccaccgctgccacctccgcgaggtctccctgagtctttgaggacacagcctcgctggaggcagtttctggtgccagtgacggggtggcccgtgagctgatgacgaggactggcttttaatccttggtggtgattaagagaaagcttattggggcctgggagcagctccccgccgacccccaccaccatgtcgggatccacacagcctgtggcacagacgtggagggccactgagccccgctacccgccccacagcctttcctacccagtgcagatcgcccggacgcacacggacgtcgggctcctggagtaccagcaccactcccgcgactatgcctcccacctgtcgcccggctccatcatccagccccagcggcggaggccctccctgctgtctgagttccagcccgggaatgaacggtcccaggagctccacctgcggccagagtcccactcatacctgcccgagctggggaagtcagagatggagttcattgaaagcaagcgccctcggctagagctgctgcctgaccccctgctgcgaccgtcacccctgctggccacgggccagcctgcgggatctgaagacctcaccaaggaccgtagcctgacgggcaagctggaaccggtgtctccccccagccccccgcacactgaccctgagctggagctggtgccgccacggctgtccaaggaggagctgatccagaacatggaccgcgtggaccgagagatcaccatggtagagcagcagatctctaagctgaagaagaagcagcaacagctggaggaggaggctgccaagccgcccgagcctgagaagcccgtgtcaccgccgcccatcgagtcgaagcaccgcagcctggtgcagatcatctacgacgagaaccggaagaaggctgaagctgcacatcggattctggaaggcctggggccccaggtggagctgaacgtgcgcatcgaccccagtagcctgtccttcaacatgtggaaggagatccctatccccttctatctctccgtctacttctttgacgtcatgaaccccagcgagatcctgaagggcgagaagccgcaggtgcgggagcgcgggccctacgtgtacagggagttcaggcacaaaagcaacatcaccttcaacaacaacgacaccgtgtccttcctcgagtaccgcaccttccagttccagccctccaagtcccacggctcggagagcgactacatcgtcatgcccaacatcctggtcttgggtgcggcggtgatgatggagaataagcccatgaccctgaagctcatcatgaccttggcattcaccaccctcggcgaacgtgccttcatgaaccgcactgtgggtgagatcatgtggggctacaaggacccccttgtgaatctcatcaacaagtactttccaggcatgttccccttcaaggacaagttcggattatttgctgagctcaacaactccgactctgggctcttcacggtgttcacgggggtccagaacatcagcaggatccacctcgtggacaagtggaacgggctgagcaaggttgacttctggcattccgatcagtgcaacatgatcaatggaacttctgggcaaatgtggccgcccttcatgactcctgagtcctcgctggagttctacagcccggaggcctgccgatccatgaagctaatgtacaaggagtcaggggtgtttgaaggcatccccacctatcgcttcgtggctcccaaaaccctgtttgccaacgggtccatctacccacccaacgaaggcttctgcccgtgcctggagtctggaattcagaacgtcagcacctgcaggttcagtgcccccttgtttctctcccatcctcacttcctcaacgctgacccggttctggcagaagcggtgactggcctgcaccctaaccaggaggcacactccttgttcctggacatccacccggtcacgggaatccccatgaactgctctgtgaaactgcagctgagcctctacatgaaatctgtcgcaggcattggacaaactgggaagattgagcctgtggtcctgccgctgctctggtttgcagagagcggggccatggagggggagactcttcacacattctacactcagctggtgttgatgcccaaggagaaatgctatttattttggagtagtagtaaaaagggctcaaaggataaggaggccattcaggcctattctgaatccctgatgacatcagctcccaagggctctgtgctgcaggaagcaaaactgtagggtcctgaggacaccgtgagccagccaggcctggccgctgggcctgaccggccccccagcccctacaccccgcttctcccggactctcccagcggacagccccccagccccacagcctgagcctcccagctgccatgtgcctgttgcacacctgcacacacgccctggcacacatacacacatgcgtgcaggcttgtgcagacactcagggatggagctgctgctgaagggacttgtagggagaggctcgtcaacaagcactgttctggaaccttctctccacgtggcccacaggcctgaccacaggggctgtgggtcctgcgtccccttcctcgggtgagcctggcctgtcccgttcagccgttgggcccaggcttcctcccctccaaggtgaaacactgcagtcccggtgtggtggctccccatgcaggacgggccaggctgggagtgccgccttcctgtgccaaattcagtggggactcagtgcccaggccctggccacgagctttggccttggtctacctgccaggccaggcaaagcgcctttacacaggcctcggaaaacaatggagtgagcacaagatgccctgtgcagctgcccgagggtctccgcccaccccggccggactttgatccccccgaagtcttcacaggcactgcatcgggttgtctggcgcccttttcctccagcctaaactgacatcatcctatggactgagccggccactctctggccgaagtggccgcaggctgtgcccccgagctgcccccaccccctcacagggtccctcagattataggtgcccaggctgaggtgaagaggcctgggggccctgccttccgggcgctcctggaccctggggcaaacctgtgacccttttctactggaatagaaatgagttttatcatctttgaaaaataattcactcttgaagtaataaacgtttaaaaaaatggga

SEQ ID NO: 1223 - DNA, 3317 bp, Homo sapiens
gccggcgccctaggaggcggcggcgggaggatcgcgtcccgacccgaggccgggcctgctgcgcgcccccagcccgatcggcaccgccacttgcctgagcgccccggcggcccgagcgcgccccaagcccgggcgccaccgctgccacctccgcgaggtctccctgagtctttgaggacacagcctcgctggaggcagtttctggtgccagtgacggggtggcccgtgagctgatgacgaggactggcttttaatccttggtggtgattaagagaaagcttattggggcctgggagcagctccccgccgacccccaccaccatgtcgggatccacacagcctgtggcacagacgtggagggccactgagccccgctacccgccccacagcctttcctacccagtgcagatcgcccggacgcacacggacgtcgggctcctggagtaccagcaccactcccgcgactatgcctcccacctgtcgcccggctccatcatccagccccagcggcggaggccctccctgctgtctgagttccagcccgggaatgaacggtcccaggagctccacctgcggccagagtcccactcatacctgcccgagctggggaagtcagagatggagttcattgaaagcaagcgccctcggctagagctgctgcctgaccccctgctgcgaccgtcacccctgctggccacgggccagcctgcgggatctgaagacctcaccaaggaccgtagcctgacgggcaagctggaaccggtgtctccccccagccccccgcacactgaccctgagctggagctggtgccgccacggctgtccaaggaggagctgatccagaacatggaccgcgtggaccgagagatcaccatggtagagcagcagatctctaagctgaagaagaagcagcaacagctggaggaggaggctgccaagccgcccgagcctgagaagcccgtgtcaccgccgcccatcgagtcgaagcaccgcagcctggtgcagatcatctacgacgagaaccggaagaaggctgaagctgcacatcggattctggaaggcctggggccccaggtggagctgaacgtgcgcatcgaccccagtagcctgtccttcaacatgtggaaggagatccctatccccttctatctctccgtctacttctttgacgtcatgaaccccagcgagatcctgaagggcgagaagccgcaggtgcgggagcgcgggccctacgtgtacagggagttcaggcacaaaagcaacatcaccttcaacaacaacgacaccgtgtccttcctcgagtaccgcaccttccagttccagccctccaagtcccacggctcggagagcgactacatcgtcatgcccaacatcctggtcttgggtgcggcggtgatgatggagaataagcccatgaccctgaagctcatcatgaccttggcattcaccaccctcggcgaacgtgccttcatgaaccgcactgtgggtgagatcatgtggggctacaaggacccccttgtgaatctcatcaacaagtactttccaggcatgttccccttcaaggacaagttcggattatttgctgagctcaacaactccgactctgggctcttcacggtgttcacgggggtccagaacatcagcaggatccacctcgtggacaagtggaacgggctgagcaaggttgacttctggcattccgatcagtgcaacatgatcaatggaacttctgggcaaatgtggccgcccttcatgactcctgagtcctcgctggagttctacagcccggaggcctgccgatccatgaagctaatgtacaaggagtcaggggtgtttgaaggcatccccacctatcgcttcgtggctcccaaaaccctgtttgccaacgggtccatctacccacccaacgaaggcttctgcccgtgcctggagtctggaattcagaacgtcagcacctgcaggttcagtgcccccttgtttctctcccatcctcacttcctcaacgctgacccggttctggcagaagcggtgactggcctgcaccctaaccaggaggcacactccttgttcctggacatccacccggtcacgggaatccccatgaactgctctgtgaaactgcagctgagcctctacatgaaatctgtcgcaggcattggacaaactgggaagattgagcctgtggtcctgccgctgctctggtttgcagagagcggggccatggagggggagactcttcacacattctacactcagctggtgttgatgcccaaggtgatgcactatgcccagtacgtcctcctggcgctgggctgcgtcctgctgctggtccctgtcatctgccaaatccggagccaaggtcctgaggacaccgtgagccagccaggcctggccgctgggcctgaccggccccccagcccctacaccccgcttctcccggactctcccagcggacagccccccagccccacagcctgagcctcccagctgccatgtgcctgttgcacacctgcacacacgccctggcacacatacacacatgcgtgcaggcttgtgcagacactcagggatggagctgctgctgaagggacttgtagggagaggctcgtcaacaagcactgttctggaaccttctctccacgtggcccacaggcctgaccacaggggctgtgggtcctgcgtccccttcctcgggtgagcctggcctgtcccgttcagccgttgggcccaggcttcctcccctccaaggtgaaacactgcagtcccggtgtggtggctccccatgcaggacgggccaggctgggagtgccgccttcctgtgccaaattcagtggggactcagtgcccaggccctggccacgagctttggccttggtctacctgccaggccaggcaaagcgcctttacacaggcctcggaaaacaatggagtgagcacaagatgccctgtgcagctgcccgagggtctccgcccaccccggccggactttgatccccccgaagtcttcacaggcactgcatcgggttgtctggcgcccttttcctccagcctaaactgacatcatcctatggactgagccggccactctctggccgaagtggccgcaggctgtgcccccgagctgcccccaccccctcacagggtccctcagattataggtgcccaggctgaggtgaagaggcctgggggccctgccttccgggcgctcctggaccctggggcaaacctgtgacccttttctactggaatagaaatgagttttatcatctttgaaaaataattcactcttgaagtaataaacgtttaaaaaaatggga

SEQ ID NO: 1224 - DNA, 3462 bp, Homo sapiens
gccggcgccctaggaggcggcggcgggaggatcgcgtcccgacccgaggccgggcctgctgcgcgcccccagcccgatcggcaccgccacttgcctgagcgccccggcggcccgagcgcgccccaagcccgggcgccaccgctgccacctccgcgaggtctccctgagtctttgaggacacagcctcgctggaggcagtttctggtgccagtgacggggtggcccgtgagctgatgacgaggactggcttttaatccttggtggtgattaagagaaagcttattggggcctgggagcagctccccgccgacccccaccaccatgtcgggatccacacagcctgtggcacagacgtggagggccactgagccccgctacccgccccacagcctttcctacccagtgcagatcgcccggacgcacacggacgtcgggctcctggagtaccagcaccactcccgcgactatgcctcccacctgtcgcccggctccatcatccagccccagcggcggaggccctccctgctgtctgagttccagcccgggaatgaacggtcccaggagctccacctgcggccagagtcccactcatacctgcccgagctggggaagtcagagatggagttcattgaaagcaagcgccctcggctagagctgctgcctgaccccctgctgcgaccgtcacccctgctggccacgggccagcctgcgggatctgaagacctcaccaaggaccgtagcctgacgggcaagctggaaccggtgtctccccccagccccccgcacactgaccctgagctggagctggtgccgccacggctgtccaaggaggagctgatccagaacatggaccgcgtggaccgagagatcaccatggtagagcagcagatctctaagctgaagaagaagcagcaacagctggaggaggaggctgccaagccgcccgagcctgagaagcccgtgtcaccgccgcccatcgagtcgaagcaccgcagcctggtgcagatcatctacgacgagaaccggaagaaggctgaagctgcacatcggattctggaaggcctggggccccaggtggagctgccgctgtacaaccagccctccgacacccggcagtatcatgagaacatcaaaatggagttcaggcacaaaagcaacatcaccttcaacaacaacgacaccgtgtccttcctcgagtaccgcaccttccagttccagccctccaagtcccacggctcggagagcgactacatcgtcatgcccaacatcctggtcttgggtgcggcggtgatgatggagaataagcccatgaccctgaagctcatcatgaccttggcattcaccaccctcggcgaacgtgccttcatgaaccgcactgtgggtgagatcatgtggggctacaaggacccccttgtgaatctcatcaacaagtactttccaggcatgttccccttcaaggacaagttcggattatttgctgagctcaacaactccgactctgggctcttcacggtgttcacgggggtccagaacatcagcaggatccacctcgtggacaagtggaacgggctgagcaaggttgacttctggcattccgatcagtgcaacatgatcaatggaacttctgggcaaatgtggccgcccttcatgactcctgagtcctcgctggagttctacagcccggaggcctgccgatccatgaagctaatgtacaaggagtcaggggtgtttgaaggcatccccacctatcgcttcgtggctcccaaaaccctgtttgccaacgggtccatctacccacccaacgaaggcttctgcccgtgcctggagtctggaattcagaacgtcagcacctgcaggttcagtgcccccttgtttctctcccatcctcacttcctcaacgctgacccggttctggcagaagcggtgactggcctgcaccctaaccaggaggcacactccttgttcctggacatccacccggtcacgggaatccccatgaactgctctgtgaaactgcagctgagcctctacatgaaatctgtcgcaggcattggacaaactgggaagattgagcctgtggtcctgccgctgctctggtttgcagagagcggggccatggagggggagactcttcacacattctacactcagctggtgttgatgcccaaggtgatgcactatgcccagtacgtcctcctggcgctgggctgcgtcctgctgctggtccctgtcatctgccaaatccggagccaagtaggtgctggccagagggcagcccgggctgacagccattcgcttgcctgctgggggaaaggggcctcagatcggaccctctggccaaccgcagcctggagcccacctccagcagcagtcctgcgtctctgccggagtgggagcggtcactgctgggggctgcgcagcacgcttgcgtcttttgcatgccgcgttgccactactctgcctgttctggaaggcctgggaccctcccttggagggggcacagggtcctgaggacaccgtgagccagccaggcctggccgctgggcctgaccggccccccagcccctacaccccgcttctcccggactctcccagcggacagccccccagccccacagcctgagcctcccagctgccatgtgcctgttgcacacctgcacacacgccctggcacacatacacacatgcgtgcaggcttgtgcagacactcagggatggagctgctgctgaagggacttgtagggagaggctcgtcaacaagcactgttctggaaccttctctccacgtggcccacaggcctgaccacaggggctgtgggtcctgcgtccccttcctcgggtgagcctggcctgtcccgttcagccgttgggcccaggcttcctcccctccaaggtgaaacactgcagtcccggtgtggtggctccccatgcaggacgggccaggctgggagtgccgccttcctgtgccaaattcagtggggactcagtgcccaggccctggccacgagctttggccttggtctacctgccaggccaggcaaagcgcctttacacaggcctcggaaaacaatggagtgagcacaagatgccctgtgcagctgcccgagggtctccgcccaccccggccggactttgatccccccgaagtcttcacaggcactgcatcgggttgtctggcgcccttttcctccagcctaaactgacatcatcctatggactgagccggccactctctggccgaagtggccgcaggctgtgcccccgagctgcccccaccccctcacagggtccctcagattataggtgcccaggctgaggtgaagaggcctgggggccctgccttccgggcgctcctggaccctggggcaaacctgtgacccttttctactggaatagaaatgagttttatcatctttgaaaaataattcactcttgaagtaataaacgtttaaaaaaatggga

SEQ ID NO: 1225 - DNA, 4163 bp, Homo sapiens
gccggcgccctaggaggcggcggcgggaggatcgcgtcccgacccgaggccgggcctgctgcgcgcccccagcccgatcggcaccgccacttgcctgagcgccccggcggcccgagcgcgccccaagcccgggcgccaccgctgccacctccgcgaggtctccctgagtctttgaggacacagcctcgctggaggcagtttctggtgccagtgacggggtggcccgtgagctgatgacgaggactggcttttaatccttggtggtgattaagagaaagcttattggggcctgggagcagctccccgccgacccccaccaccatgtcgggatccacacagcctgtggcacagacgtggagggccactgagccccgctacccgccccacagcctttcctacccagtgcagatcgcccggacgcacacggacgtcgggctcctggagtaccagcaccactcccgcgactatgcctcccacctgtcgcccggctccatcatccagccccagcggcggaggccctccctgctgtctgagttccagcccgggaatgaacggtcccaggagctccacctgcggccagagtcccactcatacctgcccgagctggggaagtcagagatggagttcattgaaagcaagcgccctcggctagagctgctgcctgaccccctgctgcgaccgtcacccctgctggccacgggccagcctgcgggatctgaagacctcaccaaggaccgtagcctgacgggcaagctggaaccggtgtctccccccagccccccgcacactgaccctgagctggagctggtgccgccacggctgtccaaggaggagctgatccagaacatggaccgcgtggaccgagagatcaccatggtagagcagcagatctctaagctgaagaagaagcagcaacagctggaggaggaggctgccaagccgcccgagcctgagaagcccgtgtcaccgccgcccatcgagtcgaagcaccgcagcctggtgcagatcatctacgacgagaaccggaagaaggctgaagctgcacatcggattctggaaggcctggggccccaggtggagctgccgctgtacaaccagccctccgacacccggcagtatcatgagaacatcaaaataaaccaggcgatgcggaagaagctaatcttgtacttcaagaggaggaatcacgctcggaaacaatgggagcagaagttctgccagcgctatgaccagctcatggaggcctgggagaagaaggtggagcgcatcgagaacaacccccggcggcgggccaaggagagcaaggtgcgcgagtactacgagaagcagttccctgagatccgcaagcagcgcgagctgcaggagcgcatgcagagggtgggccagcggggcagtgggctgtccatgtcggccgcccgcagcgagcacgaggtgtcagagatcatcgatggcctctcagagcaggagaacctggagaagcagatgcgccagctggccgtgatcccgcccatgctgtacgacgctgaccagcagcgcatcaagttcatcaacatgaacgggcttatggccgaccccatgaaggtgtacaaagaccgccaggtcatgaacatgtggagtgagcaggagaaggagaccttccgggagaagttcatgcagcatcccaagaactttggcctgatcgcatcattcctggagaggaagacagtggctgagtgcgtcctctattactacctgactaagaagaatgagaactataagagcctggtgagacggagctatcggcgccgcggcaagagccagaacgtgcgcatcgaccccagtagcctgtccttcaacatgtggaaggagatccctatccccttctatctctccgtctacttctttgacgtcatgaaccccagcgagatcctgaagggcgagaagccgcaggtgcgggagcgcgggccctacgtgtacagggagttcaggcacaaaagcaacatcaccttcaacaacaacgacaccgtgtccttcctcgagtaccgcaccttccagttccagccctccaagtcccacggctcggagagcgactacatcgtcatgcccaacatcctggtcttgggtgcggcggtgatgatggagaataagcccatgaccctgaagctcatcatgaccttggcattcaccaccctcggcgaacgtgccttcatgaaccgcactgtgggtgagatcatgtggggctacaaggacccccttgtgaatctcatcaacaagtactttccaggcatgttccccttcaaggacaagttcggattatttgctgagctcaacaactccgactctgggctcttcacggtgttcacgggggtccagaacatcagcaggatccacctcgtggacaagtggaacgggctgagcaaggttgacttctggcattccgatcagtgcaacatgatcaatggaacttctgggcaaatgtggccgcccttcatgactcctgagtcctcgctggagttctacagcccggaggcctgccgatccatgaagctaatgtacaaggagtcaggggtgtttgaaggcatccccacctatcgcttcgtggctcccaaaaccctgtttgccaacgggtccatctacccacccaacgaaggcttctgcccgtgcctggagtctggaattcagaacgtcagcacctgcaggttcagtgcccccttgtttctctcccatcctcacttcctcaacgctgacccggttctggcagaagcggtgactggcctgcaccctaaccaggaggcacactccttgttcctggacatccacccggtcacgggaatccccatgaactgctctgtgaaactgcagctgagcctctacatgaaatctgtcgcaggcattggacaaactgggaagattgagcctgtggtcctgccgctgctctggtttgcagagagcggggccatggagggggagactcttcacacattctacactcagctggtgttgatgcccaaggtgatgcactatgcccagtacgtcctcctggcgctgggctgcgtcctgctgctggtccctgtcatctgccaaatccggagccaagagaaatgctatttattttggagtagtagtaaaaagggctcaaaggataaggaggccattcaggcctattctgaatccctgatgacatcagctcccaagggctctgtgctgcaggaagcaaaactgtagggtcctgaggacaccgtgagccagccaggcctggccgctgggcctgaccggccccccagcccctacaccccgcttctcccggactctcccagcggacagccccccagccccacagcctgagcctcccagctgccatgtgcctgttgcacacctgcacacacgccctggcacacatacacacatgcgtgcaggcttgtgcagacactcagggatggagctgctgctgaagggacttgtagggagaggctcgtcaacaagcactgttctggaaccttctctccacgtggcccacaggcctgaccacaggggctgtgggtcctgcgtccccttcctcgggtgagcctggcctgtcccgttcagccgttgggcccaggcttcctcccctccaaggtgaaacactgcagtcccggtgtggtggctccccatgcaggacgggccaggctgggagtgccgccttcctgtgccaaattcagtggggactcagtgcccaggccctggccacgagctttggccttggtctacctgccaggccaggcaaagcgcctttacacaggcctcggaaaacaatggagtgagcacaagatgccctgtgcagctgcccgagggtctccgcccaccccggccggactttgatccccccgaagtcttcacaggcactgcatcgggttgtctggcgcccttttcctccagcctaaactgacatcatcctatggactgagccggccactctctggccgaagtggccgcaggctgtgcccccgagctgcccccaccccctcacagggtccctcagattataggtgcccaggctgaggtgaagaggcctgggggccctgccttccgggcgctcctggaccctggggcaaacctgtgacccttttctactggaatagaaatgagttttatcatctttgaaaaataattcactcttgaagtaataaacgtttaaaaaaatggga

SEQ ID NO: 1226 - DNA, 3260 bp, Homo sapiens
gccggcgccctaggaggcggcggcgggaggatcgcgtcccgacccgaggccgggcctgctgcgcgcccccagcccgatcggcaccgccacttgcctgagcgccccggcggcccgagcgcgccccaagcccgggcgccaccgctgccacctccgcgaggtctccctgagtctttgaggacacagcctcgctggaggcagtttctggtgccagtgacggggtggcccgtgagctgatgacgaggactggcttttaatccttggtggtgattaagagaaagcttattggggcctgggagcagctccccgccgacccccaccaccatgtcgggatccacacagcctgtggcacagacgtggagggccactgagccccgctacccgccccacagcctttcctacccagtgcagatcgcccggacgcacacggacgtcgggctcctggagtaccagcaccactcccgcgactatgcctcccacctgtcgcccggctccatcatccagccccagcggcggaggccctccctgctgtctgagttccagcccgggaatgaacggtcccaggagctccacctgcggccagagtcccactcatacctgcccgagctggggaagtcagagatggagttcattgaaagcaagcgccctcggctagagctgctgcctgaccccctgctgcgaccgtcacccctgctggccacgggccagcctgcgggatctgaagacctcaccaaggaccgtagcctgacgggcaagctggaaccggtgtctccccccagccccccgcacactgaccctgagctggagctggtgccgccacggctgtccaaggaggagctgatccagaacatggaccgcgtggaccgagagatcaccatggtagagcagcagatctctaagctgaagaagaagcagcaacagctggaggaggaggctgccaagccgcccgagcctgagaagcccgtgtcaccgccgcccatcgagtcgaagcaccgcagcctggtgcagatcatctacgacgagaaccggaacgtgcgcatcgaccccagtagcctgtccttcaacatgtggaaggagatccctatccccttctatctctccgtctacttctttgacgtcatgaaccccagcgagatcctgaagggcgagaagccgcaggtgcgggagcgcgggccctacgtgtacagggagttcaggcacaaaagcaacatcaccttcaacaacaacgacaccgtgtccttcctcgagtaccgcaccttccagttccagccctccaagtcccacggctcggagagcgactacatcgtcatgcccaacatcctggtcttgggtgcggcggtgatgatggagaataagcccatgaccctgaagctcatcatgaccttggcattcaccaccctcggcgaacgtgccttcatgaaccgcactgtgggtgagatcatgtggggctacaaggacccccttgtgaatctcatcaacaagtactttccaggcatgttccccttcaaggacaagttcggattatttgctgagctcaacaactccgactctgggctcttcacggtgttcacgggggtccagaacatcagcaggatccacctcgtggacaagtggaacgggctgagcaaggttgacttctggcattccgatcagtgcaacatgatcaatggaacttctgggcaaatgtggccgcccttcatgactcctgagtcctcgctggagttctacagcccggaggcctgccgatccatgaagctaatgtacaaggagtcaggggtgtttgaaggcatccccacctatcgcttcgtggctcccaaaaccctgtttgccaacgggtccatctacccacccaacgaaggcttctgcccgtgcctggagtctggaattcagaacgtcagcacctgcaggttcagtgcccccttgtttctctcccatcctcacttcctcaacgctgacccggttctggcagaagcggtgactggcctgcaccctaaccaggaggcacactccttgttcctggacatccacccggtcacgggaatccccatgaactgctctgtgaaactgcagctgagcctctacatgaaatctgtcgcaggcattggacaaactgggaagattgagcctgtggtcctgccgctgctctggtttgcagagagcggggccatggagggggagactcttcacacattctacactcagctggtgttgatgcccaaggtgatgcactatgcccagtacgtcctcctggcgctgggctgcgtcctgctgctggtccctgtcatctgccaaatccggagccaaggtcctgaggacaccgtgagccagccaggcctggccgctgggcctgaccggccccccagcccctacaccccgcttctcccggactctcccagcggacagccccccagccccacagcctgagcctcccagctgccatgtgcctgttgcacacctgcacacacgccctggcacacatacacacatgcgtgcaggcttgtgcagacactcagggatggagctgctgctgaagggacttgtagggagaggctcgtcaacaagcactgttctggaaccttctctccacgtggcccacaggcctgaccacaggggctgtgggtcctgcgtccccttcctcgggtgagcctggcctgtcccgttcagccgttgggcccaggcttcctcccctccaaggtgaaacactgcagtcccggtgtggtggctccccatgcaggacgggccaggctgggagtgccgccttcctgtgccaaattcagtggggactcagtgcccaggccctggccacgagctttggccttggtctacctgccaggccaggcaaagcgcctttacacaggcctcggaaaacaatggagtgagcacaagatgccctgtgcagctgcccgagggtctccgcccaccccggccggactttgatccccccgaagtcttcacaggcactgcatcgggttgtctggcgcccttttcctccagcctaaactgacatcatcctatggactgagccggccactctctggccgaagtggccgcaggctgtgcccccgagctgcccccaccccctcacagggtccctcagattataggtgcccaggctgaggtgaagaggcctgggggccctgccttccgggcgctcctggaccctggggcaaacctgtgacccttttctactggaatagaaatgagttttatcatctttgaaaaataattcactcttgaagtaataaacgtttaaaaaaatggga

SEQ ID NO: 1227 - DNA, 3389 bp, Homo sapiens
gccggcgccctaggaggcggcggcgggaggatcgcgtcccgacccgaggccgggcctgctgcgcgcccccagcccgatcggcaccgccacttgcctgagcgccccggcggcccgagcgcgccccaagcccgggcgccaccgctgccacctccgcgaggtctccctgagtctttgaggacacagcctcgctggaggcagtttctggtgccagtgacggggtggcccgtgagctgatgacgaggactggcttttaatccttggtggtgattaagagaaagcttattggggcctgggagcagctccccgccgacccccaccaccatgtcgggatccacacagcctgtggcacagacgtggagggccactgagccccgctacccgccccacagcctttcctacccagtgcagatcgcccggacgcacacggacgtcgggctcctggagtaccagcaccactcccgcgactatgcctcccacctgtcgcccggctccatcatccagccccagcggcggaggccctccctgctgtctgagttccagcccgggaatgaacggtcccaggagctccacctgcggccagagtcccactcatacctgcccgagctggggaagtcagagatggagttcattgaaagcaagcgccctcggctagagctgctgcctgaccccctgctgcgaccgtcacccctgctggccacgggccagcctgcgggatctgaagacctcaccaaggaccgtagcctgacgggcaagctggaaccggtgtctccccccagccccccgcacactgaccctgagctggagctggtgccgccacggctgtccaaggaggagctgatccagaacatggaccgcgtggaccgagagatcaccatggtagagcagcagatctctaagctgaagaagaagcagcaacagctggaggaggaggctgccaagccgcccgagcctgagaagcccgtgtcaccgccgcccatcgagtcgaagcaccgcagcctggtgcagatcatctacgacgagaaccggaacgtgcgcatcgaccccagtagcctgtccttcaacatgtggaaggagatccctatccccttctatctctccgtctacttctttgacgtcatgaaccccagcgagatcctgaagggcgagaagccgcaggtgcgggagcgcgggccctacgtgtacagggagttcaggcacaaaagcaacatcaccttcaacaacaacgacaccgtgtccttcctcgagtaccgcaccttccagttccagccctccaagtcccacggctcggagagcgactacatcgtcatgcccaacatcctggtcttgggtgcggcggtgatgatggagaataagcccatgaccctgaagctcatcatgaccttggcattcaccaccctcggcgaacgtgccttcatgaaccgcactgtgggtgagatcatgtggggctacaaggacccccttgtgaatctcatcaacaagtactttccaggcatgttccccttcaaggacaagttcggattatttgctgagctcaacaactccgactctgggctcttcacggtgttcacgggggtccagaacatcagcaggatccacctcgtggacaagtggaacgggctgagcaaggttgacttctggcattccgatcagtgcaacatgatcaatggaacttctgggcaaatgtggccgcccttcatgactcctgagtcctcgctggagttctacagcccggaggcctgccgatccatgaagctaatgtacaaggagtcaggggtgtttgaaggcatccccacctatcgcttcgtggctcccaaaaccctgtttgccaacgggtccatctacccacccaacgaaggcttctgcccgtgcctggagtctggaattcagaacgtcagcacctgcaggttcagtgcccccttgtttctctcccatcctcacttcctcaacgctgacccggttctggcagaagcggtgactggcctgcaccctaaccaggaggcacactccttgttcctggacatccacccggtcacgggaatccccatgaactgctctgtgaaactgcagctgagcctctacatgaaatctgtcgcaggcattggacaaactgggaagattgagcctgtggtcctgccgctgctctggtttgcagagagcggggccatggagggggagactcttcacacattctacactcagctggtgttgatgcccaaggtgatgcactatgcccagtacgtcctcctggcgctgggctgcgtcctgctgctggtccctgtcatctgccaaatccggagccaagagaaatgctatttattttggagtagtagtaaaaagggctcaaaggataaggaggccattcaggcctattctgaatccctgatgacatcagctcccaagggctctgtgctgcaggaagcaaaactgtagggtcctgaggacaccgtgagccagccaggcctggccgctgggcctgaccggccccccagcccctacaccccgcttctcccggactctcccagcggacagccccccagccccacagcctgagcctcccagctgccatgtgcctgttgcacacctgcacacacgccctggcacacatacacacatgcgtgcaggcttgtgcagacactcagggatggagctgctgctgaagggacttgtagggagaggctcgtcaacaagcactgttctggaaccttctctccacgtggcccacaggcctgaccacaggggctgtgggtcctgcgtccccttcctcgggtgagcctggcctgtcccgttcagccgttgggcccaggcttcctcccctccaaggtgaaacactgcagtcccggtgtggtggctccccatgcaggacgggccaggctgggagtgccgccttcctgtgccaaattcagtggggactcagtgcccaggccctggccacgagctttggccttggtctacctgccaggccaggcaaagcgcctttacacaggcctcggaaaacaatggagtgagcacaagatgccctgtgcagctgcccgagggtctccgcccaccccggccggactttgatccccccgaagtcttcacaggcactgcatcgggttgtctggcgcccttttcctccagcctaaactgacatcatcctatggactgagccggccactctctggccgaagtggccgcaggctgtgcccccgagctgcccccaccccctcacagggtccctcagattataggtgcccaggctgaggtgaagaggcctgggggccctgccttccgggcgctcctggaccctggggcaaacctgtgacccttttctactggaatagaaatgagttttatcatctttgaaaaataattcactcttgaagtaataaacgtttaaaaaaatggga

SEQ ID NO: 1228 - DNA, 4079 bp, Homo sapiens
gccggcgccctaggaggcggcggcgggaggatcgcgtcccgacccgaggccgggcctgctgcgcgcccccagcccgatcggcaccgccacttgcctgagcgccccggcggcccgagcgcgccccaagcccgggcgccaccgctgccacctccgcgaggtctccctgagtctttgaggacacagcctcgctggaggcagtttctggtgccagtgacggggtggcccgtgagctgatgacgaggactggcttttaatccttggtggtgattaagagaaagcttattggggcctgggagcagctccccgccgacccccaccaccatgtcgggatccacacagcctgtggcacagacgtggagggccactgagccccgctacccgccccacagcctttcctacccagtgcagatcgcccggacgcacacggacgtcgggctcctggagtaccagcaccactcccgcgactatgcctcccacctgtcgcccggctccatcatccagccccagcggcggaggccctccctgctgtctgagttccagcccgggaatgaacggtcccaggagctccacctgcggccagagtcccactcatacctgcccgagctggggaagtcagagatggagttcattgaaagcaagcgccctcggctagagctgctgcctgaccccctgctgcgaccgtcacccctgctggccacgggccagcctgcgggatctgaagacctcaccaaggaccgtagcctgacgggcaagctggaaccggtgtctccccccagccccccgcacactgaccctgagctggagctggtgccgccacggctgtccaaggaggagctgatccagaacatggaccgcgtggaccgagagatcaccatggtagagcagcagatctctaagctgaagaagaagcagcaacagctggaggaggaggctgccaagccgcccgagcctgagaagcccgtgtcaccgccgcccatcgagtcgaagcaccgcagcctggtgcagatcatctacgacgagaaccggaagaaggctgaagctgcacatcggattctggaaggcctggggccccaggtggagctgccgctgtacaaccagccctccgacacccggcagtatcatgagaacatcaaaataaaccaggcgatgcggaagaagctaatcttgtacttcaagaggaggaatcacgctcggaaacaatgggagcagaagttctgccagcgctatgaccagctcatggaggcctgggagaagaaggtggagcgcatcgagaacaacccccggcggcgggccaaggagagcaaggtgcgcgagtactacgagaagcagttccctgagatccgcaagcagcgcgagctgcaggagcgcatgcagagggtgggccagcggggcagtgggctgtccatgtcggccgcccgcagcgagcacgaggtgtcagagatcatcgatggcctctcagagcaggagaacctggagaagcagatgcgccagctggccgtgatcccgcccatgctgtacgacgctgaccagcagcgcatcaagttcatcaacatgaacgggcttatggccgaccccatgaaggtgtacaaagaccgccaggtcatgaacatgtggagtgagcaggagaaggagaccttccgggagaagttcatgcagcatcccaagaactttggcctgatcgcatcattcctggagaggaagacagtggctgagtgcgtcctctattactacctgactaagaagaatgagaactataagagcctggtgagacggagctatcggcgccgcggcaagagccagaacgtgcgcatcgaccccagtagcctgtccttcaacatgtggaaggagatccctatccccttctatctctccgtctacttctttgacgtcatgaaccccagcgagatcctgaagggcgagaagccgcaggtgcgggagcgcgggccctacgtgtacagggagttcaggcacaaaagcaacatcaccttcaacaacaacgacaccgtgtccttcctcgagtaccgcaccttccagttccagccctccaagtcccacggctcggagagcgactacatcgtcatgcccaacatcctggtcttgggtgcggcggtgatgatggagaataagcccatgaccctgaagctcatcatgaccttggcattcaccaccctcggcgaacgtgccttcatgaaccgcactgtgggtgagatcatgtggggctacaaggacccccttgtgaatctcatcaacaagtactttccaggcatgttccccttcaaggacaagttcggattatttgctgagctcaacaactccgactctgggctcttcacggtgttcacgggggtccagaacatcagcaggatccacctcgtggacaagtggaacgggctgagcaaggttgacttctggcattccgatcagtgcaacatgatcaatggaacttctgggcaaatgtggccgcccttcatgactcctgagtcctcgctggagttctacagcccggaggcctgccgatccatgaagctaatgtacaaggagtcaggggtgtttgaaggcatccccacctatcgcttcgtggctcccaaaaccctgtttgccaacgggtccatctacccacccaacgaaggcttctgcccgtgcctggagtctggaattcagaacgtcagcacctgcaggttcagtgcccccttgtttctctcccatcctcacttcctcaacgctgacccggttctggcagaagcggtgactggcctgcaccctaaccaggaggcacactccttgttcctggacatccacccggtcacgggaatccccatgaactgctctgtgaaactgcagctgagcctctacatgaaatctgtcgcaggcattggacaaactgggaagattgagcctgtggtcctgccgctgctctggtttgcagagagcggggccatggagggggagactcttcacacattctacactcagctggtgttgatgcccaaggagaaatgctatttattttggagtagtagtaaaaagggctcaaaggataaggaggccattcaggcctattctgaatccctgatgacatcagctcccaagggctctgtgctgcaggaagcaaaactgtagggtcctgaggacaccgtgagccagccaggcctggccgctgggcctgaccggccccccagcccctacaccccgcttctcccggactctcccagcggacagccccccagccccacagcctgagcctcccagctgccatgtgcctgttgcacacctgcacacacgccctggcacacatacacacatgcgtgcaggcttgtgcagacactcagggatggagctgctgctgaagggacttgtagggagaggctcgtcaacaagcactgttctggaaccttctctccacgtggcccacaggcctgaccacaggggctgtgggtcctgcgtccccttcctcgggtgagcctggcctgtcccgttcagccgttgggcccaggcttcctcccctccaaggtgaaacactgcagtcccggtgtggtggctccccatgcaggacgggccaggctgggagtgccgccttcctgtgccaaattcagtggggactcagtgcccaggccctggccacgagctttggccttggtctacctgccaggccaggcaaagcgcctttacacaggcctcggaaaacaatggagtgagcacaagatgccctgtgcagctgcccgagggtctccgcccaccccggccggactttgatccccccgaagtcttcacaggcactgcatcgggttgtctggcgcccttttcctccagcctaaactgacatcatcctatggactgagccggccactctctggccgaagtggccgcaggctgtgcccccgagctgcccccaccccctcacagggtccctcagattataggtgcccaggctgaggtgaagaggcctgggggccctgccttccgggcgctcctggaccctggggcaaacctgtgacccttttctactggaatagaaatgagttttatcatctttgaaaaataattcactcttgaagtaataaacgtttaaaaaaatggga

SEQ ID NO: 1229 - DNA, 2848 bp, Homo sapiens
ggtgtgcctcctggaagccggcagcacagcctgtgtgtgtggactctgctggcccgctggctggcactttttttctttttctttttttttcttgtgagagagttacttcaagttgtgtttggagctgacgtgagcgaggttggtcatgtgctcgggtgccagtgacggggtggcccgtgagctgatgacgaggactggcttttaatccttggtggtgattaagagaaagcttattggggcctgggagcagctccccgccgacccccaccaccatgtcgggatccacacagcctgtggcacagacgtggagggccactgagccccgctacccgccccacagcctttcctacccagtgcagatcgcccggacgcacacggacgtcgggctcctggagtaccagcaccactcccgcgactatgcctcccacctgtcgcccggctccatcatccagccccagcggcggaggccctccctgctgtctgagttccagcccgggaatgaacggtcccaggagctccacctgcggccagagtcccactcatacctgcccgagctggggaagtcagagatggagttcattgaaagcaagcgccctcggctagagctgctgcctgaccccctgctgcgaccgtcacccctgctggccacgggccagcctgcgggatctgaagacctcaccaaggaccgtagcctgacgggcaagctggaaccggtgtctccccccagccccccgcacactgaccctgagctggagctggtgccgccacggctgtccaaggaggagctgatccagaacatggaccgcgtggaccgagagatcaccatggtagagcagcagatctctaagctgaagaagaagcagcaacagctggaggaggaggctgccaagccgcccgagcctgagaagcccgtgtcaccgccgcccatcgagtcgaagcaccgcagcctggtgcagatcatctacgacgagaaccggaagaaggctgaagctgcacatcggattctggaaggcctggggccccaggtggagctgccgctgtacaaccagccctccgacacccggcagtatcatgagaacatcaaaatggagttcaggcacaaaagcaacatcaccttcaacaacaacgacaccgtgtccttcctcgagtaccgcaccttccagttccagccctccaagtcccacggctcggagagcgactacatcgtcatgcccaacatcctggtcttgggtgcggcggtgatgatggagaataagcccatgaccctgaagctcatcatgaccttggcattcaccaccctcggcgaacgtgccttcatgaaccgcactgtgggtgagatcatgtggggctacaaggacccccttgtgaatctcatcaacaagtactttccaggcatgttccccttcaaggacaagttcggattatttgctgagctcaacaactccgactctgggctcttcacggtgttcacgggggtccagaacatcagcaggatccacctcgtggacaagtggaacgggctgagcaaggttgacttctggcattccgatcagtgcaacatgatcaatggaacttctgggcaaatgtggccgcccttcatgactcctgagtcctcgctggagttctacagcccggaggcctgccgatccatgaagctaatgtacaaggagtcaggggtgtttgaaggcatccccacctatcgcttcgtggctcccaaaaccctgtttgccaacgggtccatctacccacccaacgaaggcttctgcccgtgcctggagtctggaattcagaacgtcagcacctgcaggttcagtgcccccttgtttctctcccatcctcacttcctcaacgctgacccggttctggcagaagcggtgactggcctgcaccctaaccaggaggcacactccttgttcctggacatccacccggtcacgggaatccccatgaactgctctgtgaaactgcagctgagcctctacatgaaatctgtcgcaggcattggacaaactgggaagattgagcctgtggtcctgccgctgctctggtttgcagagagcggggccatggagggggagactcttcacacattctacactcagctggtgttgatgcccaaggtgatgcactatgcccagtacgtcctcctggcgctgggctgcgtcctgctgctggtccctgtcatctgccaaatccggagccaagtaggtgctggccagagggcagcccgggctgacagccattcgcttgcctgctgggggaaaggggcctcagatcggaccctctggccaaccgcagcctggagcccacctccagcagcagtcctgcgtctctgccggagtgggagcggtcactgctgggggctgcgcagcacgcttgcgtcttttgcatgccgcgttgccactactctgcctgttctggaaggcctgggaccctcccttggagggggcacaggtgggctttgagtaatgagacctggtacttgcatcatccattcatcaagtcagcacccggggatgccaggttctgttaggggcgaggggacgtacagcagtagaggagacagctgagatccctgctcagggggattgaggggggctggcatcccagccggggagacagatgaaaaccaagtaaatcagcagaaaagataatttcactcatgataggagctgtgaggggttagagccaaatagaaatacagcgtgagccacgtgtgaggttttcagtttaaattttctaatagccacttaacagtcaaaggaaacaggtggaattaattttaatcttatttaacccaaatatatgcaaagtattatcacttcaacatgtaatcagtataaacggc

SEQ ID NO: 1230 - DNA, 4284 bp, Homo sapiens
gccggcgccctaggaggcggcggcgggaggatcgcgtcccgacccgaggccgggcctgctgcgcgcccccagcccgatcggcaccgccacttgcctgagcgccccggcggcccgagcgcgccccaagcccgggcgccaccgctgccacctccgcgaggtctccctgagtctttgaggacacagcctcgctggaggcagtttctggtgccagtgacggggtggcccgtgagctgatgacgaggactggcttttaatccttggtggtgattaagagaaagcttattggggcctgggagcagctccccgccgacccccaccaccatgtcgggatccacacagcctgtggcacagacgtggagggccactgagccccgctacccgccccacagcctttcctacccagtgcagatcgcccggacgcacacggacgtcgggctcctggagtaccagcaccactcccgcgactatgcctcccacctgtcgcccggctccatcatccagccccagcggcggaggccctccctgctgtctgagttccagcccgggaatgaacggtcccaggagctccacctgcggccagagtcccactcatacctgcccgagctggggaagtcagagatggagttcattgaaagcaagcgccctcggctagagctgctgcctgaccccctgctgcgaccgtcacccctgctggccacgggccagcctgcgggatctgaagacctcaccaaggaccgtagcctgacgggcaagctggaaccggtgtctccccccagccccccgcacactgaccctgagctggagctggtgccgccacggctgtccaaggaggagctgatccagaacatggaccgcgtggaccgagagatcaccatggtagagcagcagatctctaagctgaagaagaagcagcaacagctggaggaggaggctgccaagccgcccgagcctgagaagcccgtgtcaccgccgcccatcgagtcgaagcaccgcagcctggtgcagatcatctacgacgagaaccggaagaaggctgaagctgcacatcggattctggaaggcctggggccccaggtggagctgccgctgtacaaccagccctccgacacccggcagtatcatgagaacatcaaaataaaccaggcgatgcggaagaagctaatcttgtacttcaagaggaggaatcacgctcggaaacaatgggagcagaagttctgccagcgctatgaccagctcatggaggcctgggagaagaaggtggagcgcatcgagaacaacccccggcggcgggccaaggagagcaaggtgcgcgagtactacgagaagcagttccctgagatccgcaagcagcgcgagctgcaggagcgcatgcagagggtgggccagcggggcagtgggctgtccatgtcggccgcccgcagcgagcacgaggtgtcagagatcatcgatggcctctcagagcaggagaacctggagaagcagatgcgccagctggccgtgatcccgcccatgctgtacgacgctgaccagcagcgcatcaagttcatcaacatgaacgggcttatggccgaccccatgaaggtgtacaaagaccgccaggtcatgaacatgtggagtgagcaggagaaggagaccttccgggagaagttcatgcagcatcccaagaactttggcctgatcgcatcattcctggagaggaagacagtggctgagtgcgtcctctattactacctgactaagaagaatgagaactataagagcctggtgagacggagctatcggcgccgcggcaagagccagaacgtgcgcatcgaccccagtagcctgtccttcaacatgtggaaggagatccctatccccttctatctctccgtctacttctttgacgtcatgaaccccagcgagatcctgaagggcgagaagccgcaggtgcgggagcgcgggccctacgtgtacagggagttcaggcacaaaagcaacatcaccttcaacaacaacgacaccgtgtccttcctcgagtaccgcaccttccagttccagccctccaagtcccacggctcggagagcgactacatcgtcatgcccaacatcctggtcttgggtgcggcggtgatgatggagaataagcccatgaccctgaagctcatcatgaccttggcattcaccaccctcggcgaacgtgccttcatgaaccgcactgtgggtgagatcatgtggggctacaaggacccccttgtgaatctcatcaacaagtactttccaggcatgttccccttcaaggacaagttcggattatttgctgagctcaacaactccgactctgggctcttcacggtgttcacgggggtccagaacatcagcaggatccacctcgtggacaagtggaacgggctgagcaaggttgacttctggcattccgatcagtgcaacatgatcaatggaacttctgggcaaatgtggccgcccttcatgactcctgagtcctcgctggagttctacagcccggaggcctgccgatccatgaagctaatgtacaaggagtcaggggtgtttgaaggcatccccacctatcgcttcgtggctcccaaaaccctgtttgccaacgggtccatctacccacccaacgaaggcttctgcccgtgcctggagtctggaattcagaacgtcagcacctgcaggttcagtgcccccttgtttctctcccatcctcacttcctcaacgctgacccggttctggcagaagcggtgactggcctgcaccctaaccaggaggcacactccttgttcctggacatccacccggtcacgggaatccccatgaactgctctgtgaaactgcagctgagcctctacatgaaatctgtcgcaggcattggacaaactgggaagattgagcctgtggtcctgccgctgctctggtttgcagagagcggggccatggagggggagactcttcacacattctacactcagctggtgttgatgcccaaggtgatgcactatgcccagtacgtcctcctggcgctgggctgcgtcctgctgctggtccctgtcatctgccaaatccggagccaagtaggtgctggccagagggcagcccgggctgacagccattcgcttgcctgctgggggaaaggggcctcagatcggaccctctggccaaccgcagcctggagcccacctccagcagcagtcctgcgtctctgccggagtgggagcggtcactgctgggggctgcgcagcacgcttgcgtcttttgcatgccgcgttgccactactctgcctgttctggaaggcctgggaccctcccttggagggggcacagggtcctgaggacaccgtgagccagccaggcctggccgctgggcctgaccggccccccagcccctacaccccgcttctcccggactctcccagcggacagccccccagccccacagcctgagcctcccagctgccatgtgcctgttgcacacctgcacacacgccctggcacacatacacacatgcgtgcaggcttgtgcagacactcagggatggagctgctgctgaagggacttgtagggagaggctcgtcaacaagcactgttctggaaccttctctccacgtggcccacaggcctgaccacaggggctgtgggtcctgcgtccccttcctcgggtgagcctggcctgtcccgttcagccgttgggcccaggcttcctcccctccaaggtgaaacactgcagtcccggtgtggtggctccccatgcaggacgggccaggctgggagtgccgccttcctgtgccaaattcagtggggactcagtgcccaggccctggccacgagctttggccttggtctacctgccaggccaggcaaagcgcctttacacaggcctcggaaaacaatggagtgagcacaagatgccctgtgcagctgcccgagggtctccgcccaccccggccggactttgatccccccgaagtcttcacaggcactgcatcgggttgtctggcgcccttttcctccagcctaaactgacatcatcctatggactgagccggccactctctggccgaagtggccgcaggctgtgcccccgagctgcccccaccccctcacagggtccctcagattataggtgcccaggctgaggtgaagaggcctgggggccctgccttccgggcgctcctggaccctggggcaaacctgtgacccttttctactggaatagaaatgagttttatcatctttgaaaaataattcactcttgaagtaataaacgtttaaaaaaatggga

SEQ ID NO: 1231 - DNA, 3510 bp, Homo sapiens
gccggcgccctaggaggcggcggcgggaggatcgcgtcccgacccgaggccgggcctgctgcgcgcccccagcccgatcggcaccgccacttgcctgagcgccccggcggcccgagcgcgccccaagcccgggcgccaccgctgccacctccgcgaggtctccctgagtctttgaggacacagcctcgctggaggcagtttctggtgccagtgacggggtggcccgtgagctgatgacgaggactggcttttaatccttggtggtgattaagagaaagcttattggggcctgggagcagctccccgccgacccccaccaccatgtcgggatccacacagcctgtggcacagacgtggagggccactgagccccgctacccgccccacagcctttcctacccagtgcagatcgcccggacgcacacggacgtcgggctcctggagtaccagcaccactcccgcgactatgcctcccacctgtcgcccggctccatcatccagccccagcggcggaggccctccctgctgtctgagttccagcccgggaatgaacggtcccaggagctccacctgcggccagagtcccactcatacctgcccgagctggggaagtcagagatggagttcattgaaagcaagcgccctcggctagagctgctgcctgaccccctgctgcgaccgtcacccctgctggccacgggccagcctgcgggatctgaagacctcaccaaggaccgtagcctgacgggcaagctggaaccggtgtctccccccagccccccgcacactgaccctgagctggagctggtgccgccacggctgtccaaggaggagctgatccagaacatggaccgcgtggaccgagagatcaccatggtagagcagcagatctctaagctgaagaagaagcagcaacagctggaggaggaggctgccaagccgcccgagcctgagaagcccgtgtcaccgccgcccatcgagtcgaagcaccgcagcctggtgcagatcatctacgacgagaaccggaacgtgcgcatcgaccccagtagcctgtccttcaacatgtggaaggagatccctatccccttctatctctccgtctacttctttgacgtcatgaaccccagcgagatcctgaagggcgagaagccgcaggtgcgggagcgcgggccctacgtgtacagggagttcaggcacaaaagcaacatcaccttcaacaacaacgacaccgtgtccttcctcgagtaccgcaccttccagttccagccctccaagtcccacggctcggagagcgactacatcgtcatgcccaacatcctggtcttgggtgcggcggtgatgatggagaataagcccatgaccctgaagctcatcatgaccttggcattcaccaccctcggcgaacgtgccttcatgaaccgcactgtgggtgagatcatgtggggctacaaggacccccttgtgaatctcatcaacaagtactttccaggcatgttccccttcaaggacaagttcggattatttgctgagctcaacaactccgactctgggctcttcacggtgttcacgggggtccagaacatcagcaggatccacctcgtggacaagtggaacgggctgagcaaggttgacttctggcattccgatcagtgcaacatgatcaatggaacttctgggcaaatgtggccgcccttcatgactcctgagtcctcgctggagttctacagcccggaggcctgccgatccatgaagctaatgtacaaggagtcaggggtgtttgaaggcatccccacctatcgcttcgtggctcccaaaaccctgtttgccaacgggtccatctacccacccaacgaaggcttctgcccgtgcctggagtctggaattcagaacgtcagcacctgcaggttcagtgcccccttgtttctctcccatcctcacttcctcaacgctgacccggttctggcagaagcggtgactggcctgcaccctaaccaggaggcacactccttgttcctggacatccacccggtcacgggaatccccatgaactgctctgtgaaactgcagctgagcctctacatgaaatctgtcgcaggcattggacaaactgggaagattgagcctgtggtcctgccgctgctctggtttgcagagagcggggccatggagggggagactcttcacacattctacactcagctggtgttgatgcccaaggtgatgcactatgcccagtacgtcctcctggcgctgggctgcgtcctgctgctggtccctgtcatctgccaaatccggagccaagtaggtgctggccagagggcagcccgggctgacagccattcgcttgcctgctgggggaaaggggcctcagatcggaccctctggccaaccgcagcctggagcccacctccagcagcagtcctgcgtctctgccggagtgggagcggtcactgctgggggctgcgcagcacgcttgcgtcttttgcatgccgcgttgccactactctgcctgttctggaaggcctgggaccctcccttggagggggcacagggtcctgaggacaccgtgagccagccaggcctggccgctgggcctgaccggccccccagcccctacaccccgcttctcccggactctcccagcggacagccccccagccccacagcctgagcctcccagctgccatgtgcctgttgcacacctgcacacacgccctggcacacatacacacatgcgtgcaggcttgtgcagacactcagggatggagctgctgctgaagggacttgtagggagaggctcgtcaacaagcactgttctggaaccttctctccacgtggcccacaggcctgaccacaggggctgtgggtcctgcgtccccttcctcgggtgagcctggcctgtcccgttcagccgttgggcccaggcttcctcccctccaaggtgaaacactgcagtcccggtgtggtggctccccatgcaggacgggccaggctgggagtgccgccttcctgtgccaaattcagtggggactcagtgcccaggccctggccacgagctttggccttggtctacctgccaggccaggcaaagcgcctttacacaggcctcggaaaacaatggagtgagcacaagatgccctgtgcagctgcccgagggtctccgcccaccccggccggactttgatccccccgaagtcttcacaggcactgcatcgggttgtctggcgcccttttcctccagcctaaactgacatcatcctatggactgagccggccactctctggccgaagtggccgcaggctgtgcccccgagctgcccccaccccctcacagggtccctcagattataggtgcccaggctgaggtgaagaggcctgggggccctgccttccgggcgctcctggaccctggggcaaacctgtgacccttttctactggaatagaaatgagttttatcatctttgaaaaataattcactcttgaagtaataaacgtttaaaaaaatggga

SEQ ID NO: 1232 - DNA, 4034 bp, Homo sapiens
gccggcgccctaggaggcggcggcgggaggatcgcgtcccgacccgaggccgggcctgctgcgcgcccccagcccgatcggcaccgccacttgcctgagcgccccggcggcccgagcgcgccccaagcccgggcgccaccgctgccacctccgcgaggtctccctgagtctttgaggacacagcctcgctggaggcagtttctggtgccagtgacggggtggcccgtgagctgatgacgaggactggcttttaatccttggtggtgattaagagaaagcttattggggcctgggagcagctccccgccgacccccaccaccatgtcgggatccacacagcctgtggcacagacgtggagggccactgagccccgctacccgccccacagcctttcctacccagtgcagatcgcccggacgcacacggacgtcgggctcctggagtaccagcaccactcccgcgactatgcctcccacctgtcgcccggctccatcatccagccccagcggcggaggccctccctgctgtctgagttccagcccgggaatgaacggtcccaggagctccacctgcggccagagtcccactcatacctgcccgagctggggaagtcagagatggagttcattgaaagcaagcgccctcggctagagctgctgcctgaccccctgctgcgaccgtcacccctgctggccacgggccagcctgcgggatctgaagacctcaccaaggaccgtagcctgacgggcaagctggaaccggtgtctccccccagccccccgcacactgaccctgagctggagctggtgccgccacggctgtccaaggaggagctgatccagaacatggaccgcgtggaccgagagatcaccatggtagagcagcagatctctaagctgaagaagaagcagcaacagctggaggaggaggctgccaagccgcccgagcctgagaagcccgtgtcaccgccgcccatcgagtcgaagcaccgcagcctggtgcagatcatctacgacgagaaccggaagaaggctgaagctgcacatcggattctggaaggcctggggccccaggtggagctgccgctgtacaaccagccctccgacacccggcagtatcatgagaacatcaaaataaaccaggcgatgcggaagaagctaatcttgtacttcaagaggaggaatcacgctcggaaacaatgggagcagaagttctgccagcgctatgaccagctcatggaggcctgggagaagaaggtggagcgcatcgagaacaacccccggcggcgggccaaggagagcaaggtgcgcgagtactacgagaagcagttccctgagatccgcaagcagcgcgagctgcaggagcgcatgcagagggtgggccagcggggcagtgggctgtccatgtcggccgcccgcagcgagcacgaggtgtcagagatcatcgatggcctctcagagcaggagaacctggagaagcagatgcgccagctggccgtgatcccgcccatgctgtacgacgctgaccagcagcgcatcaagttcatcaacatgaacgggcttatggccgaccccatgaaggtgtacaaagaccgccaggtcatgaacatgtggagtgagcaggagaaggagaccttccgggagaagttcatgcagcatcccaagaactttggcctgatcgcatcattcctggagaggaagacagtggctgagtgcgtcctctattactacctgactaagaagaatgagaactataagagcctggtgagacggagctatcggcgccgcggcaagagccagaacgtgcgcatcgaccccagtagcctgtccttcaacatgtggaaggagatccctatccccttctatctctccgtctacttctttgacgtcatgaaccccagcgagatcctgaagggcgagaagccgcaggtgcgggagcgcgggccctacgtgtacagggagttcaggcacaaaagcaacatcaccttcaacaacaacgacaccgtgtccttcctcgagtaccgcaccttccagttccagccctccaagtcccacggctcggagagcgactacatcgtcatgcccaacatcctggtcttgggtgcggcggtgatgatggagaataagcccatgaccctgaagctcatcatgaccttggcattcaccaccctcggcgaacgtgccttcatgaaccgcactgtgggtgagatcatgtggggctacaaggacccccttgtgaatctcatcaacaagtactttccaggcatgttccccttcaaggacaagttcggattatttgctgagctcaacaactccgactctgggctcttcacggtgttcacgggggtccagaacatcagcaggatccacctcgtggacaagtggaacgggctgagcaaggttgacttctggcattccgatcagtgcaacatgatcaatggaacttctgggcaaatgtggccgcccttcatgactcctgagtcctcgctggagttctacagcccggaggcctgccgatccatgaagctaatgtacaaggagtcaggggtgtttgaaggcatccccacctatcgcttcgtggctcccaaaaccctgtttgccaacgggtccatctacccacccaacgaaggcttctgcccgtgcctggagtctggaattcagaacgtcagcacctgcaggttcagtgcccccttgtttctctcccatcctcacttcctcaacgctgacccggttctggcagaagcggtgactggcctgcaccctaaccaggaggcacactccttgttcctggacatccacccggtcacgggaatccccatgaactgctctgtgaaactgcagctgagcctctacatgaaatctgtcgcaggcattggacaaactgggaagattgagcctgtggtcctgccgctgctctggtttgcagagagcggggccatggagggggagactcttcacacattctacactcagctggtgttgatgcccaaggtgatgcactatgcccagtacgtcctcctggcgctgggctgcgtcctgctgctggtccctgtcatctgccaaatccggagccaaggtcctgaggacaccgtgagccagccaggcctggccgctgggcctgaccggccccccagcccctacaccccgcttctcccggactctcccagcggacagccccccagccccacagcctgagcctcccagctgccatgtgcctgttgcacacctgcacacacgccctggcacacatacacacatgcgtgcaggcttgtgcagacactcagggatggagctgctgctgaagggacttgtagggagaggctcgtcaacaagcactgttctggaaccttctctccacgtggcccacaggcctgaccacaggggctgtgggtcctgcgtccccttcctcgggtgagcctggcctgtcccgttcagccgttgggcccaggcttcctcccctccaaggtgaaacactgcagtcccggtgtggtggctccccatgcaggacgggccaggctgggagtgccgccttcctgtgccaaattcagtggggactcagtgcccaggccctggccacgagctttggccttggtctacctgccaggccaggcaaagcgcctttacacaggcctcggaaaacaatggagtgagcacaagatgccctgtgcagctgcccgagggtctccgcccaccccggccggactttgatccccccgaagtcttcacaggcactgcatcgggttgtctggcgcccttttcctccagcctaaactgacatcatcctatggactgagccggccactctctggccgaagtggccgcaggctgtgcccccgagctgcccccaccccctcacagggtccctcagattataggtgcccaggctgaggtgaagaggcctgggggccctgccttccgggcgctcctggaccctggggcaaacctgtgacccttttctactggaatagaaatgagttttatcatctttgaaaaataattcactcttgaagtaataaacgtttaaaaaaatggga

SEQ ID NO: 1233 - DNA, 3446 bp, Homo sapiens
gccggcgccctaggaggcggcggcgggaggatcgcgtcccgacccgaggccgggcctgctgcgcgcccccagcccgatcggcaccgccacttgcctgagcgccccggcggcccgagcgcgccccaagcccgggcgccaccgctgccacctccgcgaggtctccctgagtctttgaggacacagcctcgctggaggcagtttctggtgccagtgacggggtggcccgtgagctgatgacgaggactggcttttaatccttggtggtgattaagagaaagcttattggggcctgggagcagctccccgccgacccccaccaccatgtcgggatccacacagcctgtggcacagacgtggagggccactgagccccgctacccgccccacagcctttcctacccagtgcagatcgcccggacgcacacggacgtcgggctcctggagtaccagcaccactcccgcgactatgcctcccacctgtcgcccggctccatcatccagccccagcggcggaggccctccctgctgtctgagttccagcccgggaatgaacggtcccaggagctccacctgcggccagagtcccactcatacctgcccgagctggggaagtcagagatggagttcattgaaagcaagcgccctcggctagagctgctgcctgaccccctgctgcgaccgtcacccctgctggccacgggccagcctgcgggatctgaagacctcaccaaggaccgtagcctgacgggcaagctggaaccggtgtctccccccagccccccgcacactgaccctgagctggagctggtgccgccacggctgtccaaggaggagctgatccagaacatggaccgcgtggaccgagagatcaccatggtagagcagcagatctctaagctgaagaagaagcagcaacagctggaggaggaggctgccaagccgcccgagcctgagaagcccgtgtcaccgccgcccatcgagtcgaagcaccgcagcctggtgcagatcatctacgacgagaaccggaagaaggctgaagctgcacatcggattctggaaggcctggggccccaggtggagctgaacgtgcgcatcgaccccagtagcctgtccttcaacatgtggaaggagatccctatccccttctatctctccgtctacttctttgacgtcatgaaccccagcgagatcctgaagggcgagaagccgcaggtgcgggagcgcgggccctacgtgtacagggagttcaggcacaaaagcaacatcaccttcaacaacaacgacaccgtgtccttcctcgagtaccgcaccttccagttccagccctccaagtcccacggctcggagagcgactacatcgtcatgcccaacatcctggtcttgggtgcggcggtgatgatggagaataagcccatgaccctgaagctcatcatgaccttggcattcaccaccctcggcgaacgtgccttcatgaaccgcactgtgggtgagatcatgtggggctacaaggacccccttgtgaatctcatcaacaagtactttccaggcatgttccccttcaaggacaagttcggattatttgctgagctcaacaactccgactctgggctcttcacggtgttcacgggggtccagaacatcagcaggatccacctcgtggacaagtggaacgggctgagcaaggttgacttctggcattccgatcagtgcaacatgatcaatggaacttctgggcaaatgtggccgcccttcatgactcctgagtcctcgctggagttctacagcccggaggcctgccgatccatgaagctaatgtacaaggagtcaggggtgtttgaaggcatccccacctatcgcttcgtggctcccaaaaccctgtttgccaacgggtccatctacccacccaacgaaggcttctgcccgtgcctggagtctggaattcagaacgtcagcacctgcaggttcagtgcccccttgtttctctcccatcctcacttcctcaacgctgacccggttctggcagaagcggtgactggcctgcaccctaaccaggaggcacactccttgttcctggacatccacccggtcacgggaatccccatgaactgctctgtgaaactgcagctgagcctctacatgaaatctgtcgcaggcattggacaaactgggaagattgagcctgtggtcctgccgctgctctggtttgcagagagcggggccatggagggggagactcttcacacattctacactcagctggtgttgatgcccaaggtgatgcactatgcccagtacgtcctcctggcgctgggctgcgtcctgctgctggtccctgtcatctgccaaatccggagccaagagaaatgctatttattttggagtagtagtaaaaagggctcaaaggataaggaggccattcaggcctattctgaatccctgatgacatcagctcccaagggctctgtgctgcaggaagcaaaactgtagggtcctgaggacaccgtgagccagccaggcctggccgctgggcctgaccggccccccagcccctacaccccgcttctcccggactctcccagcggacagccccccagccccacagcctgagcctcccagctgccatgtgcctgttgcacacctgcacacacgccctggcacacatacacacatgcgtgcaggcttgtgcagacactcagggatggagctgctgctgaagggacttgtagggagaggctcgtcaacaagcactgttctggaaccttctctccacgtggcccacaggcctgaccacaggggctgtgggtcctgcgtccccttcctcgggtgagcctggcctgtcccgttcagccgttgggcccaggcttcctcccctccaaggtgaaacactgcagtcccggtgtggtggctccccatgcaggacgggccaggctgggagtgccgccttcctgtgccaaattcagtggggactcagtgcccaggccctggccacgagctttggccttggtctacctgccaggccaggcaaagcgcctttacacaggcctcggaaaacaatggagtgagcacaagatgccctgtgcagctgcccgagggtctccgcccaccccggccggactttgatccccccgaagtcttcacaggcactgcatcgggttgtctggcgcccttttcctccagcctaaactgacatcatcctatggactgagccggccactctctggccgaagtggccgcaggctgtgcccccgagctgcccccaccccctcacagggtccctcagattataggtgcccaggctgaggtgaagaggcctgggggccctgccttccgggcgctcctggaccctggggcaaacctgtgacccttttctactggaatagaaatgagttttatcatctttgaaaaataattcactcttgaagtaataaacgtttaaaaaaatggga

SEQ ID NO: 1234 - DNA, 2952 bp, Homo sapiens
gtgccagtgacggggtggcccgtgagctgatgacgaggactggcttttaatccttggtggtgattaagagaaagcttattggggcctgggagcagctccccgccgacccccaccaccatgtcgggatccacacagcctgtggcacagacgtggagggccactgagccccgctacccgccccacagcctttcctacccagtgcagatcgcccggacgcacacggacgtcgggctcctggagtaccagcaccactcccgcgactatgcctcccacctgtcgcccggctccatcatccagccccagcggcggaggccctccctgctgtctgagttccagcccgggaatgaacggtcccaggagctccacctgcggccagagtcccactcatacctgcccgagctggggaagtcagagatggagttcattgaaagcaagcgccctcggctagagctgctgcctgaccccctgctgcgaccgtcacccctgctggccacgggccagcctgcgggatctgaagacctcaccaaggaccgtagcctgacgggcaagctggaaccggtgtctccccccagccccccgcacactgaccctgagctggagctggtgccgccacggctgtccaaggaggagctgatccagaacatggaccgcgtggaccgagagatcaccatggtagagcagcagatctctaagctgaagaagaagcagcaacagctggaggaggaggctgccaagccgcccgagcctgagaagcccgtgtcaccgccgcccatcgagtcgaagcaccgcagcctggtgcagatcatctacgacgagaaccggaagaaggctgaagctgcacatcggattctggaaggcctggggccccaggtggagctgccgctgtacaaccagccctccgacacccggcagtatcatgagaacatcaaaataaaccaggcgatgcggaagaagctaatcttgtacttcaagaggaggaatcacgctcggaaacaatgggagcagaagttctgccagcgctatgaccagctcatggaggcctgggagaagaaggtggagcgcatcgagaacaacccccggcggcgggccaaggagagcaaggtgcgcgagtactacgagaagcagttccctgagatccgcaagcagcgcgagctgcaggagcgcatgcagagcagggtgggccagcggggcagtgggctgtccatgtcggccgcccgcagcgagcacgaggtgtcagagatcatcgatggcctctcagagcaggagaacctggagaagcagatgcgccagctggccgtgatcccgcccatgctgtacgacgctgaccagcagcgcatcaagttcatcaacatgaacgggcttatggccgaccccatgaaggtgtacaaagaccgccaggtcatgaacatgtggagtgagcaggagaaggagaccttccgggagaagttcatgcagcatcccaagaactttggcctgatcgcatcattcctggagaggaagacagtggctgagtgcgtcctctattactacctgactaagaagaatgagaactataagagcctggtgagacggagctatcggcgccgcggcaagagccagcagcagcaacaacagcagcagcagcagcagcagcagcagcagcagcagcccatgccccgcagcagccaggaggagaaagatgagaaggagaaggaaaaggaggcggagaaggaggaggagaagccggaggtggagaacgacaaggaagacctcctcaaggagaagacagacgacacctcaggggaggacaacgacgagaaggaggctgtggcctccaaaggccgcaaaactgccaacagccagggaagacgcaaaggccgcatcacccgctcaatggctaatgaggccaacagcgaggaggccatcaccccccagcagagcgccgagctggcctccatggagctgaatgagagttctcgctggacagaagaagaaatggaaacagccaagaaagggtcctgaggacaccgtgagccagccaggcctggccgctgggcctgaccggccccccagcccctacaccccgcttctcccggactctcccagcggacagccccccagccccacagcctgagcctcccagctgccatgtgcctgttgcacacctgcacacacgccctggcacacatacacacatgcgtgcaggcttgtgcagacactcagggatggagctgctgctgaagggacttgtagggagaggctcgtcaacaagcactgttctggaaccttctctccacgtggcccacaggcctgaccacaggggctgtgggtcctgcgtccccttcctcgggtgagcctggcctgtcccgttcagccgttgggcccaggcttcctcccctccaaggtgaaacactgcagtcccggtgtggtggctccccatgcaggacgggccaggctgggagtgccgccttcctgtgccaaattcagtggggactcagtgcccaggccctggccacgagctttggccttggtctacctgccaggccaggcaaagcgcctttacacaggcctcggaaaacaatggagtgagcacaagatgccctgtgcagctgcccgagggtctccgcccaccccggccggactttgatccccccgaagtcttcacaggcactgcatcgggttgtctggcgcccttttcctccagcctaaactgacatcatcctatggactgagccggccactctctggccgaagtggccgcaggctgtgcccccgagctgcccccaccccctcacagggtccctcagattataggtgcccaggctgaggtgaagaggcctgggggccctgccttccgggcgctcctggaccctggggcaaacctgtgacccttttctactggaatagaaatgagttttatcatctttgaaaaataattcactcttgaagtaataaacgtttaaaaaaatggga

SEQ ID NO: 1235 - DNA, 4037 bp, Homo sapiens
gccggcgccctaggaggcggcggcgggaggatcgcgtcccgacccgaggccgggcctgctgcgcgcccccagcccgatcggcaccgccacttgcctgagcgccccggcggcccgagcgcgccccaagcccgggcgccaccgctgccacctccgcgaggtctccctgagtctttgaggacacagcctcgctggaggcagtttctggtgccagtgacggggtggcccgtgagctgatgacgaggactggcttttaatccttggtggtgattaagagaaagcttattggggcctgggagcagctccccgccgacccccaccaccatgtcgggatccacacagcctgtggcacagacgtggagggccactgagccccgctacccgccccacagcctttcctacccagtgcagatcgcccggacgcacacggacgtcgggctcctggagtaccagcaccactcccgcgactatgcctcccacctgtcgcccggctccatcatccagccccagcggcggaggccctccctgctgtctgagttccagcccgggaatgaacggtcccaggagctccacctgcggccagagtcccactcatacctgcccgagctggggaagtcagagatggagttcattgaaagcaagcgccctcggctagagctgctgcctgaccccctgctgcgaccgtcacccctgctggccacgggccagcctgcgggatctgaagacctcaccaaggaccgtagcctgacgggcaagctggaaccggtgtctccccccagccccccgcacactgaccctgagctggagctggtgccgccacggctgtccaaggaggagctgatccagaacatggaccgcgtggaccgagagatcaccatggtagagcagcagatctctaagctgaagaagaagcagcaacagctggaggaggaggctgccaagccgcccgagcctgagaagcccgtgtcaccgccgcccatcgagtcgaagcaccgcagcctggtgcagatcatctacgacgagaaccggaagaaggctgaagctgcacatcggattctggaaggcctggggccccaggtggagctgccgctgtacaaccagccctccgacacccggcagtatcatgagaacatcaaaataaaccaggcgatgcggaagaagctaatcttgtacttcaagaggaggaatcacgctcggaaacaatgggagcagaagttctgccagcgctatgaccagctcatggaggcctgggagaagaaggtggagcgcatcgagaacaacccccggcggcgggccaaggagagcaaggtgcgcgagtactacgagaagcagttccctgagatccgcaagcagcgcgagctgcaggagcgcatgcagagcagggtgggccagcggggcagtgggctgtccatgtcggccgcccgcagcgagcacgaggtgtcagagatcatcgatggcctctcagagcaggagaacctggagaagcagatgcgccagctggccgtgatcccgcccatgctgtacgacgctgaccagcagcgcatcaagttcatcaacatgaacgggcttatggccgaccccatgaaggtgtacaaagaccgccaggtcatgaacatgtggagtgagcaggagaaggagaccttccgggagaagttcatgcagcatcccaagaactttggcctgatcgcatcattcctggagaggaagacagtggctgagtgcgtcctctattactacctgactaagaagaatgagaactataagagcctggtgagacggagctatcggcgccgcggcaagagccagaacgtgcgcatcgaccccagtagcctgtccttcaacatgtggaaggagatccctatccccttctatctctccgtctacttctttgacgtcatgaaccccagcgagatcctgaagggcgagaagccgcaggtgcgggagcgcgggccctacgtgtacagggagttcaggcacaaaagcaacatcaccttcaacaacaacgacaccgtgtccttcctcgagtaccgcaccttccagttccagccctccaagtcccacggctcggagagcgactacatcgtcatgcccaacatcctggtcttgggtgcggcggtgatgatggagaataagcccatgaccctgaagctcatcatgaccttggcattcaccaccctcggcgaacgtgccttcatgaaccgcactgtgggtgagatcatgtggggctacaaggacccccttgtgaatctcatcaacaagtactttccaggcatgttccccttcaaggacaagttcggattatttgctgagctcaacaactccgactctgggctcttcacggtgttcacgggggtccagaacatcagcaggatccacctcgtggacaagtggaacgggctgagcaaggttgacttctggcattccgatcagtgcaacatgatcaatggaacttctgggcaaatgtggccgcccttcatgactcctgagtcctcgctggagttctacagcccggaggcctgccgatccatgaagctaatgtacaaggagtcaggggtgtttgaaggcatccccacctatcgcttcgtggctcccaaaaccctgtttgccaacgggtccatctacccacccaacgaaggcttctgcccgtgcctggagtctggaattcagaacgtcagcacctgcaggttcagtgcccccttgtttctctcccatcctcacttcctcaacgctgacccggttctggcagaagcggtgactggcctgcaccctaaccaggaggcacactccttgttcctggacatccacccggtcacgggaatccccatgaactgctctgtgaaactgcagctgagcctctacatgaaatctgtcgcaggcattggacaaactgggaagattgagcctgtggtcctgccgctgctctggtttgcagagagcggggccatggagggggagactcttcacacattctacactcagctggtgttgatgcccaaggtgatgcactatgcccagtacgtcctcctggcgctgggctgcgtcctgctgctggtccctgtcatctgccaaatccggagccaaggtcctgaggacaccgtgagccagccaggcctggccgctgggcctgaccggccccccagcccctacaccccgcttctcccggactctcccagcggacagccccccagccccacagcctgagcctcccagctgccatgtgcctgttgcacacctgcacacacgccctggcacacatacacacatgcgtgcaggcttgtgcagacactcagggatggagctgctgctgaagggacttgtagggagaggctcgtcaacaagcactgttctggaaccttctctccacgtggcccacaggcctgaccacaggggctgtgggtcctgcgtccccttcctcgggtgagcctggcctgtcccgttcagccgttgggcccaggcttcctcccctccaaggtgaaacactgcagtcccggtgtggtggctccccatgcaggacgggccaggctgggagtgccgccttcctgtgccaaattcagtggggactcagtgcccaggccctggccacgagctttggccttggtctacctgccaggccaggcaaagcgcctttacacaggcctcggaaaacaatggagtgagcacaagatgccctgtgcagctgcccgagggtctccgcccaccccggccggactttgatccccccgaagtcttcacaggcactgcatcgggttgtctggcgcccttttcctccagcctaaactgacatcatcctatggactgagccggccactctctggccgaagtggccgcaggctgtgcccccgagctgcccccaccccctcacagggtccctcagattataggtgcccaggctgaggtgaagaggcctgggggccctgccttccgggcgctcctggaccctggggcaaacctgtgacccttttctactggaatagaaatgagttttatcatctttgaaaaataattcactcttgaagtaataaacgtttaaaaaaatggga

SEQ ID NO: 1236 - DNA, 3962 bp, Homo sapiens
gtgccagtgacggggtggcccgtgagctgatgacgaggactggcttttaatccttggtggtgattaagagaaagcttattggggcctgggagcagctccccgccgacccccaccaccatgtcgggatccacacagcctgtggcacagacgtggagggccactgagccccgctacccgccccacagcctttcctacccagtgcagatcgcccggacgcacacggacgtcgggctcctggagtaccagcaccactcccgcgactatgcctcccacctgtcgcccggctccatcatccagccccagcggcggaggccctccctgctgtctgagttccagcccgggaatgaacggtcccaggagctccacctgcggccagagtcccactcatacctgcccgagctggggaagtcagagatggagttcattgaaagcaagcgccctcggctagagctgctgcctgaccccctgctgcgaccgtcacccctgctggccacgggccagcctgcgggatctgaagacctcaccaaggaccgtagcctgacgggcaagctggaaccggtgtctccccccagccccccgcacactgaccctgagctggagctggtgccgccacggctgtccaaggaggagctgatccagaacatggaccgcgtggaccgagagatcaccatggtagagcagcagatctctaagctgaagaagaagcagcaacagctggaggaggaggctgccaagccgcccgagcctgagaagcccgtgtcaccgccgcccatcgagtcgaagcaccgcagcctggtgcagatcatctacgacgagaaccggaagaaggctgaagctgcacatcggattctggaaggcctggggccccaggtggagctgccgctgtacaaccagccctccgacacccggcagtatcatgagaacatcaaaataaaccaggcgatgcggaagaagctaatcttgtacttcaagaggaggaatcacgctcggaaacaatgggagcagaagttctgccagcgctatgaccagctcatggaggcctgggagaagaaggtggagcgcatcgagaacaacccccggcggcgggccaaggagagcaaggtgcgcgagtactacgagaagcagttccctgagatccgcaagcagcgcgagctgcaggagcgcatgcagagcagggtgggccagcggggcagtgggctgtccatgtcggccgcccgcagcgagcacgaggtgtcagagatcatcgatggcctctcagagcaggagaacctggagaagcagatgcgccagctggccgtgatcccgcccatgctgtacgacgctgaccagcagcgcatcaagttcatcaacatgaacgggcttatggccgaccccatgaaggtgtacaaagaccgccaggtcatgaacatgtggagtgagcaggagaaggagaccttccgggagaagttcatgcagcatcccaagaactttggcctgatcgcatcattcctggagaggaagacagtggctgagtgcgtcctctattactacctgactaagaagaatgagaactataagagcctggtgagacggagctatcggcgccgcggcaagagccagaacgtgcgcatcgaccccagtagcctgtccttcaacatgtggaaggagatccctatccccttctatctctccgtctacttctttgacgtcatgaaccccagcgagatcctgaagggcgagaagccgcaggtgcgggagcgcgggccctacgtgtacagggagttcaggcacaaaagcaacatcaccttcaacaacaacgacaccgtgtccttcctcgagtaccgcaccttccagttccagccctccaagtcccacggctcggagagcgactacatcgtcatgcccaacatcctggtcttgggtgcggcggtgatgatggagaataagcccatgaccctgaagctcatcatgaccttggcattcaccaccctcggcgaacgtgccttcatgaaccgcactgtgggtgagatcatgtggggctacaaggacccccttgtgaatctcatcaacaagtactttccaggcatgttccccttcaaggacaagttcggattatttgctgagctcaacaactccgactctgggctcttcacggtgttcacgggggtccagaacatcagcaggatccacctcgtggacaagtggaacgggctgagcaaggttgacttctggcattccgatcagtgcaacatgatcaatggaacttctgggcaaatgtggccgcccttcatgactcctgagtcctcgctggagttctacagcccggaggcctgccgatccatgaagctaatgtacaaggagtcaggggtgtttgaaggcatccccacctatcgcttcgtggctcccaaaaccctgtttgccaacgggtccatctacccacccaacgaaggcttctgcccgtgcctggagtctggaattcagaacgtcagcacctgcaggttcagtgcccccttgtttctctcccatcctcacttcctcaacgctgacccggttctggcagaagcggtgactggcctgcaccctaaccaggaggcacactccttgttcctggacatccacccggtcacgggaatccccatgaactgctctgtgaaactgcagctgagcctctacatgaaatctgtcgcaggcattggacaaactgggaagattgagcctgtggtcctgccgctgctctggtttgcagagagcggggccatggagggggagactcttcacacattctacactcagctggtgttgatgcccaaggtgatgcactatgcccagtacgtcctcctggcgctgggctgcgtcctgctgctggtccctgtcatctgccaaatccggagccaagagaaatgctatttattttggagtagtagtaaaaagggctcaaaggataaggaggccattcaggcctattctgaatccctgatgacatcagctcccaagggctctgtgctgcaggaagcaaaactgtagggtcctgaggacaccgtgagccagccaggcctggccgctgggcctgaccggccccccagcccctacaccccgcttctcccggactctcccagcggacagccccccagccccacagcctgagcctcccagctgccatgtgcctgttgcacacctgcacacacgccctggcacacatacacacatgcgtgcaggcttgtgcagacactcagggatggagctgctgctgaagggacttgtagggagaggctcgtcaacaagcactgttctggaaccttctctccacgtggcccacaggcctgaccacaggggctgtgggtcctgcgtccccttcctcgggtgagcctggcctgtcccgttcagccgttgggcccaggcttcctcccctccaaggtgaaacactgcagtcccggtgtggtggctccccatgcaggacgggccaggctgggagtgccgccttcctgtgccaaattcagtggggactcagtgcccaggccctggccacgagctttggccttggtctacctgccaggccaggcaaagcgcctttacacaggcctcggaaaacaatggagtgagcacaagatgccctgtgcagctgcccgagggtctccgcccaccccggccggactttgatccccccgaagtcttcacaggcactgcatcgggttgtctggcgcccttttcctccagcctaaactgacatcatcctatggactgagccggccactctctggccgaagtggccgcaggctgtgcccccgagctgcccccaccccctcacagggtccctcagattataggtgcccaggctgaggtgaagaggcctgggggccctgccttccgggcgctcctggaccctggggcaaacctgtgacccttttctactggaatagaaatgagttttatcatctttgaaaaataattcactcttgaagtaataaacgtttaaaaaaatggga

SEQ ID NO: 1237 - DNA, 1691 bp, Homo sapiens
gccggcgccctaggaggcggcggcgggaggatcgcgtcccgacccgaggccgggcctgctgcgcgcccccagcccgatcggcaccgccacttgcctgagcgccccggcggcccgagcgcgccccaagcccgggcgccaccgctgccacctccgcgaggtctccctgagtctttgaggacacagcctcgctggaggcagtttctggtgccagtgacggggtggcccgtgagctgatgacgaggactggcttttaatccttggtggtgattaagagaaagcttattggggcctgggagcagctccccgccgacccccaccaccatgtcgggatccacacagcctgtggcacagacgtggagggccactgagccccgctacccgccccacagcctttcctacccagtgcagatcgcccggacgcacacggacgtcgggctcctggagtaccagcaccactcccgcgactatgcctcccacctgtcgcccggctccatcatccagccccagcggcggaggccctccctgctgtctgagttccagcccgggaatgaacggtcccaggagctccacctgcggccagagtcccactcatacctgcccgagctggggaagtcagagatggagttcattgaaagcaagcgccctcggctagagctgctgcctgaccccctgctgcgaccgtcacccctgctggccacgggccagcctgcgggatctgaagacctcaccaagggtcctgaggacaccgtgagccagccaggcctggccgctgggcctgaccggccccccagcccctacaccccgcttctcccggactctcccagcggacagccccccagccccacagcctgagcctcccagctgccatgtgcctgttgcacacctgcacacacgccctggcacacatacacacatgcgtgcaggcttgtgcagacactcagggatggagctgctgctgaagggacttgtagggagaggctcgtcaacaagcactgttctggaaccttctctccacgtggcccacaggcctgaccacaggggctgtgggtcctgcgtccccttcctcgggtgagcctggcctgtcccgttcagccgttgggcccaggcttcctcccctccaaggtgaaacactgcagtcccggtgtggtggctccccatgcaggacgggccaggctgggagtgccgccttcctgtgccaaattcagtggggactcagtgcccaggccctggccacgagctttggccttggtctacctgccaggccaggcaaagcgcctttacacaggcctcggaaaacaatggagtgagcacaagatgccctgtgcagctgcccgagggtctccgcccaccccggccggactttgatccccccgaagtcttcacaggcactgcatcgggttgtctggcgcccttttcctccagcctaaactgacatcatcctatggactgagccggccactctctggccgaagtggccgcaggctgtgcccccgagctgcccccaccccctcacagggtccctcagattataggtgcccaggctgaggtgaagaggcctgggggccctgccttccgggcgctcctggaccctggggcaaacctgtgacccttttctactggaatagaaatgagttttatcatctttgaaaaataattcactcttgaagtaataaacgtttaaaaaaatggga

SEQ ID NO: 1238 - DNA, 3153 bp, Homo sapiens
gccggcgccctaggaggcggcggcgggaggatcgcgtcccgacccgaggccgggcctgctgcgcgcccccagcccgatcggcaccgccacttgcctgagcgccccggcggcccgagcgcgccccaagcccgggcgccaccgctgccacctccgcgaggtctccctgagtctttgaggacacagcctcgctggaggcagtttctggtgccagtgacggggtggcccgtgagctgatgacgaggactggcttttaatccttggtggtgattaagagaaagcttattggggcctgggagcagctccccgccgacccccaccaccatgtcgggatccacacagcctgtggcacagacgtggagggccactgagccccgctacccgccccacagcctttcctacccagtgcagatcgcccggacgcacacggacgtcgggctcctggagtaccagcaccactcccgcgactatgcctcccacctgtcgcccggctccatcatccagccccagcggcggaggccctccctgctgtctgagttccagcccgggaatgaacggtcccaggagctccacctgcggccagagtcccactcatacctgcccgagctggggaagtcagagatggagttcattgaaagcaagcgccctcggctagagctgctgcctgaccccctgctgcgaccgtcacccctgctggccacgggccagcctgcgggatctgaagacctcaccaaggaccgtagcctgacgggcaagctggaaccggtgtctccccccagccccccgcacactgaccctgagctggagctggtgccgccacggctgtccaaggaggagctgatccagaacatggaccgcgtggaccgagagatcaccatggtagagcagcagatctctaagctgaagaagaagcagcaacagctggaggaggaggctgccaagccgcccgagcctgagaagcccgtgtcaccgccgcccatcgagtcgaagcaccgcagcctggtgcagatcatctacgacgagaaccggaagaaggctgaagctgcacatcggattctggaaggcctggggccccaggtggagctgccgctgtacaaccagccctccgacacccggcagtatcatgagaacatcaaaataaaccaggcgatgcggaagaagctaatcttgtacttcaagaggaggaatcacgctcggaaacaatgggagcagaagttctgccagcgctatgaccagctcatggaggcctgggagaagaaggtggagcgcatcgagaacaacccccggcggcgggccaaggagagcaaggtgcgcgagtactacgagaagcagttccctgagatccgcaagcagcgcgagctgcaggagcgcatgcagagggtgggccagcggggcagtgggctgtccatgtcggccgcccgcagcgagcacgaggtgtcagagatcatcgatggcctctcagagcaggagaacctggagaagcagatgcgccagctggccgtgatcccgcccatgctgtacgacgctgaccagcagcgcatcaagttcatcaacatgaacgggcttatggccgaccccatgaaggtgtacaaagaccgccaggtcatgaacatgtggagtgagcaggagaaggagaccttccgggagaagttcatgcagcatcccaagaactttggcctgatcgcatcattcctggagaggaagacagtggctgagtgcgtcctctattactacctgactaagaagaatgagaactataagagcctggtgagacggagctatcggcgccgcggcaagagccagcagcagcaacaacagcagcagcagcagcagcagcagcagcagcagcagcccatgccccgcagcagccaggaggagaaagatgagaaggagaaggaaaaggaggcggagaaggaggaggagaagccggaggtggagaacgacaaggaagacctcctcaaggagaagacagacgacacctcaggggaggacaacgacgagaaggaggctgtggcctccaaaggccgcaaaactgccaacagccagggaagacgcaaaggccgcatcacccgctcaatggctaatgaggccaacagcgaggaggccatcaccccccagcagagcgccgagctggcctccatggagctgaatgagagttctcgctggacagaagaagaaatggaaacagccaagaaagggtcctgaggacaccgtgagccagccaggcctggccgctgggcctgaccggccccccagcccctacaccccgcttctcccggactctcccagcggacagccccccagccccacagcctgagcctcccagctgccatgtgcctgttgcacacctgcacacacgccctggcacacatacacacatgcgtgcaggcttgtgcagacactcagggatggagctgctgctgaagggacttgtagggagaggctcgtcaacaagcactgttctggaaccttctctccacgtggcccacaggcctgaccacaggggctgtgggtcctgcgtccccttcctcgggtgagcctggcctgtcccgttcagccgttgggcccaggcttcctcccctccaaggtgaaacactgcagtcccggtgtggtggctccccatgcaggacgggccaggctgggagtgccgccttcctgtgccaaattcagtggggactcagtgcccaggccctggccacgagctttggccttggtctacctgccaggccaggcaaagcgcctttacacaggcctcggaaaacaatggagtgagcacaagatgccctgtgcagctgcccgagggtctccgcccaccccggccggactttgatccccccgaagtcttcacaggcactgcatcgggttgtctggcgcccttttcctccagcctaaactgacatcatcctatggactgagccggccactctctggccgaagtggccgcaggctgtgcccccgagctgcccccaccccctcacagggtccctcagattataggtgcccaggctgaggtgaagaggcctgggggccctgccttccgggcgctcctggaccctggggcaaacctgtgacccttttctactggaatagaaatgagttttatcatctttgaaaaataattcactcttgaagtaataaacgtttaaaaaaatggga

SEQ ID NO: 1239 - DNA, 3878 bp, Homo sapiens
gtgccagtgacggggtggcccgtgagctgatgacgaggactggcttttaatccttggtggtgattaagagaaagcttattggggcctgggagcagctccccgccgacccccaccaccatgtcgggatccacacagcctgtggcacagacgtggagggccactgagccccgctacccgccccacagcctttcctacccagtgcagatcgcccggacgcacacggacgtcgggctcctggagtaccagcaccactcccgcgactatgcctcccacctgtcgcccggctccatcatccagccccagcggcggaggccctccctgctgtctgagttccagcccgggaatgaacggtcccaggagctccacctgcggccagagtcccactcatacctgcccgagctggggaagtcagagatggagttcattgaaagcaagcgccctcggctagagctgctgcctgaccccctgctgcgaccgtcacccctgctggccacgggccagcctgcgggatctgaagacctcaccaaggaccgtagcctgacgggcaagctggaaccggtgtctccccccagccccccgcacactgaccctgagctggagctggtgccgccacggctgtccaaggaggagctgatccagaacatggaccgcgtggaccgagagatcaccatggtagagcagcagatctctaagctgaagaagaagcagcaacagctggaggaggaggctgccaagccgcccgagcctgagaagcccgtgtcaccgccgcccatcgagtcgaagcaccgcagcctggtgcagatcatctacgacgagaaccggaagaaggctgaagctgcacatcggattctggaaggcctggggccccaggtggagctgccgctgtacaaccagccctccgacacccggcagtatcatgagaacatcaaaataaaccaggcgatgcggaagaagctaatcttgtacttcaagaggaggaatcacgctcggaaacaatgggagcagaagttctgccagcgctatgaccagctcatggaggcctgggagaagaaggtggagcgcatcgagaacaacccccggcggcgggccaaggagagcaaggtgcgcgagtactacgagaagcagttccctgagatccgcaagcagcgcgagctgcaggagcgcatgcagagcagggtgggccagcggggcagtgggctgtccatgtcggccgcccgcagcgagcacgaggtgtcagagatcatcgatggcctctcagagcaggagaacctggagaagcagatgcgccagctggccgtgatcccgcccatgctgtacgacgctgaccagcagcgcatcaagttcatcaacatgaacgggcttatggccgaccccatgaaggtgtacaaagaccgccaggtcatgaacatgtggagtgagcaggagaaggagaccttccgggagaagttcatgcagcatcccaagaactttggcctgatcgcatcattcctggagaggaagacagtggctgagtgcgtcctctattactacctgactaagaagaatgagaactataagagcctggtgagacggagctatcggcgccgcggcaagagccagaacgtgcgcatcgaccccagtagcctgtccttcaacatgtggaaggagatccctatccccttctatctctccgtctacttctttgacgtcatgaaccccagcgagatcctgaagggcgagaagccgcaggtgcgggagcgcgggccctacgtgtacagggagttcaggcacaaaagcaacatcaccttcaacaacaacgacaccgtgtccttcctcgagtaccgcaccttccagttccagccctccaagtcccacggctcggagagcgactacatcgtcatgcccaacatcctggtcttgggtgcggcggtgatgatggagaataagcccatgaccctgaagctcatcatgaccttggcattcaccaccctcggcgaacgtgccttcatgaaccgcactgtgggtgagatcatgtggggctacaaggacccccttgtgaatctcatcaacaagtactttccaggcatgttccccttcaaggacaagttcggattatttgctgagctcaacaactccgactctgggctcttcacggtgttcacgggggtccagaacatcagcaggatccacctcgtggacaagtggaacgggctgagcaaggttgacttctggcattccgatcagtgcaacatgatcaatggaacttctgggcaaatgtggccgcccttcatgactcctgagtcctcgctggagttctacagcccggaggcctgccgatccatgaagctaatgtacaaggagtcaggggtgtttgaaggcatccccacctatcgcttcgtggctcccaaaaccctgtttgccaacgggtccatctacccacccaacgaaggcttctgcccgtgcctggagtctggaattcagaacgtcagcacctgcaggttcagtgcccccttgtttctctcccatcctcacttcctcaacgctgacccggttctggcagaagcggtgactggcctgcaccctaaccaggaggcacactccttgttcctggacatccacccggtcacgggaatccccatgaactgctctgtgaaactgcagctgagcctctacatgaaatctgtcgcaggcattggacaaactgggaagattgagcctgtggtcctgccgctgctctggtttgcagagagcggggccatggagggggagactcttcacacattctacactcagctggtgttgatgcccaaggagaaatgctatttattttggagtagtagtaaaaagggctcaaaggataaggaggccattcaggcctattctgaatccctgatgacatcagctcccaagggctctgtgctgcaggaagcaaaactgtagggtcctgaggacaccgtgagccagccaggcctggccgctgggcctgaccggccccccagcccctacaccccgcttctcccggactctcccagcggacagccccccagccccacagcctgagcctcccagctgccatgtgcctgttgcacacctgcacacacgccctggcacacatacacacatgcgtgcaggcttgtgcagacactcagggatggagctgctgctgaagggacttgtagggagaggctcgtcaacaagcactgttctggaaccttctctccacgtggcccacaggcctgaccacaggggctgtgggtcctgcgtccccttcctcgggtgagcctggcctgtcccgttcagccgttgggcccaggcttcctcccctccaaggtgaaacactgcagtcccggtgtggtggctccccatgcaggacgggccaggctgggagtgccgccttcctgtgccaaattcagtggggactcagtgcccaggccctggccacgagctttggccttggtctacctgccaggccaggcaaagcgcctttacacaggcctcggaaaacaatggagtgagcacaagatgccctgtgcagctgcccgagggtctccgcccaccccggccggactttgatccccccgaagtcttcacaggcactgcatcgggttgtctggcgcccttttcctccagcctaaactgacatcatcctatggactgagccggccactctctggccgaagtggccgcaggctgtgcccccgagctgcccccaccccctcacagggtccctcagattataggtgcccaggctgaggtgaagaggcctgggggccctgccttccgggcgctcctggaccctggggcaaacctgtgacccttttctactggaatagaaatgagttttatcatctttgaaaaataattcactcttgaagtaataaacgtttaaaaaaatggga

SEQ ID NO: 1240 - DNA, 3257 bp, Homo sapiens
gccggcgccctaggaggcggcggcgggaggatcgcgtcccgacccgaggccgggcctgctgcgcgcccccagcccgatcggcaccgccacttgcctgagcgccccggcggcccgagcgcgccccaagcccgggcgccaccgctgccacctccgcgaggtctccctgagtctttgaggacacagcctcgctggaggcagtttctggtgccagtgacggggtggcccgtgagctgatgacgaggactggcttttaatccttggtggtgattaagagaaagcttattggggcctgggagcagctccccgccgacccccaccaccatgtcgggatccacacagcctgtggcacagacgtggagggccactgagccccgctacccgccccacagcctttcctacccagtgcagatcgcccggacgcacacggacgtcgggctcctggagtaccagcaccactcccgcgactatgcctcccacctgtcgcccggctccatcatccagccccagcggcggaggccctccctgctgtctgagttccagcccgggaatgaacggtcccaggagctccacctgcggccagagtcccactcatacctgcccgagctggggaagtcagagatggagttcattgaaagcaagcgccctcggctagagctgctgcctgaccccctgctgcgaccgtcacccctgctggccacgggccagcctgcgggatctgaagacctcaccaaggaccgtagcctgacgggcaagctggaaccggtgtctccccccagccccccgcacactgaccctgagctggagctggtgccgccacggctgtccaaggaggagctgatccagaacatggaccgcgtggaccgagagatcaccatggtagagcagcagatctctaagctgaagaagaagcagcaacagctggaggaggaggctgccaagccgcccgagcctgagaagcccgtgtcaccgccgcccatcgagtcgaagcaccgcagcctggtgcagatcatctacgacgagaaccggaagaaggctgaagctgcacatcggattctggaaggcctggggccccaggtggagctgccgctgtacaaccagccctccgacacccggcagtatcatgagaacatcaaaatggagttcaggcacaaaagcaacatcaccttcaacaacaacgacaccgtgtccttcctcgagtaccgcaccttccagttccagccctccaagtcccacggctcggagagcgactacatcgtcatgcccaacatcctggtcttgggtgcggcggtgatgatggagaataagcccatgaccctgaagctcatcatgaccttggcattcaccaccctcggcgaacgtgccttcatgaaccgcactgtgggtgagatcatgtggggctacaaggacccccttgtgaatctcatcaacaagtactttccaggcatgttccccttcaaggacaagttcggattatttgctgagctcaacaactccgactctgggctcttcacggtgttcacgggggtccagaacatcagcaggatccacctcgtggacaagtggaacgggctgagcaaggttgacttctggcattccgatcagtgcaacatgatcaatggaacttctgggcaaatgtggccgcccttcatgactcctgagtcctcgctggagttctacagcccggaggcctgccgatccatgaagctaatgtacaaggagtcaggggtgtttgaaggcatccccacctatcgcttcgtggctcccaaaaccctgtttgccaacgggtccatctacccacccaacgaaggcttctgcccgtgcctggagtctggaattcagaacgtcagcacctgcaggttcagtgcccccttgtttctctcccatcctcacttcctcaacgctgacccggttctggcagaagcggtgactggcctgcaccctaaccaggaggcacactccttgttcctggacatccacccggtcacgggaatccccatgaactgctctgtgaaactgcagctgagcctctacatgaaatctgtcgcaggcattggacaaactgggaagattgagcctgtggtcctgccgctgctctggtttgcagagagcggggccatggagggggagactcttcacacattctacactcagctggtgttgatgcccaaggagaaatgctatttattttggagtagtagtaaaaagggctcaaaggataaggaggccattcaggcctattctgaatccctgatgacatcagctcccaagggctctgtgctgcaggaagcaaaactgtagggtcctgaggacaccgtgagccagccaggcctggccgctgggcctgaccggccccccagcccctacaccccgcttctcccggactctcccagcggacagccccccagccccacagcctgagcctcccagctgccatgtgcctgttgcacacctgcacacacgccctggcacacatacacacatgcgtgcaggcttgtgcagacactcagggatggagctgctgctgaagggacttgtagggagaggctcgtcaacaagcactgttctggaaccttctctccacgtggcccacaggcctgaccacaggggctgtgggtcctgcgtccccttcctcgggtgagcctggcctgtcccgttcagccgttgggcccaggcttcctcccctccaaggtgaaacactgcagtcccggtgtggtggctccccatgcaggacgggccaggctgggagtgccgccttcctgtgccaaattcagtggggactcagtgcccaggccctggccacgagctttggccttggtctacctgccaggccaggcaaagcgcctttacacaggcctcggaaaacaatggagtgagcacaagatgccctgtgcagctgcccgagggtctccgcccaccccggccggactttgatccccccgaagtcttcacaggcactgcatcgggttgtctggcgcccttttcctccagcctaaactgacatcatcctatggactgagccggccactctctggccgaagtggccgcaggctgtgcccccgagctgcccccaccccctcacagggtccctcagattataggtgcccaggctgaggtgaagaggcctgggggccctgccttccgggcgctcctggaccctggggcaaacctgtgacccttttctactggaatagaaatgagttttatcatctttgaaaaataattcactcttgaagtaataaacgtttaaaaaaatggga

SEQ ID NO: 1241 - skipped

SEQ ID NO: 1242 - DNA, 3305 bp, Homo sapiens
gccggcgccctaggaggcggcggcgggaggatcgcgtcccgacccgaggccgggcctgctgcgcgcccccagcccgatcggcaccgccacttgcctgagcgccccggcggcccgagcgcgccccaagcccgggcgccaccgctgccacctccgcgaggtctccctgagtctttgaggacacagcctcgctggaggcagtttctggtgccagtgacggggtggcccgtgagctgatgacgaggactggcttttaatccttggtggtgattaagagaaagcttattggggcctgggagcagctccccgccgacccccaccaccatgtcgggatccacacagcctgtggcacagacgtggagggccactgagccccgctacccgccccacagcctttcctacccagtgcagatcgcccggacgcacacggacgtcgggctcctggagtaccagcaccactcccgcgactatgcctcccacctgtcgcccggctccatcatccagccccagcggcggaggccctccctgctgtctgagttccagcccgggaatgaacggtcccaggagctccacctgcggccagagtcccactcatacctgcccgagctggggaagtcagagatggagttcattgaaagcaagcgccctcggctagagctgctgcctgaccccctgctgcgaccgtcacccctgctggccacgggccagcctgcgggatctgaagacctcaccaaggaccgtagcctgacgggcaagctggaaccggtgtctccccccagccccccgcacactgaccctgagctggagctggtgccgccacggctgtccaaggaggagctgatccagaacatggaccgcgtggaccgagagatcaccatggtagagcagcagatctctaagctgaagaagaagcagcaacagctggaggaggaggctgccaagccgcccgagcctgagaagcccgtgtcaccgccgcccatcgagtcgaagcaccgcagcctggtgcagatcatctacgacgagaaccggaacgtgcgcatcgaccccagtagcctgtccttcaacatgtggaaggagatccctatccccttctatctctccgtctacttctttgacgtcatgaaccccagcgagatcctgaagggcgagaagccgcaggtgcgggagcgcgggccctacgtgtacagggagttcaggcacaaaagcaacatcaccttcaacaacaacgacaccgtgtccttcctcgagtaccgcaccttccagttccagccctccaagtcccacggctcggagagcgactacatcgtcatgcccaacatcctggtcttgggtgcggcggtgatgatggagaataagcccatgaccctgaagctcatcatgaccttggcattcaccaccctcggcgaacgtgccttcatgaaccgcactgtgggtgagatcatgtggggctacaaggacccccttgtgaatctcatcaacaagtactttccaggcatgttccccttcaaggacaagttcggattatttgctgagctcaacaactccgactctgggctcttcacggtgttcacgggggtccagaacatcagcaggatccacctcgtggacaagtggaacgggctgagcaaggttgacttctggcattccgatcagtgcaacatgatcaatggaacttctgggcaaatgtggccgcccttcatgactcctgagtcctcgctggagttctacagcccggaggcctgccgatccatgaagctaatgtacaaggagtcaggggtgtttgaaggcatccccacctatcgcttcgtggctcccaaaaccctgtttgccaacgggtccatctacccacccaacgaaggcttctgcccgtgcctggagtctggaattcagaacgtcagcacctgcaggttcagtgcccccttgtttctctcccatcctcacttcctcaacgctgacccggttctggcagaagcggtgactggcctgcaccctaaccaggaggcacactccttgttcctggacatccacccggtcacgggaatccccatgaactgctctgtgaaactgcagctgagcctctacatgaaatctgtcgcaggcattggacaaactgggaagattgagcctgtggtcctgccgctgctctggtttgcagagagcggggccatggagggggagactcttcacacattctacactcagctggtgttgatgcccaaggagaaatgctatttattttggagtagtagtaaaaagggctcaaaggataaggaggccattcaggcctattctgaatccctgatgacatcagctcccaagggctctgtgctgcaggaagcaaaactgtagggtcctgaggacaccgtgagccagccaggcctggccgctgggcctgaccggccccccagcccctacaccccgcttctcccggactctcccagcggacagccccccagccccacagcctgagcctcccagctgccatgtgcctgttgcacacctgcacacacgccctggcacacatacacacatgcgtgcaggcttgtgcagacactcagggatggagctgctgctgaagggacttgtagggagaggctcgtcaacaagcactgttctggaaccttctctccacgtggcccacaggcctgaccacaggggctgtgggtcctgcgtccccttcctcgggtgagcctggcctgtcccgttcagccgttgggcccaggcttcctcccctccaaggtgaaacactgcagtcccggtgtggtggctccccatgcaggacgggccaggctgggagtgccgccttcctgtgccaaattcagtggggactcagtgcccaggccctggccacgagctttggccttggtctacctgccaggccaggcaaagcgcctttacacaggcctcggaaaacaatggagtgagcacaagatgccctgtgcagctgcccgagggtctccgcccaccccggccggactttgatccccccgaagtcttcacaggcactgcatcgggttgtctggcgcccttttcctccagcctaaactgacatcatcctatggactgagccggccactctctggccgaagtggccgcaggctgtgcccccgagctgcccccaccccctcacagggtccctcagattataggtgcccaggctgaggtgaagaggcctgggggccctgccttccgggcgctcctggaccctggggcaaacctgtgacccttttctactggaatagaaatgagttttatcatctttgaaaaataattcactcttgaagtaataaacgtttaaaaaaatggga

SEQ ID NO: 1243 - DNA, 3212 bp, Homo sapiens
gccggcgccctaggaggcggcggcgggaggatcgcgtcccgacccgaggccgggcctgctgcgcgcccccagcccgatcggcaccgccacttgcctgagcgccccggcggcccgagcgcgccccaagcccgggcgccaccgctgccacctccgcgaggtctccctgagtctttgaggacacagcctcgctggaggcagtttctggtgccagtgacggggtggcccgtgagctgatgacgaggactggcttttaatccttggtggtgattaagagaaagcttattggggcctgggagcagctccccgccgacccccaccaccatgtcgggatccacacagcctgtggcacagacgtggagggccactgagccccgctacccgccccacagcctttcctacccagtgcagatcgcccggacgcacacggacgtcgggctcctggagtaccagcaccactcccgcgactatgcctcccacctgtcgcccggctccatcatccagccccagcggcggaggccctccctgctgtctgagttccagcccgggaatgaacggtcccaggagctccacctgcggccagagtcccactcatacctgcccgagctggggaagtcagagatggagttcattgaaagcaagcgccctcggctagagctgctgcctgaccccctgctgcgaccgtcacccctgctggccacgggccagcctgcgggatctgaagacctcaccaaggaccgtagcctgacgggcaagctggaaccggtgtctccccccagccccccgcacactgaccctgagctggagctggtgccgccacggctgtccaaggaggagctgatccagaacatggaccgcgtggaccgagagatcaccatggtagagcagcagatctctaagctgaagaagaagcagcaacagctggaggaggaggctgccaagccgcccgagcctgagaagcccgtgtcaccgccgcccatcgagtcgaagcaccgcagcctggtgcagatcatctacgacgagaaccggaagaaggctgaagctgcacatcggattctggaaggcctggggccccaggtggagctgccgctgtacaaccagccctccgacacccggcagtatcatgagaacatcaaaatggagttcaggcacaaaagcaacatcaccttcaacaacaacgacaccgtgtccttcctcgagtaccgcaccttccagttccagccctccaagtcccacggctcggagagcgactacatcgtcatgcccaacatcctggtcttgggtgcggcggtgatgatggagaataagcccatgaccctgaagctcatcatgaccttggcattcaccaccctcggcgaacgtgccttcatgaaccgcactgtgggtgagatcatgtggggctacaaggacccccttgtgaatctcatcaacaagtactttccaggcatgttccccttcaaggacaagttcggattatttgctgagctcaacaactccgactctgggctcttcacggtgttcacgggggtccagaacatcagcaggatccacctcgtggacaagtggaacgggctgagcaaggttgacttctggcattccgatcagtgcaacatgatcaatggaacttctgggcaaatgtggccgcccttcatgactcctgagtcctcgctggagttctacagcccggaggcctgccgatccatgaagctaatgtacaaggagtcaggggtgtttgaaggcatccccacctatcgcttcgtggctcccaaaaccctgtttgccaacgggtccatctacccacccaacgaaggcttctgcccgtgcctggagtctggaattcagaacgtcagcacctgcaggttcagtgcccccttgtttctctcccatcctcacttcctcaacgctgacccggttctggcagaagcggtgactggcctgcaccctaaccaggaggcacactccttgttcctggacatccacccggtcacgggaatccccatgaactgctctgtgaaactgcagctgagcctctacatgaaatctgtcgcaggcattggacaaactgggaagattgagcctgtggtcctgccgctgctctggtttgcagagagcggggccatggagggggagactcttcacacattctacactcagctggtgttgatgcccaaggtgatgcactatgcccagtacgtcctcctggcgctgggctgcgtcctgctgctggtccctgtcatctgccaaatccggagccaaggtcctgaggacaccgtgagccagccaggcctggccgctgggcctgaccggccccccagcccctacaccccgcttctcccggactctcccagcggacagccccccagccccacagcctgagcctcccagctgccatgtgcctgttgcacacctgcacacacgccctggcacacatacacacatgcgtgcaggcttgtgcagacactcagggatggagctgctgctgaagggacttgtagggagaggctcgtcaacaagcactgttctggaaccttctctccacgtggcccacaggcctgaccacaggggctgtgggtcctgcgtccccttcctcgggtgagcctggcctgtcccgttcagccgttgggcccaggcttcctcccctccaaggtgaaacactgcagtcccggtgtggtggctccccatgcaggacgggccaggctgggagtgccgccttcctgtgccaaattcagtggggactcagtgcccaggccctggccacgagctttggccttggtctacctgccaggccaggcaaagcgcctttacacaggcctcggaaaacaatggagtgagcacaagatgccctgtgcagctgcccgagggtctccgcccaccccggccggactttgatccccccgaagtcttcacaggcactgcatcgggttgtctggcgcccttttcctccagcctaaactgacatcatcctatggactgagccggccactctctggccgaagtggccgcaggctgtgcccccgagctgcccccaccccctcacagggtccctcagattataggtgcccaggctgaggtgaagaggcctgggggccctgccttccgggcgctcctggaccctggggcaaacctgtgacccttttctactggaatagaaatgagttttatcatctttgaaaaataattcactcttgaagtaataaacgtttaaaaaaatggga

SEQ ID NO: 1244-1245 - skipped (2 entries)

SEQ ID NO: 1246 - DNA, 1230 bp, Homo sapiens
agttaccaagctcggtgaaggagacaagttcccacagctgactcggctcggctctcccaccttcccggcagcggccgcgagccctgattgtatccctcgctttcctcgtgggggagcacggactgacttggctgaagaaaatgccagttctgtggatgtggccgtgacaagaggacgtgcggctggaagaggcagaaggggacgaggaaaagcatgctttgaagagaagaataaaccagcgaccccaaccctttctgcaaattggtgctattacttgtgggatccatttgctttcattccctcccaccccaccgctgaagaaaccttgccctgagggctgagagccagccccctgcagccgggggacgcttctgggttggaggaccttctggatgtagcgtcggtggaacctttagatactctcctctggaaaagccaccatgaattcggtagctgggaataaagagaggcttgcggtctccaccaggggcaagaaatacggggtgaatgaagtctgctcgcccaccaagcccgcagcgcccttctccccggaaagctggtaccggaaagcatacgaggagtcgcgcgccggcagccggcccactcctgagggcgcgggctcagcgctcggctcctcggggaccccgtctcccggctcgggcacctcgtccccgagctcgttcaccggctccccgggacccgcctcccccggcatcggcactagttcgccgggctccttgggcggctctccgggcttcggcacaggctccccgggctccggcagcggcggcggctcctcccccggctcggaccgcggcgtctggtgcgagaactgcaacgcccgcctggtggagctcaagaggcaggccctgaggttgctcctcccggggcccttcccgggcaaggcttttgatattatgagagtgacacatggcagagaacacagcctgattgaagatttgattctacttttagaagaatgcgacgccaacatcagagcatcctaagggaacgcagtcagagggaaatacggcgtgtgtctttgttgaatgccttattgaggtcacacactctatgctttgttagctgtgtgaacctctcctattggaaattctgttccgtgtttgtgtaggtaaataaaggcagacatggtttgcaaaccacaagaatcattagttgtagagaagcacgattataataaattcaaaacatttggttgaggatgccatc

SEQ ID NO: 1247 - DNA, 1713 bp, Homo sapiens
agttaccaagctcggtgaaggagacaagttcccacagctgactcggctcggctctcccaccttcccggcagcggccgcgagccctgattgtatccctcgctttcctcgtgggggagcacggactgacttggctgaagaaaatgccagttctgtggatgtggccgtgacaagaggacgtgcggctggaagaggcagaaggggacgaggaaaagcatgctttgaagagaagaataaaccagcgaccccaaccctttctgcaaattggtgctattacttgtgggatccatttgctttcattccctcccaccccaccgctgaagaaaccttgccctgagggctgagagccagccccctgcagccgggggacgcttctgggttggaggaccttctggatgtagcgtcggtggaacctttagatactctcctctggaaaagccaccatgaattcggtagctgggaataaagagaggcttgcggtctccaccaggggcaagaaatacggggtgaatgaagtctgctcgcccaccaagcccgcagcgcccttctccccggaaagctggtaccggaaagcatacgaggagtcgcgcgccggcagccggcccactcctgagggcgcgggctcagcgctcggctcctcggggaccccgtctcccggctcgggcacctcgtccccgagctcgttcaccggctccccgggacccgcctcccccggcatcggcactagttcgccgggctccttgggcggctctccgggcttcggcacaggctccccgggctccggcagcggcggcggctcctcccccggctcggaccgcggcgtctggtgcgagaactgcaacgcccgcctggtggagctcaagaggcaggccctgaggttgctcctcccggggcccttcccgggcaagctcaccatctgctacctggatatgctgatgaccagtgaggagcgccggaagcagctgagggaccagtactgctttgaatgtgactgtttccgttgccaaacccaggacaaggatgctgatatgctaactggtgatgagcaagtatggaaggaagttcaagaatccctgaaaaaaattgaagaactgaaggcacactggaagtgggagcaggttctggccatgtgccaggcaatcataagcagcaattctgaacggcttcccgatatcaacatctaccagctgaaggtgctcgactgcgccatggatgcctgcatcaacctcggcctgttggaggaagccttgttctatggtactcggaccatggagccatacaggatttttttcccaggaagccatcccgtcagaggggttcaagtgatgaaagttggcaaactgcagctacatcaaggcatgtttccccaagcaatgaagaatctgagactggcttttgatattatgagagtgacacatggcagagaacacagcctgattgaagatttgattctacttttagaagaatgcgacgccaacatcagagcatcctaagggaacgcagtcagagggaaatacggcgtgtgtctttgttgaatgccttattgaggtcacacactctatgctttgttagctgtgtgaacctctcctattggaaattctgttccgtgtttgtgtaggtaaataaaggcagacatggtttgcaaaccacaagaatcattagttgtagagaagcacgattataataaattcaaaacatttggttgaggatgccatc

SEQ ID NO: 1248 - DNA, 1602 bp, Homo sapiens
agttaccaagctcggtgaaggagacaagttcccacagctgactcggctcggctctcccaccttcccggcagcggccgcgagccctgattgtatccctcgctttcctcgtgggggagcacggactgacttggctgaagaaaatgccagttctgtggatgtggccgtgacaagaggacgtgcggctggaagaggcagaaggggacgaggaaaagcatgctttgaagagaagaataaaccagcgaccccaaccctttctgcaaattggtgctattacttgtgggatccatttgctttcattccctcccaccccaccgctgaagaaaccttgccctgagggctgagagccagccccctgcagccgggggacgcttctgggttggaggaccttctggatgtagcgtcggtggaacctttagatactctcctctggaaaagccaccatgaattcggtagctgggaataaagagaggcttgcggtctccaccaggggcaagaaatacggggtgaatgaagtctgctcgcccaccaagcccgcagcgcccttctccccggaaagctggtaccggaaagcatacgaggagtcgcgcgccggcagccggcccactcctgagggcgcgggctcagcgctcggctcctcggggaccccgtctcccggctcgggcacctcgtccccgagctcgttcaccggctccccgggacccgcctcccccggcatcggcactagttcgccgggctccttgggcggctctccgggcttcggcacaggctccccgggctccggcagcggcggcggctcctcccccggctcggaccgcggcgtctggtgcgagaactgcaacgcccgcctggtggagctcaagaggcaggccctgaggttgctcctcccggggcccttcccgggcaaggatgctgatatgctaactggtgatgagcaagtatggaaggaagttcaagaatccctgaaaaaaattgaagaactgaaggcacactggaagtgggagcaggttctggccatgtgccaggcaatcataagcagcaattctgaacggcttcccgatatcaacatctaccagctgaaggtgctcgactgcgccatggatgcctgcatcaacctcggcctgttggaggaagccttgttctatggtactcggaccatggagccatacaggatttttttcccaggaagccatcccgtcagaggggttcaagtgatgaaagttggcaaactgcagctacatcaaggcatgtttccccaagcaatgaagaatctgagactggcttttgatattatgagagtgacacatggcagagaacacagcctgattgaagatttgattctacttttagaagaatgcgacgccaacatcagagcatcctaagggaacgcagtcagagggaaatacggcgtgtgtctttgttgaatgccttattgaggtcacacactctatgctttgttagctgtgtgaacctctcctattggaaattctgttccgtgtttgtgtaggtaaataaaggcagacatggtttgcaaaccacaagaatcattagttgtagagaagcacgattataataaattcaaaacatttggttgaggatgccatc

SEQ ID NO: 1249 - DNA, 2769 bp, Homo sapiens
agttaccaagctcggtgaaggagacaagttcccacagctgactcggctcggctctcccaccttcccggcagcggccgcgagccctgattgtatccctcgctttcctcgtgggggagcacggactgacttggctgaagaaaatgccagttctgtggatgtggccgtgacaagaggacgtgcggctggaagaggcagaaggggacgaggaaaagcatgctttgaagagaagaataaaccagcgaccccaaccctttctgcaaattggtgctattacttgtgggatccatttgctttcattccctcccaccccaccgctgaagaaaccttgccctgagggctgagagccagccccctgcagccgggggacgcttctgggttggaggaccttctggatgtagcgtcggtggaacctttagatactctcctctggaaaagccaccatgaattcggtagctgggaataaagagaggcttgcggtctccaccaggggcaagaaatacggggtgaatgaagtctgctcgcccaccaagcccgcagcgcccttctccccggaaagctggtaccggaaagcatacgaggagtcgcgcgccggcagccggcccactcctgagggcgcgggctcagcgctcggctcctcggggaccccgtctcccggctcgggcacctcgtccccgagctcgttcaccggctccccgggacccgcctcccccggcatcggcactagttcgccgggctccttgggcggctctccgggcttcggcacaggctccccgggctccggcagcggcggcggctcctcccccggctcggaccgcggcgtctggtgcgagaactgcaacgcccgcctggtggagctcaagaggcaggccctgaggttgctcctcccggggcccttcccgggcaaggaccctgctttctcggctgtgattcacgacaaactccaggtccccaacaccatccggaaggcatggaacgaccgggacaaccgctgtgacatttgcgccactcacctgaaccagttgaagcaggaggccatccagatggtgctgacgttggagcaggcagccggcagtgagcactacgacgcctcgccctgctccccgccaccgctctccaacatccccaccctggtggggtcccggcacgtgggtgggctccagcagcccagagactgggcctttgtgcccgccccctgtgccacctccaactacacaggcttcgccaacaagcacggcagcaaacccagcagccttggggtcagcaatggggcggaaaagaagagcgggtccccaacccaccaggccaaggtcagcctccagatggccaccagtccaagcaatgggaacatcctcaattcggtggccatccaggctcaccagtacctggatggcacctggtccctgtcgagaaccaacggggtcaccctgtacccataccagatctcccagctgatgacagagagtagccgggagggactaacagaagcagtgctgaaccgctacaatgcagacaagccttccgcctgcagtgtcccagcctcgcagggctcctgcgtggccagcgagacttccacaggcacatcggtggccgcctccttctttgcacgagctgcccagaagttaaatctgtcttctaaaaagaagaaacatcggccttccacttcttccgctgccgaaccaccgctctttgcaaccagcttcagtgggattctgcagacctcccctcccccagccccaccctgcctgctgagggctgtcaacaaggtgaaggacaccccggggctgggcaaggtgatctgcaactctttcaccatctgtaatgcggagatgcaggaagttggtgttggcctatatcccagtatctctttgctcaatcacagctgtgaccccaactgttcgattgtgttcaatgggccccacctcttactgcgagcagtccgagacatcgaggtgggagaggagctcaccatctgctacctggatatgctgatgaccagtgaggagcgccggaagcagctgagggaccagtactgctttgaatgtgactgtttccgttgccaaacccaggacaaggatgctgatatgctaactggtgatgagcaagtatggaaggaagttcaagaatccctgaaaaaaattgaagaactgaaggcacactggaagtgggagcaggttctggccatgtgccaggcaatcataagcagcaattctgaacggcttcccgatatcaacatctaccagctgaaggtgctcgactgcgccatggatgcctgcatcaacctcggcctgttggaggaagccttgttctatggtactcggaccatggagccatacaggatttttttcccaggaagccatcccgtcagaggggttcaagtgatgaaagttggcaaactgcagctacatcaaggcatgtttccccaagcaatgaagaatctgagactggcttttgatattatgagagtgacacatggcagagaacacagcctgattgaagatttgattctacttttagaagaatgcgacgccaacatcagagcatcctaagggaacgcagtcagagggaaatacggcgtgtgtctttgttgaatgccttattgaggtcacacactctatgctttgttagctgtgtgaacctctcctattggaaattctgttccgtgtttgtgtaggtaaataaaggcagacatggtttgcaaaccacaagaatcattagttgtagagaagcacgattataataaattcaaaacatttggttgaggatgccatc

SEQ ID NO: 1250 - DNA, 1884 bp, Homo sapiens
agttaccaagctcggtgaaggagacaagttcccacagctgactcggctcggctctcccaccttcccggcagcggccgcgagccctgattgtatccctcgctttcctcgtgggggagcacggactgacttggctgaagaaaatgccagttctgtggatgtggccgtgacaagaggacgtgcggctggaagaggcagaaggggacgaggaaaagcatgctttgaagagaagaataaaccagcgaccccaaccctttctgcaaattggtgctattacttgtgggatccatttgctttcattccctcccaccccaccgctgaagaaaccttgccctgagggctgagagccagccccctgcagccgggggacgcttctgggttggaggaccttctggatgtagcgtcggtggaacctttagatactctcctctggaaaagccaccatgaattcggtagctgggaataaagagaggcttgcggtctccaccaggggcaagaaatacggggtgaatgaagtctgctcgcccaccaagcccgcagcgcccttctccccggaaagctggtaccggaaagcatacgaggagtcgcgcgccggcagccggcccactcctgagggcgcgggctcagcgctcggctcctcggggaccccgtctcccggctcgggcacctcgtccccgagctcgttcaccggctccccgggacccgcctcccccggcatcggcactagttcgccgggctccttgggcggctctccgggcttcggcacaggctccccgggctccggcagcggcggcggctcctcccccggctcggaccgcggcgtctggtgcgagaactgcaacgcccgcctggtggagctcaagaggcaggccctgaggttgctcctcccggggcccttcccgggcaaggtgatctgcaactctttcaccatctgtaatgcggagatgcaggaagttggtgttggcctatatcccagtatctctttgctcaatcacagctgtgaccccaactgttcgattgtgttcaatgggccccacctcttactgcgagcagtccgagacatcgaggtgggagaggagctcaccatctgctacctggatatgctgatgaccagtgaggagcgccggaagcagctgagggaccagtactgctttgaatgtgactgtttccgttgccaaacccaggacaaggatgctgatatgctaactggtgatgagcaagtatggaaggaagttcaagaatccctgaaaaaaattgaagaactgaaggcacactggaagtgggagcaggttctggccatgtgccaggcaatcataagcagcaattctgaacggcttcccgatatcaacatctaccagctgaaggtgctcgactgcgccatggatgcctgcatcaacctcggcctgttggaggaagccttgttctatggtactcggaccatggagccatacaggatttttttcccaggaagccatcccgtcagaggggttcaagtgatgaaagttggcaaactgcagctacatcaaggcatgtttccccaagcaatgaagaatctgagactggcttttgatattatgagagtgacacatggcagagaacacagcctgattgaagatttgattctacttttagaagaatgcgacgccaacatcagagcatcctaagggaacgcagtcagagggaaatacggcgtgtgtctttgttgaatgccttattgaggtcacacactctatgctttgttagctgtgtgaacctctcctattggaaattctgttccgtgtttgtgtaggtaaataaaggcagacatggtttgcaaaccacaagaatcattagttgtagagaagcacgattataataaattcaaaacatttggttgaggatgccatc

SEQ ID NO: 1251 - DNA, 2040 bp, Homo sapiens
agttaccaagctcggtgaaggagacaagttcccacagctgactcggctcggctctcccaccttcccggcagcggccgcgagccctgattgtatccctcgctttcctcgtgggggagcacggactgacttggctgaagaaaatgccagttctgtggatgtggccgtgacaagaggacgtgcggctggaagaggcagaaggggacgaggaaaagcatgctttgaagagaagaataaaccagcgaccccaaccctttctgcaaattggtgctattacttgtgggatccatttgctttcattccctcccaccccaccgctgaagaaaccttgccctgagggctgagagccagccccctgcagccgggggacgcttctgggttggaggaccttctggatgtagcgtcggtggaacctttagatactctcctctggaaaagccaccatgaattcggtagctgggaataaagagaggcttgcggtctccaccaggggcaagaaatacggggtgaatgaagtctgctcgcccaccaagcccgcagcgcccttctccccggaaagctggtaccggaaagcatacgaggagtcgcgcgccggcagccggcccactcctgagggcgcgggctcagcgctcggctcctcggggaccccgtctcccggctcgggcacctcgtccccgagctcgttcaccggctccccgggacccgcctcccccggcatcggcactagttcgccgggctccttgggcggctctccgggcttcggcacaggctccccgggctccggcagcggcggcggctcctcccccggctcggaccgcggcgtctggtgcgagaactgcaacgcccgcctggtggagctcaagaggcaggccctgaggttgctcctcccggggcccttcccgggcaaggaccctgctttctcggctgtgattcacgacaaactccaggtccccaacaccatccggaaggcatggaacgaccgggacaaccgctgtgacatttgcgccactcacctgaaccagttgaagcaggaggccatccagatggtgctgacgttggagcaggcagccggcagtgagcactacgacgcctcgccctgctccccgccaccgctctccaacatccccaccctggtggggtcccggcacgtgggtgggctccagcagcccagagactgggcctttgtgcccgccccctgtgccacctccaactacacaggcttcgccaacaagcacggcagcaaacccagcagccttggggtcagcaatggggcggaaaagaagagcgggtccccaacccaccaggccaaggtcagcctccagatggccaccagtccaagcaatgggaacatcctcaattcggtggccatccaggctcaccagtacctggatggcacctggtccctgtcgagaaccaacggggtcaccctgtacccataccagatctcccagctgatgacagagagtagccgggagggactaacagaagcagtgctgaaccgctacaatgcagacaagccttccgcctgcagtgtcccagcctcgcagggctcctgcgtggccagcgagacttccacaggcacatcggtggccgcctccttctttgcacggatttttttcccaggaagccatcccgtcagaggggttcaagtgatgaaagttggcaaactgcagctacatcaaggcatgtttccccaagcaatgaagaatctgagactggcttttgatattatgagagtgacacatggcagagaacacagcctgattgaagatttgattctacttttagaagaatgcgacgccaacatcagagcatcctaagggaacgcagtcagagggaaatacggcgtgtgtctttgttgaatgccttattgaggtcacacactctatgctttgttagctgtgtgaacctctcctattggaaattctgttccgtgtttgtgtaggtaaataaaggcagacatggtttgcaaaccacaagaatcattagttgtagagaagcacgattataataaattcaaaacatttggttgaggatgccatc

SEQ ID NO: 1252 - DNA, 1470 bp, Homo sapiens
cctggagaaatgcttcctgctcctcccgccctccccaccaccatcctgctgtatttaaagctgctttggtgatgctttgctcatctcagtgaattttcagttcagaccttttcactaaggatcattatggaagaaagaggggtaagaagtgtggctgagtagcctaggattaattcatcagtccccaaataagcaaacacgatgtctcaggatggacggtgaaattctggacctcacaggaccctgctttctcggctgtgattcacgacaaactccaggtccccaacaccatccggaaggcatggaacgaccgggacaaccgctgtgacatttgcgccactcacctgaaccagttgaagcaggaggccatccagatggtgctgacgttggagcaggcagccggcagtgagcactacgacgcctcgccctgctccccgccaccgctctccaacatccccaccctggtggggtcccggcacgtgggtgggctccagcagcccagagactgggcctttgtgcccgccccctgtgccacctccaactacacaggcttcgccaacaagcacggcagcaaacccagcagccttggggtcagcaatggggcggaaaagaagagcgggtccccaacccaccaggccaaggtcagcctccagatggccaccagtccaagcaatgggaacatcctcaattcggtggccatccaggctcaccagtacctggatggcacctggtccctgtcgagaaccaacggggtcaccctgtacccataccaggatgctgatatgctaactggtgatgagcaagtatggaaggaagttcaagaatccctgaaaaaaattgaagaactgaaggcacactggaagtgggagcaggttctggccatgtgccaggcaatcataagcagcaattctgaacggcttcccgatatcaacatctaccagctgaaggtgctcgactgcgccatggatgcctgcatcaacctcggcctgttggaggaagccttgttctatggtactcggaccatggagccatacaggatttttttcccaggaagccatcccgtcagaggggttcaagtgatgaaagttggcaaactgcagctacatcaaggcatgtttccccaagcaatgaagaatctgagactggcttttgatattatgagagtgacacatggcagagaacacagcctgattgaagatttgattctacttttagaagaatgcgacgccaacatcagagcatcctaagggaacgcagtcagagggaaatacggcgtgtgtctttgttgaatgccttattgaggtcacacactctatgctttgttagctgtgtgaacctctcctattggaaattctgttccgtgtttgtgtaggtaaataaaggcagacatggtttgcaaaccacaagaatcattagttgtagagaagcacgattataataaattcaaaacatttggttgaggatgccatc

SEQ ID NO: 1253 - DNA, 2487 bp, Homo sapiens
agttaccaagctcggtgaaggagacaagttcccacagctgactcggctcggctctcccaccttcccggcagcggccgcgagccctgattgtatccctcgctttcctcgtgggggagcacggactgacttggctgaagaaaatgccagttctgtggatgtggccgtgacaagaggacgtgcggctggaagaggcagaaggggacgaggaaaagcatgctttgaagagaagaataaaccagcgaccccaaccctttctgcaaattggtgctattacttgtgggatccatttgctttcattccctcccaccccaccgctgaagaaaccttgccctgagggctgagagccagccccctgcagccgggggacgcttctgggttggaggaccttctggatgtagcgtcggtggaacctttagatactctcctctggaaaagccaccatgaattcggtagctgggaataaagagaggcttgcggtctccaccaggggcaagaaatacggggtgaatgaagtctgctcgcccaccaagcccgcagcgcccttctccccggaaagctggtaccggaaagcatacgaggagtcgcgcgccggcagccggcccactcctgagggcgcgggctcagcgctcggctcctcggggaccccgtctcccggctcgggcacctcgtccccgagctcgttcaccggctccccgggacccgcctcccccggcatcggcactagttcgccgggctccttgggcggctctccgggcttcggcacaggctccccgggctccggcagcggcggcggctcctcccccggctcggaccgcggcgtctggtgcgagaactgcaacgcccgcctggtggagctcaagaggcaggccctgaggttgctcctcccggggcccttcccgggcaaggaccctgctttctcggctgtgattcacgacaaactccaggtccccaacaccatccggaaggcatggaacgaccgggacaaccgctgtgacatttgcgccactcacctgaaccagttgaagcaggaggccatccagatggtgctgacgttggagcaggcagccggcagtgagcactacgacgcctcgccctgctccccgccaccgctctccaacatccccaccctggtggggtcccggcacgtgggtgggctccagcagcccagagactgggcctttgtgcccgccccctgtgccacctccaactacacaggcttcgccaacaagcacggcagcaaacccagcagccttggggtcagcaatggggcggaaaagaagagcgggtccccaacccaccaggccaaggtcagcctccagatggccaccagtccaagcaatgggaacatcctcaattcggtggccatccaggctcaccagtacctggatggcacctggtccctgtcgagaaccaacggggtcaccctgtacccataccagatctcccagctgatgacagagagtagccgggagggactaacagaagcagtgctgaaccgctacaatgcagacaagccttccgcctgcagtgtcccagcctcgcagggctcctgcgtggccagcgagacttccacaggcacatcggtggccgcctccttctttgcacgagctgcccagaagttaaatctgtcttctaaaaagaagaaacatcggccttccacttcttccgctgccgaaccaccgctctttgcaaccagcttcagtgggattctgcagacctcccctcccccagccccaccctgcctgctgagggctgtcaacaaggtgaaggacaccccggggctgggcaaggatgctgatatgctaactggtgatgagcaagtatggaaggaagttcaagaatccctgaaaaaaattgaagaactgaaggcacactggaagtgggagcaggttctggccatgtgccaggcaatcataagcagcaattctgaacggcttcccgatatcaacatctaccagctgaaggtgctcgactgcgccatggatgcctgcatcaacctcggcctgttggaggaagccttgttctatggtactcggaccatggagccatacaggatttttttcccaggaagccatcccgtcagaggggttcaagtgatgaaagttggcaaactgcagctacatcaaggcatgtttccccaagcaatgaagaatctgagactggcttttgatattatgagagtgacacatggcagagaacacagcctgattgaagatttgattctacttttagaagaatgcgacgccaacatcagagcatcctaagggaacgcagtcagagggaaatacggcgtgtgtctttgttgaatgccttattgaggtcacacactctatgctttgttagctgtgtgaacctctcctattggaaattctgttccgtgtttgtgtaggtaaataaaggcagacatggtttgcaaaccacaagaatcattagttgtagagaagcacgattataataaattcaaaacatttggttgaggatgccatc

SEQ ID NO: 1254 - skipped

SEQ ID NO: 1255 - DNA, 2598 bp, Homo sapiens
agttaccaagctcggtgaaggagacaagttcccacagctgactcggctcggctctcccaccttcccggcagcggccgcgagccctgattgtatccctcgctttcctcgtgggggagcacggactgacttggctgaagaaaatgccagttctgtggatgtggccgtgacaagaggacgtgcggctggaagaggcagaaggggacgaggaaaagcatgctttgaagagaagaataaaccagcgaccccaaccctttctgcaaattggtgctattacttgtgggatccatttgctttcattccctcccaccccaccgctgaagaaaccttgccctgagggctgagagccagccccctgcagccgggggacgcttctgggttggaggaccttctggatgtagcgtcggtggaacctttagatactctcctctggaaaagccaccatgaattcggtagctgggaataaagagaggcttgcggtctccaccaggggcaagaaatacggggtgaatgaagtctgctcgcccaccaagcccgcagcgcccttctccccggaaagctggtaccggaaagcatacgaggagtcgcgcgccggcagccggcccactcctgagggcgcgggctcagcgctcggctcctcggggaccccgtctcccggctcgggcacctcgtccccgagctcgttcaccggctccccgggacccgcctcccccggcatcggcactagttcgccgggctccttgggcggctctccgggcttcggcacaggctccccgggctccggcagcggcggcggctcctcccccggctcggaccgcggcgtctggtgcgagaactgcaacgcccgcctggtggagctcaagaggcaggccctgaggttgctcctcccggggcccttcccgggcaaggaccctgctttctcggctgtgattcacgacaaactccaggtccccaacaccatccggaaggcatggaacgaccgggacaaccgctgtgacatttgcgccactcacctgaaccagttgaagcaggaggccatccagatggtgctgacgttggagcaggcagccggcagtgagcactacgacgcctcgccctgctccccgccaccgctctccaacatccccaccctggtggggtcccggcacgtgggtgggctccagcagcccagagactgggcctttgtgcccgccccctgtgccacctccaactacacaggcttcgccaacaagcacggcagcaaacccagcagccttggggtcagcaatggggcggaaaagaagagcgggtccccaacccaccaggccaaggtcagcctccagatggccaccagtccaagcaatgggaacatcctcaattcggtggccatccaggctcaccagtacctggatggcacctggtccctgtcgagaaccaacggggtcaccctgtacccataccagatctcccagctgatgacagagagtagccgggagggactaacagaagcagtgctgaaccgctacaatgcagacaagccttccgcctgcagtgtcccagcctcgcagggctcctgcgtggccagcgagacttccacaggcacatcggtggccgcctccttctttgcacgagctgcccagaagttaaatctgtcttctaaaaagaagaaacatcggccttccacttcttccgctgccgaaccaccgctctttgcaaccagcttcagtgggattctgcagacctcccctcccccagccccaccctgcctgctgagggctgtcaacaaggtgaaggacaccccggggctgggcaagctcaccatctgctacctggatatgctgatgaccagtgaggagcgccggaagcagctgagggaccagtactgctttgaatgtgactgtttccgttgccaaacccaggacaaggatgctgatatgctaactggtgatgagcaagtatggaaggaagttcaagaatccctgaaaaaaattgaagaactgaaggcacactggaagtgggagcaggttctggccatgtgccaggcaatcataagcagcaattctgaacggcttcccgatatcaacatctaccagctgaaggtgctcgactgcgccatggatgcctgcatcaacctcggcctgttggaggaagccttgttctatggtactcggaccatggagccatacaggatttttttcccaggaagccatcccgtcagaggggttcaagtgatgaaagttggcaaactgcagctacatcaaggcatgtttccccaagcaatgaagaatctgagactggcttttgatattatgagagtgacacatggcagagaacacagcctgattgaagatttgattctacttttagaagaatgcgacgccaacatcagagcatcctaagggaacgcagtcagagggaaatacggcgtgtgtctttgttgaatgccttattgaggtcacacactctatgctttgttagctgtgtgaacctctcctattggaaattctgttccgtgtttgtgtaggtaaataaaggcagacatggtttgcaaaccacaagaatcattagttgtagagaagcacgattataataaattcaaaacatttggttgaggatgccatc

SEQ ID NO: 1256 - DNA, 2136 bp, Homo sapiens
agttaccaagctcggtgaaggagacaagttcccacagctgactcggctcggctctcccaccttcccggcagcggccgcgagccctgattgtatccctcgctttcctcgtgggggagcacggactgacttggctgaagaaaatgccagttctgtggatgtggccgtgacaagaggacgtgcggctggaagaggcagaaggggacgaggaaaagcatgctttgaagagaagaataaaccagcgaccccaaccctttctgcaaattggtgctattacttgtgggatccatttgctttcattccctcccaccccaccgctgaagaaaccttgccctgagggctgagagccagccccctgcagccgggggacgcttctgggttggaggaccttctggatgtagcgtcggtggaacctttagatactctcctctggaaaagccaccatgaattcggtagctgggaataaagagaggcttgcggtctccaccaggggcaagaaatacggggtgaatgaagtctgctcgcccaccaagcccgcagcgcccttctccccggaaagctggtaccggaaagcatacgaggagtcgcgcgccggcagccggcccactcctgagggcgcgggctcagcgctcggctcctcggggaccccgtctcccggctcgggcacctcgtccccgagctcgttcaccggctccccgggacccgcctcccccggcatcggcactagttcgccgggctccttgggcggctctccgggcttcggcacaggctccccgggctccggcagcggcggcggctcctcccccggctcggaccgcggcgtctggtgcgagaactgcaacgcccgcctggtggagctcaagaggcaggccctgaggttgctcctcccggggcccttcccgggcaaggaccctgctttctcggctgtgattcacgacaaactccaggtccccaacaccatccggaaggcatggaacgaccgggacaaccgctgtgacatttgcgccactcacctgaaccagttgaagcaggaggccatccagatggtgctgacgttggagcaggcagccggcagtgagcactacgacgcctcgccctgctccccgccaccgctctccaacatccccaccctggtggggtcccggcacgtgggtgggctccagcagcccagagactgggcctttgtgcccgccccctgtgccacctccaactacacaggcttcgccaacaagcacggcagcaaacccagcagccttggggtcagcaatggggcggaaaagaagagcgggtccccaacccaccaggccaaggtcagcctccagatggccaccagtccaagcaatgggaacatcctcaattcggtggccatccaggctcaccagtacctggatggcacctggtccctgtcgagaaccaacggggtcaccctgtacccataccaggatgctgatatgctaactggtgatgagcaagtatggaaggaagttcaagaatccctgaaaaaaattgaagaactgaaggcacactggaagtgggagcaggttctggccatgtgccaggcaatcataagcagcaattctgaacggcttcccgatatcaacatctaccagctgaaggtgctcgactgcgccatggatgcctgcatcaacctcggcctgttggaggaagccttgttctatggtactcggaccatggagccatacaggatttttttcccaggaagccatcccgtcagaggggttcaagtgatgaaagttggcaaactgcagctacatcaaggcatgtttccccaagcaatgaagaatctgagactggcttttgatattatgagagtgacacatggcagagaacacagcctgattgaagatttgattctacttttagaagaatgcgacgccaacatcagagcatcctaagggaacgcagtcagagggaaatacggcgtgtgtctttgttgaatgccttattgaggtcacacactctatgctttgttagctgtgtgaacctctcctattggaaattctgttccgtgtttgtgtaggtaaataaaggcagacatggtttgcaaaccacaagaatcattagttgtagagaagcacgattataataaattcaaaacatttggttgaggatgccatc

SEQ ID NO: 1257 - DNA, 1290 bp, Homo sapiens
tcctgagatggccccagatctgcaagagacatttgagagaagctatttattagcagacgtgaagaaatggattctgcacttgattatttagccatgacttatcaatgatgatggattggaaagcagtagctgcccagaagttaaatctgtcttctaaaaagaagaaacatcggccttccacttcttccgctgccgaaccaccgctctttgcaaccagcttcagtgggattctgcagacctcccctcccccagccccaccctgcctgctgagggctgtcaacaaggtgaaggacaccccggggctgggcaaggtgatctgcaactctttcaccatctgtaatgcggagatgcaggaagttggtgttggcctatatcccagtatctctttgctcaatcacagctgtgaccccaactgttcgattgtgttcaatgggccccacctcttactgcgagcagtccgagacatcgaggtgggagaggagctcaccatctgctacctggatatgctgatgaccagtgaggagcgccggaagcagctgagggaccagtactgctttgaatgtgactgtttccgttgccaaacccaggacaaggatgctgatatgctaactggtgatgagcaagtatggaaggaagttcaagaatccctgaaaaaaattgaagaactgaaggcacactggaagtgggagcaggttctggccatgtgccaggcaatcataagcagcaattctgaacggcttcccgatatcaacatctaccagctgaaggtgctcgactgcgccatggatgcctgcatcaacctcggcctgttggaggaagccttgttctatggtactcggaccatggagccatacaggatttttttcccaggaagccatcccgtcagaggggttcaagtgatgaaagttggcaaactgcagctacatcaaggcatgtttccccaagcaatgaagaatctgagactggcttttgatattatgagagtgacacatggcagagaacacagcctgattgaagatttgattctacttttagaagaatgcgacgccaacatcagagcatcctaagggaacgcagtcagagggaaatacggcgtgtgtctttgttgaatgccttattgaggtcacacactctatgctttgttagctgtgtgaacctctcctattggaaattctgttccgtgtttgtgtaggtaaataaaggcagacatggtttgcaaaccacaagaatcattagttgtagagaagcacgattataataaattcaaaacatttggttgaggatgccatc

SEQ ID NO: 1258 - skipped

SEQ ID NO: 1259 - DNA, 1119 bp, Homo sapiens
tcctgagatggccccagatctgcaagagacatttgagagaagctatttattagcagacgtgaagaaatggattctgcacttgattatttagccatgacttatcaatgatgatggattggaaagcagtagctgcccagaagttaaatctgtcttctaaaaagaagaaacatcggccttccacttcttccgctgccgaaccaccgctctttgcaaccagcttcagtgggattctgcagacctcccctcccccagccccaccctgcctgctgagggctgtcaacaaggtgaaggacaccccggggctgggcaagctcaccatctgctacctggatatgctgatgaccagtgaggagcgccggaagcagctgagggaccagtactgctttgaatgtgactgtttccgttgccaaacccaggacaaggatgctgatatgctaactggtgatgagcaagtatggaaggaagttcaagaatccctgaaaaaaattgaagaactgaaggcacactggaagtgggagcaggttctggccatgtgccaggcaatcataagcagcaattctgaacggcttcccgatatcaacatctaccagctgaaggtgctcgactgcgccatggatgcctgcatcaacctcggcctgttggaggaagccttgttctatggtactcggaccatggagccatacaggatttttttcccaggaagccatcccgtcagaggggttcaagtgatgaaagttggcaaactgcagctacatcaaggcatgtttccccaagcaatgaagaatctgagactggcttttgatattatgagagtgacacatggcagagaacacagcctgattgaagatttgattctacttttagaagaatgcgacgccaacatcagagcatcctaagggaacgcagtcagagggaaatacggcgtgtgtctttgttgaatgccttattgaggtcacacactctatgctttgttagctgtgtgaacctctcctattggaaattctgttccgtgtttgtgtaggtaaataaaggcagacatggtttgcaaaccacaagaatcattagttgtagagaagcacgattataataaattcaaaacatttggttgaggatgccatc

SEQ ID NO: 1260 - DNA, 1008 bp, Homo sapiens
tcctgagatggccccagatctgcaagagacatttgagagaagctatttattagcagacgtgaagaaatggattctgcacttgattatttagccatgacttatcaatgatgatggattggaaagcagtagctgcccagaagttaaatctgtcttctaaaaagaagaaacatcggccttccacttcttccgctgccgaaccaccgctctttgcaaccagcttcagtgggattctgcagacctcccctcccccagccccaccctgcctgctgagggctgtcaacaaggtgaaggacaccccggggctgggcaaggatgctgatatgctaactggtgatgagcaagtatggaaggaagttcaagaatccctgaaaaaaattgaagaactgaaggcacactggaagtgggagcaggttctggccatgtgccaggcaatcataagcagcaattctgaacggcttcccgatatcaacatctaccagctgaaggtgctcgactgcgccatggatgcctgcatcaacctcggcctgttggaggaagccttgttctatggtactcggaccatggagccatacaggatttttttcccaggaagccatcccgtcagaggggttcaagtgatgaaagttggcaaactgcagctacatcaaggcatgtttccccaagcaatgaagaatctgagactggcttttgatattatgagagtgacacatggcagagaacacagcctgattgaagatttgattctacttttagaagaatgcgacgccaacatcagagcatcctaagggaacgcagtcagagggaaatacggcgtgtgtctttgttgaatgccttattgaggtcacacactctatgctttgttagctgtgtgaacctctcctattggaaattctgttccgtgtttgtgtaggtaaataaaggcagacatggtttgcaaaccacaagaatcattagttgtagagaagcacgattataataaattcaaaacatttggttgaggatgccatc

SEQ ID NO: 1261-1265 - skipped (5 entries)

SEQ ID NO: 1266 - DNA, 4263 bp, Homo sapiens
atcctgggctcccagctggagaggcggaggcagctccagggggctggaagtggaagcgcagcggcagaaggagagggagagagaaagagagagaggctaattaaaaaaggatactccgagggaagagagcaagggcggtgcgccgccaaggaccaactagcggcggagcttcgatcttgcctaggcgcggagagctcccaacctgggctggaaccttgcccagcacaggtggctgctacaccccatgtaaaaagcggaaaataaaatgaagattttccagcgcaagatgcggtactggttgcttccaccttttttggcaattgtttatttctgcaccattgtccaaggtcaagtggctccacccacaaggttaagatataatgtaatatctcatgacagtatacagatttcatggaaggctccaagagggaaatttggtggttacaaacttcttgtgactccaacttcaggtggaaaaactaaccagctgaatctgcagaacactgcaactaaagcaattattcaaggccttatgccagaccagaattacacagttcaaattattgcatacaataaagataaagaaagcaagccagctcaaggccaattcagaattaaagatttagaaaaaagaaaggatccaaagcccagagtcaaagttgtggacagaggaaatgggagtagaccatcttcaccagaagaagtgaaatttgtctgtcaaactccagcaattgctgacattgtaatcctggtcgatggttcatggagtattggaagattcaacttcagactggttcggcatttcttggaaaacctggttacagcattcgatgtgggctcagagaagacacgaattggtcttgcacagtatagtggtgaccccagaatagaatggcacttgaatgcatttagcacaaaagatgaagtgattgaagctgtccgaaacctcccatataaaggaggaaatacactaacaggtcttgctttgaactacatttttgaaaatagcttcaaaccagaagcaggatcaaggactggagtatccaaaattggcattttaatcacagatggaaaatcccaagatgacattattccaccatctagaaatcttcgtgagtctggtgtagaactgtttgccataggggtgaaaaacgcggatgtgaatgagctgcaggagatcgcctctgaaccagacagcactcatgtgtacaatgttgccgaattcgatctgatgcacacagttgtggagagtctgaccaggactctctgctctagagtggaagaacaggacagagaaattaaagcctcagcccatgccatcactgggccgcctacggagttgattacttctgaagtcactgccagaagctttatggttaactggactcatgccccaggaaatgtggaaaaatacagagttgtgtattatcctaccaggggtggaaaaccagacgaggtggtggtagatggaactgtatcttccacagtgttgaaaaacttgatgtctttaactgaatatcagatagcagtctttgcaatctatgcccacactgctagtgaaggcctacggggaactgaaactacacttgctttaccgatggcttctgaccttctactgtacgacgtgactgagaacagcatgcgagtcaaatgggatgcagtgcctggggcctcaggttacctgatcctttatgctcctctaacagagggcctggctggggatgaaaaagagatgaaaattggagagacccacacagatattgaattgagtgggttgttgcccaatacagaatacacagtcacagtttatgccatgtttggagaagaggccagtgatcctgttacgggacaagaaacaacattggctttaagtccaccaagaaacctgagaatctccaatgttggctctaacagtgctcgattaacctgggacccaacttcaagacagatcaatggttatcgaattgtatataacaatgcagatgggactgaaatcaatgaggttgaagtcgatcctattactaccttccctctgaagggcttgacacctctcacagagtatactattgctattttctccatctatgatgaaggacagtcagagcctctgactggagtttttaccaccgaggaagttccagcccagcaatacttagaaattgatgaggtgacgacagacagttttagggtgacctggcatcccctctcagctgatgaagggctacacaaattgatgtggattccagtctatggggggaagactgaggaggttgtcctgaaagaagagcaggactcacatgttattgaaggcctggagcccggtacggagtatgaagtttcactattggccgtacttgatgatggaagcgagagtgaggtggtgactgctgtcgggaccacacttgacagtttttggacagaaccagctacaaccatagtgcctaccacatctgtgacttcagttttccagacgggaatcagaaacctagttgtaggtgatgaaactacttctagcctgcgggtaaaatgggacatttctgacagcgatgtgcagcagtttagggtgacctacatgacagctcaaggggaccctgaggaagaagtcataggaacggttatggtgcctggaagccagaacaacctccttctgaagcctctgcttcctgatactgaatacaaagtcacagtgactcccatctacacggatggcgaaggcgtcagcgtctccgctcctggaaaaaccttgctgaagagacctgtcacctctgaggaactccttactcccggggctccgtatgcaaggaagacattcacgattgttggtgacgcggttggctggggttttgtggtgcgaggaagtaagccatgccacatccaggctgtagaccccagtggccctgcagccgcagcaggaatgaaggtctgtcagtttgtcgtctctgtcaacgggctcaatgtcctgcatgtagactaccggaccgtgagcaatctgattctgacgggcccacggacgattgtcatggaagtcatggaggagttagagtgctgagctcctgggcctcccagccctccagtggcctgtgggtgagggaagccagaatgacacaaagcaatgcaaagacaagattgccatgcaaatggatggttttggacatacgagtcttctccgcacatacatgtctaaagttgagttttatacactgaatgtggaagaaccgggtatcatatcttttttaaaaaatgtcagtgtagaaaacatttgggaaaccattttcctacatgatagaactgccttactagatttctatttgtagctctcattcattgttttttatcttagtttgcagaaaggtgttgaaatgcttctctagcccaaacagcgacatgctaaagtccccttcttcagagtcaatagagtagttgttaaaggttttaaattgtactttctccaaaattagcatgcagctatttaatagggaatctagatttcaccaagattcaaatcaaagcaacatttaaaggaataagacctgttcactagcattttcaagggggttctaaagcattcaagtgcttaaaagccataaaaaatgacttcttaattcctgcctttagtgtcaacttttaagttaatacaggtttcaattgtggcattaggaaaaaaaaaaaccttgtgatgctatggttgggggtagttagggagagactacatgaaattgtgtgcccctattttctttctgatcctaaatcattttgttttataaatcagctatagcatctttctagaattaatcctgaatatgttgaatgttaaaatagagaagtttgtatatacacataattaaaaatcaacccttctggcaagatttcactttgaaggtgtctgtttttaagggaaggctaaaactttgctgatatgtgataaaacttgaactctaaattgcctccttagcctgaatttttactagctttctagtgtaacatattctaaggacatgacatgctgcttatttggggggattatttttcaccaaaatgatcatcttgtgttgtaacttttcagctcacttgtatatacgcacgttttcatttttggtctagaaaatagtgcattttggggctcagcgtgcagaggaaattcctcaaagtgccaaattaggcagtcaggaaatactaaattcttcattccaaataatggatctgaatgatgacgttaattttttatcatgcattaacaaaataaaatatgagaattgtaccaca

SEQ ID NO: 1267 - DNA, 3562 bp, Homo sapiens
aagtgaaatttgtctgtcaaactccagcaattgctgacattgtaatcctggtcgatggttcatggagtattggaagattcaacttcagactggttcggcatttcttggaaaacctggttacagcattcgatgtgggctcagagaagacacgaattggtcttgcacagtatagtggtgaccccagaatagaatggcacttgaatgcatttagcacaaaagatgaagtgattgaagctgtccgaaacctcccatataaaggaggaaatacactaacaggtcttgctttgaactacatttttgaaaatagcttcaaaccagaagcaggatcaaggactggagtatccaaaattggcattttaatcacagatggaaaatcccaagatgacattattccaccatctagaaatcttcgtgagtctggtgtagaactgtttgccataggggtgaaaaacgcggatgtgaatgagctgcaggagatcgcctctgaaccagacagcactcatgtgtacaatgttgccgaattcgatctgatgcacacagttgtggagagtctgaccaggactctctgctctagagtggaagaacaggacagagaaattaaagcctcagcccatgccatcactgggccgcctacggagttgattacttctgaagtcactgccagaagctttatggttaactggactcatgccccaggaaatgtggaaaaatacagagttgtgtattatcctaccaggggtggaaaaccagacgaggtggtggtagatggaactgtatcttccacagtgttgaaaaacttgatgtctttaactgaatatcagatagcagtctttgcaatctatgcccacactgctagtgaaggcctacggggaactgaaactacacttgctttaccgatggcttctgaccttctactgtacgacgtgactgagaacagcatgcgagtcaaatgggatgcagtgcctggggcctcaggttacctgatcctttatgctcctctaacagagggcctggctggggatgaaaaagagatgaaaattggagagacccacacagatattgaattgagtgggttgttgcccaatacagaatacacagtcacagtttatgccatgtttggagaagaggccagtgatcctgttacgggacaagaaacaacattggctttaagtccaccaagaaacctgagaatctccaatgttggctctaacagtgctcgattaacctgggacccaacttcaagacagatcaatggttatcgaattgtatataacaatgcagatgggactgaaatcaatgaggttgaagtcgatcctattactaccttccctctgaagggcttgacacctctcacagagtatactattgctattttctccatctatgatgaaggacagtcagagcctctgactggagtttttaccaccgaggaagttccagcccagcaatacttagaaattgatgaggtgacgacagacagttttagggtgacctggcatcccctctcagctgatgaagggctacacaaattgatgtggattccagtctatggggggaagactgaggaggttgtcctgaaagaagagcaggactcacatgttattgaaggcctggagcccggtacggagtatgaagtttcactattggccgtacttgatgatggaagcgagagtgaggtggtgactgctgtcgggaccacacttgacagtttttggacagaaccagctacaaccatagtgcctaccacatctgtgacttcagttttccagacgggaatcagaaacctagttgtaggtgatgaaactacttctagcctgcgggtaaaatgggacatttctgacagcgatgtgcagcagtttagggtgacctacatgacagctcaaggggaccctgaggaagaagtcataggaacggttatggtgcctggaagccagaacaacctccttctgaagcctctgcttcctgatactgaatacaaagtcacagtgactcccatctacacggatggcgaaggcgtcagcgtctccgctcctggaaaaaccttgctgaagagacctgtcacctctgaggaactccttactcccggggctccgtatgcaaggaagacattcacgattgttggtgacgcggttggctggggttttgtggtgcgaggaagtaagccatgccacatccaggctgtagaccccagtggccctgcagccgcagcaggaatgaaggtctgtcagtttgtcgtctctgtcaacgggctcaatgtcctgcatgtagactaccggaccgtgagcaatctgattctgacgggcccacggacgattgtcatggaagtcatggaggagttagagtgctgagctcctgggcctcccagccctccagtggcctgtgggtgagggaagccagaatgacacaaagcaatgcaaagacaagattgccatgcaaatggatggttttggacatacgagtcttctccgcacatacatgtctaaagttgagttttatacactgaatgtggaagaaccgggtatcatatcttttttaaaaaatgtcagtgtagaaaacatttgggaaaccattttcctacatgatagaactgccttactagatttctatttgtagctctcattcattgttttttatcttagtttgcagaaaggtgttgaaatgcttctctagcccaaacagcgacatgctaaagtccccttcttcagagtcaatagagtagttgttaaaggttttaaattgtactttctccaaaattagcatgcagctatttaatagggaatctagatttcaccaagattcaaatcaaagcaacatttaaaggaataagacctgttcactagcattttcaagggggttctaaagcattcaagtgcttaaaagccataaaaaatgacttcttaattcctgcctttagtgtcaacttttaagttaatacaggtttcaattgtggcattaggaaaaaaaaaaaccttgtgatgctatggttgggggtagttagggagagactacatgaaattgtgtgcccctattttctttctgatcctaaatcattttgttttataaatcagctatagcatctttctagaattaatcctgaatatgttgaatgttaaaatagagaagtttgtatatacacataattaaaaatcaacccttctggcaagatttcactttgaaggtgtctgtttttaagggaaggctaaaactttgctgatatgtgataaaacttgaactctaaattgcctccttagcctgaatttttactagctttctagtgtaacatattctaaggacatgacatgctgcttatttggggggattatttttcaccaaaatgatcatcttgtgttgtaacttttcagctcacttgtatatacgcacgttttcatttttggtctagaaaatagtgcattttggggctcagcgtgcagaggaaattcctcaaagtgccaaattaggcagtcaggaaatactaaattcttcattccaaataatggatctgaatgatgacgttaattttttatcatgcattaacaaaataaaatatgagaattgtaccaca

SEQ ID NO: 1268 - DNA, 3345 bp, Homo sapiens
atcctgggctcccagctggagaggcggaggcagctccagggggctggaagtggaagcgcagcggcagaaggagagggagagagaaagagagagaggctaattaaaaaaggatactccgagggaagagagcaagggcggtgcgccgccaaggaccaactagcggcggagcttcgatcttgcctaggcgcggagagctcccaacctgggctggaaccttgcccagcacaggtggctgctacaccccatgtaaaaagcggaaaataaaatgaagattttccagcgcaagatgcggtactggttgcttccaccttttttggcaattgtttatttctgcaccattgtccaaggtcaagtggctccacccacaaggttaagatataatgtaatatctcatgacagtatacagatttcatggaaggctccaagagggaaatttggtggttacaaacttcttgtgactccaacttcaggtggaaaaactaaccagctgaatctgcagaacactgcaactaaagcaattattcaaggccttatgccagaccagaattacacagttcaaattattgcatacaataaagataaagaaagcaagccagctcaaggccaattcagaattaaagatttagaaaaaagaaaggatccaaagcccagagtcaaagttgtggacagaggaaatgggagtagaccatcttcaccagaagaagtgaaatttgtctgtcaaactccagcaattgctgacattgtaatcctggtcgatggttcatggagtattggaagattcaacttcagactggttcggcatttcttggaaaacctggttacagcattcgatgtgggctcagagaagacacgaattggtcttgcacagtatagtggtgaccccagaatagaatggcacttgaatgcatttagcacaaaagatgaagtgattgaagctgtccgaaacctcccatataaaggaggaaatacactaacaggtcttgctttgaactacatttttgaaaatagcttcaaaccagaagcaggatcaaggactggagtatccaaaattggcattttaatcacagatggaaaatcccaagatgacattattccaccatctagaaatcttcgtgagtctggtgtagaactgtttgccataggggtgaaaaacgcggatgtgaatgagctgcaggagatcgcctctgaaccagacagcactcatgtgtacaatgttgccgaattcgatctgatgcacacagttgtggagagtctgaccaggactctctgctctagagtggaagaacaggacagagaaattaaagcctcagcccatgccatcactgggccgcctacggagttgattacttctgaagtcactgccagaagctttatggttaactggactcatgccccaggaaatgtggaaaaatacagagttgtgtattatcctaccaggggtggaaaaccagacgaggtggtggtagatggaactgtatcttccacagtgttgaaaaacttgatgtctttaactgaatatcagatagcagtctttgcaatctatgcccacactgctagtgaaggcctacggggaactgaaactacacttgctttaccgatggcttctgaccttctactgtacgacgtgactgagaacagcatgcgagtcaaatgggatgcagtgcctggggcctcaggttacctgatcctttatgctcctctaacagagggcctggctggggatgaaaaagagatgaaaattggagagacccacacagatattgaattgagtgggttgttgcccaatacagaatacacagtcacagtttatgccatgtttggagaagaggccagtgatcctgttacgggacaagaaacaacattggctttaagtccaccaagaaacctgagaatctccaatgttggctctaacagtgctcgattaacctgggacccaacttcaagacagatcaatggttatcgaattgtatataacaatgcagatgggactgaaatcaatgaggtctgtcagtttgtcgtctctgtcaacgggctcaatgtcctgcatgtagactaccggaccgtgagcaatctgattctgacgggcccacggacgattgtcatggaagtcatggaggagttagagtgctgagctcctgggcctcccagccctccagtggcctgtgggtgagggaagccagaatgacacaaagcaatgcaaagacaagattgccatgcaaatggatggttttggacatacgagtcttctccgcacatacatgtctaaagttgagttttatacactgaatgtggaagaaccgggtatcatatcttttttaaaaaatgtcagtgtagaaaacatttgggaaaccattttcctacatgatagaactgccttactagatttctatttgtagctctcattcattgttttttatcttagtttgcagaaaggtgttgaaatgcttctctagcccaaacagcgacatgctaaagtccccttcttcagagtcaatagagtagttgttaaaggttttaaattgtactttctccaaaattagcatgcagctatttaatagggaatctagatttcaccaagattcaaatcaaagcaacatttaaaggaataagacctgttcactagcattttcaagggggttctaaagcattcaagtgcttaaaagccataaaaaatgacttcttaattcctgcctttagtgtcaacttttaagttaatacaggtttcaattgtggcattaggaaaaaaaaaaaccttgtgatgctatggttgggggtagttagggagagactacatgaaattgtgtgcccctattttctttctgatcctaaatcattttgttttataaatcagctatagcatctttctagaattaatcctgaatatgttgaatgttaaaatagagaagtttgtatatacacataattaaaaatcaacccttctggcaagatttcactttgaaggtgtctgtttttaagggaaggctaaaactttgctgatatgtgataaaacttgaactctaaattgcctccttagcctgaatttttactagctttctagtgtaacatattctaaggacatgacatgctgcttatttggggggattatttttcaccaaaatgatcatcttgtgttgtaacttttcagctcacttgtatatacgcacgttttcatttttggtctagaaaatagtgcattttggggctcagcgtgcagaggaaattcctcaaagtgccaaattaggcagtcaggaaatactaaattcttcattccaaataatggatctgaatgatgacgttaattttttatcatgcattaacaaaataaaatatgagaattgtaccaca

SEQ ID NO: 1269 - DNA, 2310 bp, Homo sapiens
atcctgggctcccagctggagaggcggaggcagctccagggggctggaagtggaagcgcagcggcagaaggagagggagagagaaagagagagaggctaattaaaaaaggatactccgagggaagagagcaagggcggtgcgccgccaaggaccaactagcggcggagcttcgatcttgcctaggcgcggagagctcccaacctgggctggaaccttgcccagcacaggtggctgctacaccccatgtaaaaagcggaaaataaaatgaagattttccagcgcaagatgcggtactggttgcttccaccttttttggcaattgtttatttctgcaccattgtccaaggtcaagtggctccacccacaaggttaagatataatgtaatatctcatgacagtatacagatttcatggaaggctccaagagggaaatttggtggttacaaacttcttgtgactccaacttcagtgtccaacaagcacccatttgtggacagcaatcttctctaccagttcagaatgaacttccggcggaggcgaagactgatggagctgctcaatgaaaagtccccctcctcccaggaaactcatgacagtcccttctgcctgaggaagcagagccatgacaatcggaaatctaccagctttatgtcagtgagccccagcaaggagatcaagatcgtgtctgcagtgaggagaagcagcatgagcagctgtggcagcagcggctacttcagcagcagccccaccctcagcagcagcccccctgtgctctgcaaccccaagtccgtgctgaagagacctgtcacctctgaggaactccttactcccggggctccgtatgcaaggaagacattcacgattgttggtgacgcggttggctggggttttgtggtgcgaggaagtaagccatgccacatccaggctgtagaccccagtggccctgcagccgcagcaggaatgaaggtctgtcagtttgtcgtctctgtcaacgggctcaatgtcctgcatgtagactaccggaccgtgagcaatctgattctgacgggcccacggacgattgtcatggaagtcatggaggagttagagtgctgagctcctgggcctcccagccctccagtggcctgtgggtgagggaagccagaatgacacaaagcaatgcaaagacaagattgccatgcaaatggatggttttggacatacgagtcttctccgcacatacatgtctaaagttgagttttatacactgaatgtggaagaaccgggtatcatatcttttttaaaaaatgtcagtgtagaaaacatttgggaaaccattttcctacatgatagaactgccttactagatttctatttgtagctctcattcattgttttttatcttagtttgcagaaaggtgttgaaatgcttctctagcccaaacagcgacatgctaaagtccccttcttcagagtcaatagagtagttgttaaaggttttaaattgtactttctccaaaattagcatgcagctatttaatagggaatctagatttcaccaagattcaaatcaaagcaacatttaaaggaataagacctgttcactagcattttcaagggggttctaaagcattcaagtgcttaaaagccataaaaaatgacttcttaattcctgcctttagtgtcaacttttaagttaatacaggtttcaattgtggcattaggaaaaaaaaaaaccttgtgatgctatggttgggggtagttagggagagactacatgaaattgtgtgcccctattttctttctgatcctaaatcattttgttttataaatcagctatagcatctttctagaattaatcctgaatatgttgaatgttaaaatagagaagtttgtatatacacataattaaaaatcaacccttctggcaagatttcactttgaaggtgtctgtttttaagggaaggctaaaactttgctgatatgtgataaaacttgaactctaaattgcctccttagcctgaatttttactagctttctagtgtaacatattctaaggacatgacatgctgcttatttggggggattatttttcaccaaaatgatcatcttgtgttgtaacttttcagctcacttgtatatacgcacgttttcatttttggtctagaaaatagtgcattttggggctcagcgtgcagaggaaattcctcaaagtgccaaattaggcagtcaggaaatactaaattcttcattccaaataatggatctgaatgatgacgttaattttttatcatgcattaacaaaataaaatatgagaattgtaccaca

SEQ ID NO: 1270 - DNA, 2193 bp, Homo sapiens
atcctgggctcccagctggagaggcggaggcagctccagggggctggaagtggaagcgcagcggcagaaggagagggagagagaaagagagagaggctaattaaaaaaggatactccgagggaagagagcaagggcggtgcgccgccaaggaccaactagcggcggagcttcgatcttgcctaggcgcggagagctcccaacctgggctggaaccttgcccagcacaggtggctgctacaccccatgtaaaaagcggaaaataaaatgaagattttccagcgcaagatgcggtactggttgcttccaccttttttggcaattgtttatttctgcaccattgtccaaggtcaagtgtccaacaagcacccatttgtggacagcaatcttctctaccagttcagaatgaacttccggcggaggcgaagactgatggagctgctcaatgaaaagtccccctcctcccaggaaactcatgacagtcccttctgcctgaggaagcagagccatgacaatcggaaatctaccagctttatgtcagtgagccccagcaaggagatcaagatcgtgtctgcagtgaggagaagcagcatgagcagctgtggcagcagcggctacttcagcagcagccccaccctcagcagcagcccccctgtgctctgcaaccccaagtccgtgctgaagagacctgtcacctctgaggaactccttactcccggggctccgtatgcaaggaagacattcacgattgttggtgacgcggttggctggggttttgtggtgcgaggaagtaagccatgccacatccaggctgtagaccccagtggccctgcagccgcagcaggaatgaaggtctgtcagtttgtcgtctctgtcaacgggctcaatgtcctgcatgtagactaccggaccgtgagcaatctgattctgacgggcccacggacgattgtcatggaagtcatggaggagttagagtgctgagctcctgggcctcccagccctccagtggcctgtgggtgagggaagccagaatgacacaaagcaatgcaaagacaagattgccatgcaaatggatggttttggacatacgagtcttctccgcacatacatgtctaaagttgagttttatacactgaatgtggaagaaccgggtatcatatcttttttaaaaaatgtcagtgtagaaaacatttgggaaaccattttcctacatgatagaactgccttactagatttctatttgtagctctcattcattgttttttatcttagtttgcagaaaggtgttgaaatgcttctctagcccaaacagcgacatgctaaagtccccttcttcagagtcaatagagtagttgttaaaggttttaaattgtactttctccaaaattagcatgcagctatttaatagggaatctagatttcaccaagattcaaatcaaagcaacatttaaaggaataagacctgttcactagcattttcaagggggttctaaagcattcaagtgcttaaaagccataaaaaatgacttcttaattcctgcctttagtgtcaacttttaagttaatacaggtttcaattgtggcattaggaaaaaaaaaaaccttgtgatgctatggttgggggtagttagggagagactacatgaaattgtgtgcccctattttctttctgatcctaaatcattttgttttataaatcagctatagcatctttctagaattaatcctgaatatgttgaatgttaaaatagagaagtttgtatatacacataattaaaaatcaacccttctggcaagatttcactttgaaggtgtctgtttttaagggaaggctaaaactttgctgatatgtgataaaacttgaactctaaattgcctccttagcctgaatttttactagctttctagtgtaacatattctaaggacatgacatgctgcttatttggggggattatttttcaccaaaatgatcatcttgtgttgtaacttttcagctcacttgtatatacgcacgttttcatttttggtctagaaaatagtgcattttggggctcagcgtgcagaggaaattcctcaaagtgccaaattaggcagtcaggaaatactaaattcttcattccaaataatggatctgaatgatgacgttaattttttatcatgcattaacaaaataaaatatgagaattgtaccaca

SEQ ID NO: 1271 - DNA, 2982 bp, Homo sapiens
atcctgggctcccagctggagaggcggaggcagctccagggggctggaagtggaagcgcagcggcagaaggagagggagagagaaagagagagaggctaattaaaaaaggatactccgagggaagagagcaagggcggtgcgccgccaaggaccaactagcggcggagcttcgatcttgcctaggcgcggagagctcccaacctgggctggaaccttgcccagcacaggtggctgctacaccccatgtaaaaagcggaaaataaaatgaagattttccagcgcaagatgcggtactggttgcttccaccttttttggcaattgtttatttctgcaccattgtccaaggtcaagtggctccacccacaaggttaagatataatgtaatatctcatgacagtatacagatttcatggaaggctccaagagggaaatttggtggttacaaacttcttgtgactccaacttcaggtggaaaaactaaccagctgaatctgcagaacactgcaactaaagcaattattcaaggccttatgccagaccagaattacacagttcaaattattgcatacaataaagataaagaaagcaagccagctcaaggccaattcagaattaaagatttagaaaaaagaaaggatccaaagcccagagtcaaagttgtggacagaggaaatgggagtagaccatcttcaccagaagaagtgaaatttgtctgtcaaactccagcaattgctgacattgtaatcctggtcgatggttcatggagtattggaagattcaacttcagactggttcggcatttcttggaaaacctggttacagcattcgatgtgggctcagagaagacacgaattggtcttgcacagtatagtggtgaccccagaatagaatggcacttgaatgcatttagcacaaaagatgaagtgattgaagctgtccgaaacctcccatataaaggaggaaatacactaacaggtcttgctttgaactacatttttgaaaatagcttcaaaccagaagcaggatcaaggactggagtatccaaaattggcattttaatcacagatggaaaatcccaagatgacattattccaccatctagaaatcttcgtgagtctggtgtagaactgtttgccatagtgtccaacaagcacccatttgtggacagcaatcttctctaccagttcagaatgaacttccggcggaggcgaagactgatggagctgctcaatgaaaagtccccctcctcccaggaaactcatgacagtcccttctgcctgaggaagcagagccatgacaatcggaaatctaccagctttatgtcagtgagccccagcaaggagatcaagatcgtgtctgcagtgaggagaagcagcatgagcagctgtggcagcagcggctacttcagcagcagccccaccctcagcagcagcccccctgtgctctgcaaccccaagtccgtgctgaagagacctgtcacctctgaggaactccttactcccggggctccgtatgcaaggaagacattcacgattgttggtgacgcggttggctggggttttgtggtgcgaggaagtaagccatgccacatccaggctgtagaccccagtggccctgcagccgcagcaggaatgaaggtctgtcagtttgtcgtctctgtcaacgggctcaatgtcctgcatgtagactaccggaccgtgagcaatctgattctgacgggcccacggacgattgtcatggaagtcatggaggagttagagtgctgagctcctgggcctcccagccctccagtggcctgtgggtgagggaagccagaatgacacaaagcaatgcaaagacaagattgccatgcaaatggatggttttggacatacgagtcttctccgcacatacatgtctaaagttgagttttatacactgaatgtggaagaaccgggtatcatatcttttttaaaaaatgtcagtgtagaaaacatttgggaaaccattttcctacatgatagaactgccttactagatttctatttgtagctctcattcattgttttttatcttagtttgcagaaaggtgttgaaatgcttctctagcccaaacagcgacatgctaaagtccccttcttcagagtcaatagagtagttgttaaaggttttaaattgtactttctccaaaattagcatgcagctatttaatagggaatctagatttcaccaagattcaaatcaaagcaacatttaaaggaataagacctgttcactagcattttcaagggggttctaaagcattcaagtgcttaaaagccataaaaaatgacttcttaattcctgcctttagtgtcaacttttaagttaatacaggtttcaattgtggcattaggaaaaaaaaaaaccttgtgatgctatggttgggggtagttagggagagactacatgaaattgtgtgcccctattttctttctgatcctaaatcattttgttttataaatcagctatagcatctttctagaattaatcctgaatatgttgaatgttaaaatagagaagtttgtatatacacataattaaaaatcaacccttctggcaagatttcactttgaaggtgtctgtttttaagggaaggctaaaactttgctgatatgtgataaaacttgaactctaaattgcctccttagcctgaatttttactagctttctagtgtaacatattctaaggacatgacatgctgcttatttggggggattatttttcaccaaaatgatcatcttgtgttgtaacttttcagctcacttgtatatacgcacgttttcatttttggtctagaaaatagtgcattttggggctcagcgtgcagaggaaattcctcaaagtgccaaattaggcagtcaggaaatactaaattcttcattccaaataatggatctgaatgatgacgttaattttttatcatgcattaacaaaataaaatatgagaattgtaccaca

SEQ ID NO: 1272 - DNA, 2541 bp, Homo sapiens
atcctgggctcccagctggagaggcggaggcagctccagggggctggaagtggaagcgcagcggcagaaggagagggagagagaaagagagagaggctaattaaaaaaggatactccgagggaagagagcaagggcggtgcgccgccaaggaccaactagcggcggagcttcgatcttgcctaggcgcggagagctcccaacctgggctggaaccttgcccagcacaggtggctgctacaccccatgtaaaaagcggaaaataaaatgaagattttccagcgcaagatgcggtactggttgcttccaccttttttggcaattgtttatttctgcaccattgtccaaggtcaagtggctccacccacaaggttaagatataatgtaatatctcatgacagtatacagatttcatggaaggctccaagagggaaatttggtggttacaaacttcttgtgactccaacttcaggtggaaaaactaaccagctgaatctgcagaacactgcaactaaagcaattattcaaggccttatgccagaccagaattacacagttcaaattattgcatacaataaagataaagaaagcaagccagctcaaggccaattcagaattaaagatttagaaaaaagaaaggatccaaagcccagagtcaaagttgtggacagaggaaatgggagtagaccatcttcaccagaagtgtccaacaagcacccatttgtggacagcaatcttctctaccagttcagaatgaacttccggcggaggcgaagactgatggagctgctcaatgaaaagtccccctcctcccaggaaactcatgacagtcccttctgcctgaggaagcagagccatgacaatcggaaatctaccagctttatgtcagtgagccccagcaaggagatcaagatcgtgtctgcagtgaggagaagcagcatgagcagctgtggcagcagcggctacttcagcagcagccccaccctcagcagcagcccccctgtgctctgcaaccccaagtccgtgctgaagagacctgtcacctctgaggaactccttactcccggggctccgtatgcaaggaagacattcacgattgttggtgacgcggttggctggggttttgtggtgcgaggaagtaagccatgccacatccaggctgtagaccccagtggccctgcagccgcagcaggaatgaaggtctgtcagtttgtcgtctctgtcaacgggctcaatgtcctgcatgtagactaccggaccgtgagcaatctgattctgacgggcccacggacgattgtcatggaagtcatggaggagttagagtgctgagctcctgggcctcccagccctccagtggcctgtgggtgagggaagccagaatgacacaaagcaatgcaaagacaagattgccatgcaaatggatggttttggacatacgagtcttctccgcacatacatgtctaaagttgagttttatacactgaatgtggaagaaccgggtatcatatcttttttaaaaaatgtcagtgtagaaaacatttgggaaaccattttcctacatgatagaactgccttactagatttctatttgtagctctcattcattgttttttatcttagtttgcagaaaggtgttgaaatgcttctctagcccaaacagcgacatgctaaagtccccttcttcagagtcaatagagtagttgttaaaggttttaaattgtactttctccaaaattagcatgcagctatttaatagggaatctagatttcaccaagattcaaatcaaagcaacatttaaaggaataagacctgttcactagcattttcaagggggttctaaagcattcaagtgcttaaaagccataaaaaatgacttcttaattcctgcctttagtgtcaacttttaagttaatacaggtttcaattgtggcattaggaaaaaaaaaaaccttgtgatgctatggttgggggtagttagggagagactacatgaaattgtgtgcccctattttctttctgatcctaaatcattttgttttataaatcagctatagcatctttctagaattaatcctgaatatgttgaatgttaaaatagagaagtttgtatatacacataattaaaaatcaacccttctggcaagatttcactttgaaggtgtctgtttttaagggaaggctaaaactttgctgatatgtgataaaacttgaactctaaattgcctccttagcctgaatttttactagctttctagtgtaacatattctaaggacatgacatgctgcttatttggggggattatttttcaccaaaatgatcatcttgtgttgtaacttttcagctcacttgtatatacgcacgttttcatttttggtctagaaaatagtgcattttggggctcagcgtgcagaggaaattcctcaaagtgccaaattaggcagtcaggaaatactaaattcttcattccaaataatggatctgaatgatgacgttaattttttatcatgcattaacaaaataaaatatgagaattgtaccaca

SEQ ID NO: 1273 - DNA, 2359 bp, Homo sapiens
aagtgaaatttgtctgtcaaactccagcaattgctgacattgtaatcctggtcgatggttcatggagtattggaagattcaacttcagactggttcggcatttcttggaaaacctggttacagcattcgatgtgggctcagagaagacacgaattggggtgaaaaacgcggatgtgaatgagctgcaggagatcgcctctgaaccagacagcactcatgtgtacaatgttgccgaattcgatctgatgcacacagttgtggagagtctgaccaggactctctgctctagagtggaagaacaggacagagaaattaaagcctcagcccatgccatcactgggccgcctacggagttgattacttctgaagtcactgccagaagctttatggttaactggactcatgccccaggaaatgtggaaaaatacagagttgtgtattatcctaccaggggtggaaaaccagacgaggtggtggtagatggaactgtatcttccacagtgttgaaaaacttgatgtctttaactgaatatcagatagcagtctttgcaatctatgcccacactgctagtgaaggcctacggggaactgaaactacacttgctttaccgatggcttctgaccttctactgtacgacgtgactgagaacagcatgcgagtcaaatgggatgcagtgcctggggcctcaggttacctgatcctttatgctcctctaacagagggcctggctggggatgaaaaagagatgaaaattggagagacccacacagatattgaattgagtgggttgttgcccaatacagaatacacagtcacagtttatgccatgtttggagaagaggccagtgatcctgttacgggacaagaaacaacattggctttaagtccaccaagaaacctgagaatctccaatgttggctctaacagtgctcgattaacctgggacccaacttcaagacagatcaatggttatcgaattgtatataacaatgcagatgggactgaaatcaatgaggtctgtcagtttgtcgtctctgtcaacgggctcaatgtcctgcatgtagactaccggaccgtgagcaatctgattctgacgggcccacggacgattgtcatggaagtcatggaggagttagagtgctgagctcctgggcctcccagccctccagtggcctgtgggtgagggaagccagaatgacacaaagcaatgcaaagacaagattgccatgcaaatggatggttttggacatacgagtcttctccgcacatacatgtctaaagttgagttttatacactgaatgtggaagaaccgggtatcatatcttttttaaaaaatgtcagtgtagaaaacatttgggaaaccattttcctacatgatagaactgccttactagatttctatttgtagctctcattcattgttttttatcttagtttgcagaaaggtgttgaaatgcttctctagcccaaacagcgacatgctaaagtccccttcttcagagtcaatagagtagttgttaaaggttttaaattgtactttctccaaaattagcatgcagctatttaatagggaatctagatttcaccaagattcaaatcaaagcaacatttaaaggaataagacctgttcactagcattttcaagggggttctaaagcattcaagtgcttaaaagccataaaaaatgacttcttaattcctgcctttagtgtcaacttttaagttaatacaggtttcaattgtggcattaggaaaaaaaaaaaccttgtgatgctatggttgggggtagttagggagagactacatgaaattgtgtgcccctattttctttctgatcctaaatcattttgttttataaatcagctatagcatctttctagaattaatcctgaatatgttgaatgttaaaatagagaagtttgtatatacacataattaaaaatcaacccttctggcaagatttcactttgaaggtgtctgtttttaagggaaggctaaaactttgctgatatgtgataaaacttgaactctaaattgcctccttagcctgaatttttactagctttctagtgtaacatattctaaggacatgacatgctgcttatttggggggattatttttcaccaaaatgatcatcttgtgttgtaacttttcagctcacttgtatatacgcacgttttcatttttggtctagaaaatagtgcattttggggctcagcgtgcagaggaaattcctcaaagtgccaaattaggcagtcaggaaatactaaattcttcattccaaataatggatctgaatgatgacgttaattttttatcatgcattaacaaaataaaatatgagaattgtaccaca

SEQ ID NO: 1274 - DNA, 3256 bp, Homo sapiens
aagtgaaatttgtctgtcaaactccagcaattgctgacattgtaatcctggtcgatggttcatggagtattggaagattcaacttcagactggttcggcatttcttggaaaacctggttacagcattcgatgtgggctcagagaagacacgaattggtcttgcacagtatagtggtgaccccagaatagaatggcacttgaatgcatttagcacaaaagatgaagtgattgaagctgtccgaaacctcccatataaaggaggaaatacactaacaggtcttgctttgaactacatttttgaaaatagcttcaaaccagaagcaggatcaaggactggagtatccaaaattggcattttaatcacagatggaaaatcccaagatgacattattccaccatctagaaatcttcgtgagtctggtgtagaactgtttgccataggggtgaaaaacgcggatgtgaatgagctgcaggagatcgcctctgaaccagacagcactcatgtgtacaatgttgccgaattcgatctgatgcacacagttgtggagagtctgaccaggactctctgctctagagtggaagaacaggacagagaaattaaagcctcagcccatgccatcactgggccgcctacggagttgattacttctgaagtcactgccagaagctttatggttaactggactcatgccccaggaaatgtggaaaaatacagagttgtgtattatcctaccaggggtggaaaaccagacgaggtggtggtagatggaactgtatcttccacagtgttgaaaaacttgatgtctttaactgaatatcagatagcagtctttgcaatctatgcccacactgctagtgaaggcctacggggaactgaaactacacttgctttaccgatggcttctgaccttctactgtacgacgtgactgagaacagcatgcgagtcaaatgggatgcagtgcctggggcctcaggttacctgatcctttatgctcctctaacagagggcctggctggggatgaaaaagagatgaaaattggagagacccacacagatattgaattgagtgggttgttgcccaatacagaatacacagtcacagtttatgccatgtttggagaagaggccagtgatcctgttacgggacaagaaacaacattggctttaagtccaccaagaaacctgagaatctccaatgttggctctaacagtgctcgattaacctgggacccaacttcaagacagatcaatggttatcgaattgtatataacaatgcagatgggactgaaatcaatgaggttgaagtcgatcctattactaccttccctctgaagggcttgacacctctcacagagtatactattgctattttctccatctatgatgaaggacagtcagagcctctgactggagtttttaccaccgaggaagttccagcccagcaatacttagaaattgatgaggtgacgacagacagttttagggtgacctggcatcccctctcagctgatgaagggctacacaaattgatgtggattccagtctatggggggaagactgaggaggttgtcctgaaagaagagcaggactcacatgttattgaaggcctggagcccggtacggagtatgaagtttcactattggccgtacttgatgatggaagcgagagtgaggtggtgactgctgtcgggaccacacttgacagtttttggacagaaccagctacaaccatagtgcctaccacatctgtgacttcagttttccagacgggaatcagaaacctagttgtaggtgatgaaactacttctagcctgcgggtaaaatgggacatttctgacagcgatgtgcagcagtttagggtgacctacatgacagctcaaggggaccctgaggaagaagtcataggaacggtctgtcagtttgtcgtctctgtcaacgggctcaatgtcctgcatgtagactaccggaccgtgagcaatctgattctgacgggcccacggacgattgtcatggaagtcatggaggagttagagtgctgagctcctgggcctcccagccctccagtggcctgtgggtgagggaagccagaatgacacaaagcaatgcaaagacaagattgccatgcaaatggatggttttggacatacgagtcttctccgcacatacatgtctaaagttgagttttatacactgaatgtggaagaaccgggtatcatatcttttttaaaaaatgtcagtgtagaaaacatttgggaaaccattttcctacatgatagaactgccttactagatttctatttgtagctctcattcattgttttttatcttagtttgcagaaaggtgttgaaatgcttctctagcccaaacagcgacatgctaaagtccccttcttcagagtcaatagagtagttgttaaaggttttaaattgtactttctccaaaattagcatgcagctatttaatagggaatctagatttcaccaagattcaaatcaaagcaacatttaaaggaataagacctgttcactagcattttcaagggggttctaaagcattcaagtgcttaaaagccataaaaaatgacttcttaattcctgcctttagtgtcaacttttaagttaatacaggtttcaattgtggcattaggaaaaaaaaaaaccttgtgatgctatggttgggggtagttagggagagactacatgaaattgtgtgcccctattttctttctgatcctaaatcattttgttttataaatcagctatagcatctttctagaattaatcctgaatatgttgaatgttaaaatagagaagtttgtatatacacataattaaaaatcaacccttctggcaagatttcactttgaaggtgtctgtttttaagggaaggctaaaactttgctgatatgtgataaaacttgaactctaaattgcctccttagcctgaatttttactagctttctagtgtaacatattctaaggacatgacatgctgcttatttggggggattatttttcaccaaaatgatcatcttgtgttgtaacttttcagctcacttgtatatacgcacgttttcatttttggtctagaaaatagtgcattttggggctcagcgtgcagaggaaattcctcaaagtgccaaattaggcagtcaggaaatactaaattcttcattccaaataatggatctgaatgatgacgttaattttttatcatgcattaacaaaataaaatatgagaattgtaccaca

SEQ ID NO: 1275 - DNA, 3957 bp, Homo sapiens
atcctgggctcccagctggagaggcggaggcagctccagggggctggaagtggaagcgcagcggcagaaggagagggagagagaaagagagagaggctaattaaaaaaggatactccgagggaagagagcaagggcggtgcgccgccaaggaccaactagcggcggagcttcgatcttgcctaggcgcggagagctcccaacctgggctggaaccttgcccagcacaggtggctgctacaccccatgtaaaaagcggaaaataaaatgaagattttccagcgcaagatgcggtactggttgcttccaccttttttggcaattgtttatttctgcaccattgtccaaggtcaagtggctccacccacaaggttaagatataatgtaatatctcatgacagtatacagatttcatggaaggctccaagagggaaatttggtggttacaaacttcttgtgactccaacttcaggtggaaaaactaaccagctgaatctgcagaacactgcaactaaagcaattattcaaggccttatgccagaccagaattacacagttcaaattattgcatacaataaagataaagaaagcaagccagctcaaggccaattcagaattaaagatttagaaaaaagaaaggatccaaagcccagagtcaaagttgtggacagaggaaatgggagtagaccatcttcaccagaagaagtgaaatttgtctgtcaaactccagcaattgctgacattgtaatcctggtcgatggttcatggagtattggaagattcaacttcagactggttcggcatttcttggaaaacctggttacagcattcgatgtgggctcagagaagacacgaattggtcttgcacagtatagtggtgaccccagaatagaatggcacttgaatgcatttagcacaaaagatgaagtgattgaagctgtccgaaacctcccatataaaggaggaaatacactaacaggtcttgctttgaactacatttttgaaaatagcttcaaaccagaagcaggatcaaggactggagtatccaaaattggcattttaatcacagatggaaaatcccaagatgacattattccaccatctagaaatcttcgtgagtctggtgtagaactgtttgccataggggtgaaaaacgcggatgtgaatgagctgcaggagatcgcctctgaaccagacagcactcatgtgtacaatgttgccgaattcgatctgatgcacacagttgtggagagtctgaccaggactctctgctctagagtggaagaacaggacagagaaattaaagcctcagcccatgccatcactgggccgcctacggagttgattacttctgaagtcactgccagaagctttatggttaactggactcatgccccaggaaatgtggaaaaatacagagttgtgtattatcctaccaggggtggaaaaccagacgaggtggtggtagatggaactgtatcttccacagtgttgaaaaacttgatgtctttaactgaatatcagatagcagtctttgcaatctatgcccacactgctagtgaaggcctacggggaactgaaactacacttgctttaccgatggcttctgaccttctactgtacgacgtgactgagaacagcatgcgagtcaaatgggatgcagtgcctggggcctcaggttacctgatcctttatgctcctctaacagagggcctggctggggatgaaaaagagatgaaaattggagagacccacacagatattgaattgagtgggttgttgcccaatacagaatacacagtcacagtttatgccatgtttggagaagaggccagtgatcctgttacgggacaagaaacaacattggctttaagtccaccaagaaacctgagaatctccaatgttggctctaacagtgctcgattaacctgggacccaacttcaagacagatcaatggttatcgaattgtatataacaatgcagatgggactgaaatcaatgaggttgaagtcgatcctattactaccttccctctgaagggcttgacacctctcacagagtatactattgctattttctccatctatgatgaaggacagtcagagcctctgactggagtttttaccaccgaggaagttccagcccagcaatacttagaaattgatgaggtgacgacagacagttttagggtgacctggcatcccctctcagctgatgaagggctacacaaattgatgtggattccagtctatggggggaagactgaggaggttgtcctgaaagaagagcaggactcacatgttattgaaggcctggagcccggtacggagtatgaagtttcactattggccgtacttgatgatggaagcgagagtgaggtggtgactgctgtcgggaccacacttgacagtttttggacagaaccagctacaaccatagtgcctaccacatctgtgacttcagttttccagacgggaatcagaaacctagttgtaggtgatgaaactacttctagcctgcgggtaaaatgggacatttctgacagcgatgtgcagcagtttagggtgacctacatgacagctcaaggggaccctgaggaagaagtcataggaacggtctgtcagtttgtcgtctctgtcaacgggctcaatgtcctgcatgtagactaccggaccgtgagcaatctgattctgacgggcccacggacgattgtcatggaagtcatggaggagttagagtgctgagctcctgggcctcccagccctccagtggcctgtgggtgagggaagccagaatgacacaaagcaatgcaaagacaagattgccatgcaaatggatggttttggacatacgagtcttctccgcacatacatgtctaaagttgagttttatacactgaatgtggaagaaccgggtatcatatcttttttaaaaaatgtcagtgtagaaaacatttgggaaaccattttcctacatgatagaactgccttactagatttctatttgtagctctcattcattgttttttatcttagtttgcagaaaggtgttgaaatgcttctctagcccaaacagcgacatgctaaagtccccttcttcagagtcaatagagtagttgttaaaggttttaaattgtactttctccaaaattagcatgcagctatttaatagggaatctagatttcaccaagattcaaatcaaagcaacatttaaaggaataagacctgttcactagcattttcaagggggttctaaagcattcaagtgcttaaaagccataaaaaatgacttcttaattcctgcctttagtgtcaacttttaagttaatacaggtttcaattgtggcattaggaaaaaaaaaaaccttgtgatgctatggttgggggtagttagggagagactacatgaaattgtgtgcccctattttctttctgatcctaaatcattttgttttataaatcagctatagcatctttctagaattaatcctgaatatgttgaatgttaaaatagagaagtttgtatatacacataattaaaaatcaacccttctggcaagatttcactttgaaggtgtctgtttttaagggaaggctaaaactttgctgatatgtgataaaacttgaactctaaattgcctccttagcctgaatttttactagctttctagtgtaacatattctaaggacatgacatgctgcttatttggggggattatttttcaccaaaatgatcatcttgtgttgtaacttttcagctcacttgtatatacgcacgttttcatttttggtctagaaaatagtgcattttggggctcagcgtgcagaggaaattcctcaaagtgccaaattaggcagtcaggaaatactaaattcttcattccaaataatggatctgaatgatgacgttaattttttatcatgcattaacaaaataaaatatgagaattgtaccaca

SEQ ID NO: 1276 - DNA, 2058 bp, Homo sapiens
tgaactgaggcgaactccgccgccaagtgagtgaggaggaggaggaggagaaggaggaggaggaagaggaggagcgcagtcggagcgcggcggcagcggcagaggcgccgcggcggggaccagcccagagagaccccccgagcccgcggcacaggcggcggcggcgctgagcgggctcgaccagccgagcgagcggcggccccggctcctcctcgtccggcgccagcagcccgcgccccgcgcccgcactcggccagccgagacccgcctcccgcccgcccgccggcctcgtgagggacgcgccgagccgggcggccgagagcggcggcggctgggagcgcgtcgggcccgggcggaaagtgcctgcggggggcgggcgagcgcgcggtgccggccgccccggggctcggcgcgggagccagagcgggagccggcgcggagcgggacgccgggtcccgagcggcccgcggccggggctcgcccccgcccctccctcctctccggcggcggcggcggcggcggcgggcggagtgagctgcggagcctggaatatggtcggggaaatggaaacgaaggagaagccgaagcccaccccagattacctgatgcagctgatgaacgacaagaagctcatgagcagcctgcccaacttctgcgggatcttcaaccacctcgagcggctgctggacgaagaaattagcagagtacggaaagacatgtacaatgacacattaaatggcagtacagagaaaaggagtgcagaattgcctgatgctgtgggacctattgttcagttacaagagaaactttatgtgcctgtaaaagaatacccagattttaattttgttgggagaatccttggacctagaggacttacagccaaacaacttgaagcagaaaccggatgtaaaatcatggtccgaggcaaaggctcaatgagggataaaaaaaaggtagaaattgagaagctggattaccatcattatctgcctctgttttttgatgggctttgtgaaatgacatttccctatgagttttttgctcggcaaggaatccacgacatgctggaacacggtgggaacaagatcctacctgtccttccacagctcattatcccgataaaaaatgccttgaacctccgaaaccgacaggtcatctgtgtcactctcaaggtcctccagcatctggttgtgtcagctgagatggtgggcaaggccttggtgccttattaccgtcaaatcctccctgtcctgaacatctttaagaatatgaatgggtcttactctttgcccaggctggagtgcagtggcgcgatcatggctcgttgcaacctcgaccacctgggctcaagtgatcctcccacctcagcctctcaagtagctgagattatagtgaactccggagacggcattgactacagccagcagaagagggagaacattggggacttgatccaggagacactggaggccttcgagcgctacggaggagaaaatgcctttatcaacattaagtacgtggtcccaacctacgagtcttgcttgctaaactaacagtggcagcagctgggacttgaaacctcccgttggtgttgggatcatctgtctctgttgcttttagcatctcattccttgtgacttccacagctttcttttctacagctgctaaaatagtggcttatgggccattggactgttagccctattgagagcaaggctttccaatacataaatagtgtctgtttcttagattacaatagtgtactgtgcttatttgttctaagagaagaattgcttctttatacagctccgacagaagcaggagtccgagttaaaccttcagttgtatagacaataaactataattttcatatgcaattcagcaattgctgttctgtgtgtgcctgccctgggggtgatgtcagaggttgtaagggaagagtttatgctgactgcttactaggtgtttgtcatggaagagaagcatgggttcagcagtgcctctctagcagctgtgcggaataatgtgctttgacattcaataaaactgttgaatcta

SEQ ID NO: 1277 - DNA, 1359 bp, Homo sapiens
tgaactgaggcgaactccgccgccaagtgagtgaggaggaggaggaggagaaggaggaggaggaagaggaggagcgcagtcggagcgcggcggcagcggcagaggcgccgcggcggggaccagcccagagagaccccccgagcccgcggcacaggcggcggcggcgctgagcgggctcgaccagccgagcgagcggcggccccggctcctcctcgtccggcgccagcagcccgcgccccgcgcccgcactcggccagccgagacccgcctcccgcccgcccgccggcctcgtgagggacgcgccgagccgggcggccgagagcggcggcggctgggagcgcgtcgggcccgggcggaaagtgcctgcggggggcgggcgagcgcgcggtgccggccgccccggggctcggcgcgggagccagagcgggagccggcgcggagcgggacgccgggtcccgagcggcccgcggccggggctcgcccccgcccctccctcctctccggcggcggcggcggcggcggcgggcggagtgagctgcggagcctggaatatggtcggggaaatggaaacgaaggagaagccgaagcccaccccagattacctgatgcagctgatgaacgacaagaagctcatgagcagcctgcccaacttctgcgggatcttcaaccacctcgagcggctgctggacgaagtgaactccggagacggcattgactacagccagcagaagagggagaacattggggacttgatccaggagacactggaggccttcgagcgctacggaggagaaaatgcctttatcaacattaagtacgtggtcccaacctacgagtcttgcttgctaaactaacagtggcagcagctgggacttgaaacctcccgttggtgttgggatcatctgtctctgttgcttttagcatctcattccttgtgacttccacagctttcttttctacagctgctaaaatagtggcttatgggccattggactgttagccctattgagagcaaggctttccaatacataaatagtgtctgtttcttagattacaatagtgtactgtgcttatttgttctaagagaagaattgcttctttatacagctccgacagaagcaggagtccgagttaaaccttcagttgtatagacaataaactataattttcatatgcaattcagcaattgctgttctgtgtgtgcctgccctgggggtgatgtcagaggttgtaagggaagagtttatgctgactgcttactaggtgtttgtcatggaagagaagcatgggttcagcagtgcctctctagcagctgtgcggaataatgtgctttgacattcaataaaactgttgaatcta

SEQ ID NO: 1278 - DNA, 1941 bp, Homo sapiens
tgaactgaggcgaactccgccgccaagtgagtgaggaggaggaggaggagaaggaggaggaggaagaggaggagcgcagtcggagcgcggcggcagcggcagaggcgccgcggcggggaccagcccagagagaccccccgagcccgcggcacaggcggcggcggcgctgagcgggctcgaccagccgagcgagcggcggccccggctcctcctcgtccggcgccagcagcccgcgccccgcgcccgcactcggccagccgagacccgcctcccgcccgcccgccggcctcgtgagggacgcgccgagccgggcggccgagagcggcggcggctgggagcgcgtcgggcccgggcggaaagtgcctgcggggggcgggcgagcgcgcggtgccggccgccccggggctcggcgcgggagccagagcgggagccggcgcggagcgggacgccgggtcccgagcggcccgcggccggggctcgcccccgcccctccctcctctccggcggcggcggcggcggcggcgggcggagtgagctgcggagcctggaatatggtcggggaaatggaaacgaaggagaagccgaagcccaccccagattacctgatgcagctgatgaacgacaagaagctcatgagcagcctgcccaacttctgcgggatcttcaaccacctcgagcggctgctggacgaagaaattagcagagtacggaaagacatgtacaatgacacattaaatggcagtacagagaaaaggagtgcagaattgcctgatgctgtgggacctattgttcagttacaagagaaactttatgtgcctgtaaaagaatacccagattttaattttgttgggagaatccttggacctagaggacttacagccaaacaacttgaagcagaaaccggatgtaaaatcatggtccgaggcaaaggctcaatgagggataaaaaaaaggtagaaattgagaagctggattaccatcattatctgcctctgttttttgatgggctttgtgaaatgacatttccctatgagttttttgctcggcaaggaatccacgacatgctggaacacggtgggaacaagatcctacctgtccttccacagctcattatcccgataaaaaatgccttgaacctccgaaaccgacaggtcatctgtgtcactctcaaggtcctccagcatctggttgtgtcagctgagatggtgggcaaggccttggtgccttattaccgtcaaatcctccctgtcctgaacatctttaagaatatgaatgtgaactccggagacggcattgactacagccagcagaagagggagaacattggggacttgatccaggagacactggaggccttcgagcgctacggaggagaaaatgcctttatcaacattaagtacgtggtcccaacctacgagtcttgcttgctaaactaacagtggcagcagctgggacttgaaacctcccgttggtgttgggatcatctgtctctgttgcttttagcatctcattccttgtgacttccacagctttcttttctacagctgctaaaatagtggcttatgggccattggactgttagccctattgagagcaaggctttccaatacataaatagtgtctgtttcttagattacaatagtgtactgtgcttatttgttctaagagaagaattgcttctttatacagctccgacagaagcaggagtccgagttaaaccttcagttgtatagacaataaactataattttcatatgcaattcagcaattgctgttctgtgtgtgcctgccctgggggtgatgtcagaggttgtaagggaagagtttatgctgactgcttactaggtgtttgtcatggaagagaagcatgggttcagcagtgcctctctagcagctgtgcggaataatgtgctttgacattcaataaaactgttgaatcta

SEQ ID NO: 1279 - DNA, 1824 bp, Homo sapiens
tgaactgaggcgaactccgccgccaagtgagtgaggaggaggaggaggagaaggaggaggaggaagaggaggagcgcagtcggagcgcggcggcagcggcagaggcgccgcggcggggaccagcccagagagaccccccgagcccgcggcacaggcggcggcggcgctgagcgggctcgaccagccgagcgagcggcggccccggctcctcctcgtccggcgccagcagcccgcgccccgcgcccgcactcggccagccgagacccgcctcccgcccgcccgccggcctcgtgagggacgcgccgagccgggcggccgagagcggcggcggctgggagcgcgtcgggcccgggcggaaagtgcctgcggggggcgggcgagcgcgcggtgccggccgccccggggctcggcgcgggagccagagcgggagccggcgcggagcgggacgccgggtcccgagcggcccgcggccggggctcgcccccgcccctccctcctctccggcggcggcggcggcggcggcgggcggagtgagctgcggagcctggaatatggtcggggaaatggaaacgaaggagaagccgaagcccaccccagattacctgatgcagctgatgaacgacaagaagctcatgagcagcctgcccaacttctgcgggatcttcaaccacctcgagcggctgctggacgaagaaattagcagagtacggaaagacatgtacaatgacacattaaatggcagtacagagaaaaggagtgcagaattgcctgatgctgtgggacctattgttcagttacaagagaaactttatgtgcctgtaaaagaatacccagatgtagaaattgagaagctggattaccatcattatctgcctctgttttttgatgggctttgtgaaatgacatttccctatgagttttttgctcggcaaggaatccacgacatgctggaacacggtgggaacaagatcctacctgtccttccacagctcattatcccgataaaaaatgccttgaacctccgaaaccgacaggtcatctgtgtcactctcaaggtcctccagcatctggttgtgtcagctgagatggtgggcaaggccttggtgccttattaccgtcaaatcctccctgtcctgaacatctttaagaatatgaatgtgaactccggagacggcattgactacagccagcagaagagggagaacattggggacttgatccaggagacactggaggccttcgagcgctacggaggagaaaatgcctttatcaacattaagtacgtggtcccaacctacgagtcttgcttgctaaactaacagtggcagcagctgggacttgaaacctcccgttggtgttgggatcatctgtctctgttgcttttagcatctcattccttgtgacttccacagctttcttttctacagctgctaaaatagtggcttatgggccattggactgttagccctattgagagcaaggctttccaatacataaatagtgtctgtttcttagattacaatagtgtactgtgcttatttgttctaagagaagaattgcttctttatacagctccgacagaagcaggagtccgagttaaaccttcagttgtatagacaataaactataattttcatatgcaattcagcaattgctgttctgtgtgtgcctgccctgggggtgatgtcagaggttgtaagggaagagtttatgctgactgcttactaggtgtttgtcatggaagagaagcatgggttcagcagtgcctctctagcagctgtgcggaataatgtgctttgacattcaataaaactgttgaatcta

SEQ ID NO: 1280 - DNA, 2092 bp, Homo sapiens
gtgcggaggcggcccgaggcctagtgacaggcgcgcggcgcggaccccggaagcccacctgtcagagttaccggtcagccgggcgggcgccgccggggtctggggtggacgccgcgagcctgcacgttgcgccgggaccccggggctgtgcccagaaaaatcatttttcttctctgggaaggtgaacatttgtagcattgatttcccggatctggtaacatggcaaaagatgccggtctaattgaagccaacggagaactcaaggtcttcatagaccagaaccttagtcccgggaaaggcgtggtgtccctcgtggccgttcacccctccaccgtcaacccgctcgggaagcagctcttgccaaaaacctttggacagtccaatgtcaacattgcccagcaagtggtgtggaagatttccttacaagggccgtgttacatgacactgttaatgattgcatttggcttgctgtgggggcatctcttgcggatcaaacccacgcagagcgtcttcatttccacgtgtctgtccttgtcaagcacacccctcgtgtccaggttcctcatgggcagtgctcggggtgacaaagaaggcgacattgactacagcaccgtgctcctcggcatgctggtgacgcaggacgtgcagctcgggctcttcatggccgtcatgccgactctcatacaggcgggcgccagtgcatcttctagcattgtcgtggaagttctccgaatcctggttttgattggtcagattcttttttcactagcggcggtttttcttttatgtcttgttataaagaagtatctcattggaccctattatcggaagctgcacatggaaagcaaggggaacaaagaaatcctgatcttgggaatatctgcctttatcttcttaatgttaacggtcacggagctgctggacgtctccatggagctgggctgtttcctggctggagcgctcgtctcctctcagggccccgtggtcaccgaggagatcgccacctccatcgaacccatccgcgacttcctggccatcgttttcttcgcctccatagggctccacgtgttccccacgtttgtggcgtacgagctcacggtgctggtgttcctcaccttgtcagtggtggtgatgaagtttctcctggcggcgctggtcctgtctctcattctgccgaggagcagccagtacatcaagtggatcgtctctgcggggcttgcccaggtcagcgagttttcctttgtcctggggagccgggcgcgaagagcgggcgtcatctctcgggaggtgtacctccttatactgagtgtgaccacgctcagcctcttgctcgccccggtgctgtggagagctgcaatcacgaggtgtgtgcccagaccggagagacggtccagcctctgatggctcggagatgatggaccgtggaagggaagcgtctgtggggagtgagcgcttagatggccagcagctgctccttctgggaagctcgcaccttggcaacagaacagccctctagcagagcgtcagtgcagtcgtgttatcccggcttttacagaatattcttgtcctattttagaattttccggagtagtttatttgcagtctgttgattatgtgcagtagacccgggacactgcgttttaccgatcaccttgaatgtggtgcctggatgtgccttttttttttttccctgaaattattattaattttctattgtgagttcatcagttcatagtttttttagtaaagaagcaaaattaaaaggcttttaaaaatgtacaacttcagaattataatctgttagtcaaatatttgttattaaacatttctgtaatatgaagttgtaatcctggccgtgagcttggaagcttacttttgattcttaaagcctatgttttctaaaatgagacaaatacggatgtctatttgccttttattgtaacttttaaatgaaataatttcatgtcaatttctattagatatatcacttaaaatatttggttttaaatcacaagaatatgtattctttaataaagataatttatgatcatggtataattaattgaaatttattaaaatctgtttttattaa

SEQ ID NO: 1281 - DNA, 1186 bp, Homo sapiens
gtgcggaggcggcccgaggcctagtgacaggcgcgcggcgcggaccccggaagcccacctgtcagagttaccggtcagccgggcgggcgccgccggggtctggggtggacgccgcgagcctgcacgttgcgccgggaccccggggctgtgcccagaaaaatcatttttcttctctgggaaggtgaacatttgtagcattgatttcccggatctggtaacatggcaaaagattttctcctggcggcgctggtcctgtctctcattctgccgaggagcagccagtacatcaagtggatcgtctctgcggggcttgcccaggtcagcgagttttcctttgtcctggggagccgggcgcgaagagcgggcgtcatctctcgggaggtgtacctccttatactgagtgtgaccacgctcagcctcttgctcgccccggtgctgtggagagctgcaatcacgaggtgtgtgcccagaccggagagacggtccagcctctgatggctcggagatgatggaccgtggaagggaagcgtctgtggggagtgagcgcttagatggccagcagctgctccttctgggaagctcgcaccttggcaacagaacagccctctagcagagcgtcagtgcagtcgtgttatcccggcttttacagaatattcttgtcctattttagaattttccggagtagtttatttgcagtctgttgattatgtgcagtagacccgggacactgcgttttaccgatcaccttgaatgtggtgcctggatgtgccttttttttttttccctgaaattattattaattttctattgtgagttcatcagttcatagtttttttagtaaagaagcaaaattaaaaggcttttaaaaatgtacaacttcagaattataatctgttagtcaaatatttgttattaaacatttctgtaatatgaagttgtaatcctggccgtgagcttggaagcttacttttgattcttaaagcctatgttttctaaaatgagacaaatacggatgtctatttgccttttattgtaacttttaaatgaaataatttcatgtcaatttctattagatatatcacttaaaatatttggttttaaatcacaagaatatgtattctttaataaagataatttatgatcatggtataattaattgaaatttattaaaatctgtttttattaa

SEQ ID NO: 1282 - DNA, 2924 bp, Homo sapiens
accgcgccgcgcgcacgtcacgccggcccgacgctcggccaggaaaaatcatttttcttctctgggaaggtgaacatttgtagcattgatttcccggatctggtaacatggcaaaagatctgaaaatgtgtgtctgacatgcaagctcagtggggcagagacccgtggattgctgtgccctgccctccggacctggatcatgaaggtgttgggaagaagcttcttctgggtgctgtttcccgtccttccctgggcggtgcaggctgtggagcacgaggaggtggcgcagcgtgtgatcaaactgcaccgcgggcgaggggtggctgccatgcagagccggcagtgggtccgggacagctgcaggaagctctcagggcttctccgccagaagaatgcagttctgaacaaactgaaaactgcaattggagcagtggagaaagacgtgggcctgtcggatgaagagaaactgtttcaggtgcacacgtttgaaattttccagaaagagctgaatgaaagtgaaaattccgttttccaagctgtctacggactgcagagagccctgcagggggattacaaagatgtcgtgaacatgaaggagagcagccggcagcgcctggaggccctgagagaggctgcaataaaggaagaaacagaatatatggaacttctggcagcagaaaaacatcaagttgaagcccttaaaaatatgcaacatcaaaaccaaagtttatccatgcttgacgagattcttgaagatgtaagaaaggcagcggatcgtctggaggaagagatagaggaacatgcttttgacgacaataaatcagtcaagggggtcaattttgaggcagttctgagggtggaggaagaagaggccaattctaagcaaaatataacaaaacgagaagtggaggatgacttgggtcttagcatgctgattgactcccagaacaaccagtatattttgaccaagcccagagattcaaccatcccacgtgcagatcaccactttataaaggacattgttaccataggaatgctgtccttgccttgtggctggctatgtacagccataggattgcctacaatgtttggttatattatttgtggtgtacttctgggaccttcaggactaaatagtattaagtctattgtgcaagtggagacattaggagaatttggggtgttttttactctttttcttgttggcttagaattttctccagaaaagctaagaaaggtgtggaagatttccttacaagggccgtgttacatgacactgttaatgattgcatttggcttgctgtgggggcatctcttgcggatcaaacccacgcagagcgtcttcatttccacgtgtctgtccttgtcaagcacacccctcgtgtccaggttcctcatgggcagtgctcggggtgacaaagaaggcgacattgactacagcaccgtgctcctcggcatgctggtgacgcaggacgtgcagctcgggctcttcatggccgtcatgccgactctcatacaggcgggcgccagtgcatcttctagcattgtcgtggaagttctccgaatcctggttttgattggtcagattcttttttcactagcggcggtttttcttttatgtcttgttataaagaagtatctcattggaccctattatcggaagctgcacatggaaagcaaggggaacaaagaaatcctgatcttgggaatatctgcctttatcttcttaatgttaacggtcacggagctgctggacgtctccatggagctgggctgtttcctggctggagcgctcgtctcctctcagggccccgtggtcaccgaggagatcgccacctccatcgaacccatccgcgacttcctggccatcgttttcttcgcctccatagggctccacgtgttccccacgtttgtggcgtacgagctcacggtgctggtgttcctcaccttgtcagtggtggtgatgaagtttctcctggcggcgctggtcctgtctctcattctgccgaggagcagccagtacatcaagtggatcgtctctgcggggcttgcccaggtcagcgagttttcctttgtcctggggagccgggcgcgaagagcgggcgtcatctctcgggaggtgtacctccttatactgagtgtgaccacgctcagcctcttgctcgccccggtgctgtggagagctgcaatcacgaggtgtgtgcccagaccggagagacggtccagcctctgatggctcggagatgatggaccgtggaagggaagcgtctgtggggagtgagcgcttagatggccagcagctgctccttctgggaagctcgcaccttggcaacagaacagccctctagcagagcgtcagtgcagtcgtgttatcccggcttttacagaatattcttgtcctattttagaattttccggagtagtttatttgcagtctgttgattatgtgcagtagacccgggacactgcgttttaccgatcaccttgaatgtggtgcctggatgtgccttttttttttttccctgaaattattattaattttctattgtgagttcatcagttcatagtttttttagtaaagaagcaaaattaaaaggcttttaaaaatgtacaacttcagaattataatctgttagtcaaatatttgttattaaacatttctgtaatatgaagttgtaatcctggccgtgagcttggaagcttacttttgattcttaaagcctatgttttctaaaatgagacaaatacggatgtctatttgccttttattgtaacttttaaatgaaataatttcatgtcaatttctattagatatatcacttaaaatatttggttttaaatcacaagaatatgtattctttaataaagataatttatgatcatggtataattaattgaaatttattaaaatctgtttttattaa

SEQ ID NO: 1283 - DNA, 723 bp, Homo sapiens
gtgcggaggcggcccgaggcctagtgacaggcgcgcggcgcggaccccggaagcccacctgtcagagttaccggtcagccgggcgggcgccgccggggtctggggtggacgccgcgagcctgcacgttgcgccgggaccccggggctgtgcccagaaaaatcatttttcttctctgggaaggtgaacatttgtagcattgatttcccggatctggtaacatggcaaaagatgccggtctaattgaagccaacggagaactcaaggtcttcatagaccagaaccttagtcccgggaaaggcgacattgactacagcaccgtgctcctcggcatgctggtgacgcaggacgtgcagctcgggctcttcatggccgtcatgccgactctcatacaggcgggcgccagtgcatcttctagcattgtcgtggaagttctccgaatcctggttttgattggtcagattcttttttcactagcggcggtttttcttttatgtcttgttataaagaagtatctcattggaccctattatcggaagctgcacatggaaagcaaggggaacaaagaaatcctgatcttgggaatatctgcctttatcttcttaatgttaacggtaattctcaaactatgtgttatttatgtaatctgatacataatctctttcactgaaatcttgtgatccattctttacctttccattttaataatggttaaaatatttgaa

SEQ ID NO: 1284 - DNA, 1591 bp, Homo sapiens
gtgcggaggcggcccgaggcctagtgacaggcgcgcggcgcggaccccggaagcccacctgtcagagttaccggtcagccgggcgggcgccgccggggtctggggtggacgccgcgagcctgcacgttgcgccgggaccccggggctgtgcccagaaaaatcatttttcttctctgggaaggtgaacatttgtagcattgatttcccggatctggtaacatggcaaaagatgccggtctaattgaagccaacggagaactcaaggtcttcatagaccagaaccttagtcccgggaaaggcgtggtgtccctcgtggccgttcacccctccaccgtcaacccgctcgggaagcagctcttgccaaaaacctttggacagtccaatgtcaacattgcccagcaagtggtcacggagctgctggacgtctccatggagctgggctgtttcctggctggagcgctcgtctcctctcagggccccgtggtcaccgaggagatcgccacctccatcgaacccatccgcgacttcctggccatcgttttcttcgcctccatagggctccacgtgttccccacgtttgtggcgtacgagctcacggtgctggtgttcctcaccttgtcagtggtggtgatgaagtttctcctggcggcgctggtcctgtctctcattctgccgaggagcagccagtacatcaagtggatcgtctctgcggggcttgcccaggtcagcgagttttcctttgtcctggggagccgggcgcgaagagcgggcgtcatctctcgggaggtgtacctccttatactgagtgtgaccacgctcagcctcttgctcgccccggtgctgtggagagctgcaatcacgaggtgtgtgcccagaccggagagacggtccagcctctgatggctcggagatgatggaccgtggaagggaagcgtctgtggggagtgagcgcttagatggccagcagctgctccttctgggaagctcgcaccttggcaacagaacagccctctagcagagcgtcagtgcagtcgtgttatcccggcttttacagaatattcttgtcctattttagaattttccggagtagtttatttgcagtctgttgattatgtgcagtagacccgggacactgcgttttaccgatcaccttgaatgtggtgcctggatgtgccttttttttttttccctgaaattattattaattttctattgtgagttcatcagttcatagtttttttagtaaagaagcaaaattaaaaggcttttaaaaatgtacaacttcagaattataatctgttagtcaaatatttgttattaaacatttctgtaatatgaagttgtaatcctggccgtgagcttggaagcttacttttgattcttaaagcctatgttttctaaaatgagacaaatacggatgtctatttgccttttattgtaacttttaaatgaaataatttcatgtcaatttctattagatatatcacttaaaatatttggttttaaatcacaagaatatgtattctttaataaagataatttatgatcatggtataattaattgaaatttattaaaatctgtttttattaa

SEQ ID NO: 1285 - DNA, 1798 bp, Homo sapiens
gtgcggaggcggcccgaggcctagtgacaggcgcgcggcgcggaccccggaagcccacctgtcagagttaccggtcagccgggcgggcgccgccggggtctggggtggacgccgcgagcctgcacgttgcgccgggaccccggggctgtgcccagaaaaatcatttttcttctctgggaaggtgaacatttgtagcattgatttcccggatctggtaacatggcaaaagatgccggtctaattgaagccaacggagaactcaaggtcttcatagaccagaaccttagtcccgggaaaggcgacattgactacagcaccgtgctcctcggcatgctggtgacgcaggacgtgcagctcgggctcttcatggccgtcatgccgactctcatacaggcgggcgccagtgcatcttctagcattgtcgtggaagttctccgaatcctggttttgattggtcagattcttttttcactagcggcggtttttcttttatgtcttgttataaagaagtatctcattggaccctattatcggaagctgcacatggaaagcaaggggaacaaagaaatcctgatcttgggaatatctgcctttatcttcttaatgttaacggtcacggagctgctggacgtctccatggagctgggctgtttcctggctggagcgctcgtctcctctcagggccccgtggtcaccgaggagatcgccacctccatcgaacccatccgcgacttcctggccatcgttttcttcgcctccatagggctccacgtgttccccacgtttgtggcgtacgagctcacggtgctggtgttcctcaccttgtcagtggtggtgatgaagtttctcctggcggcgctggtcctgtctctcattctgccgaggagcagccagtacatcaagtggatcgtctctgcggggcttgcccaggtcagcgagttttcctttgtcctggggagccgggcgcgaagagcgggcgtcatctctcgggaggtgtacctccttatactgagtgtgaccacgctcagcctcttgctcgccccggtgctgtggagagctgcaatcacgaggtgtgtgcccagaccggagagacggtccagcctctgatggctcggagatgatggaccgtggaagggaagcgtctgtggggagtgagcgcttagatggccagcagctgctccttctgggaagctcgcaccttggcaacagaacagccctctagcagagcgtcagtgcagtcgtgttatcccggcttttacagaatattcttgtcctattttagaattttccggagtagtttatttgcagtctgttgattatgtgcagtagacccgggacactgcgttttaccgatcaccttgaatgtggtgcctggatgtgccttttttttttttccctgaaattattattaattttctattgtgagttcatcagttcatagtttttttagtaaagaagcaaaattaaaaggcttttaaaaatgtacaacttcagaattataatctgttagtcaaatatttgttattaaacatttctgtaatatgaagttgtaatcctggccgtgagcttggaagcttacttttgattcttaaagcctatgttttctaaaatgagacaaatacggatgtctatttgccttttattgtaacttttaaatgaaataatttcatgtcaatttctattagatatatcacttaaaatatttggttttaaatcacaagaatatgtattctttaataaagataatttatgatcatggtataattaattgaaatttattaaaatctgtttttattaa

SEQ ID NO: 1286 - DNA, 1017 bp, Homo sapiens
gtgcggaggcggcccgaggcctagtgacaggcgcgcggcgcggaccccggaagcccacctgtcagagttaccggtcagccgggcgggcgccgccggggtctggggtggacgccgcgagcctgcacgttgcgccgggaccccggggctgtgcccagaaaaatcatttttcttctctgggaaggtgaacatttgtagcattgatttcccggatctggtaacatggcaaaagatgccggtctaattgaagccaacggagaactcaaggtcttcatagaccagaaccttagtcccgggaaaggcgtggtgtccctcgtggccgttcacccctccaccgtcaacccgctcgggaagcagctcttgccaaaaacctttggacagtccaatgtcaacattgcccagcaagtggtgtggaagatttccttacaagggccgtgttacatgacactgttaatgattgcatttggcttgctgtgggggcatctcttgcggatcaaacccacgcagagcgtcttcatttccacgtgtctgtccttgtcaagcacacccctcgtgtccaggttcctcatgggcagtgctcggggtgacaaagaaggcgacattgactacagcaccgtgctcctcggcatgctggtgacgcaggacgtgcagctcgggctcttcatggccgtcatgccgactctcatacaggcgggcgccagtgcatcttctagcattgtcgtggaagttctccgaatcctggttttgattggtcagattcttttttcactagcggcggtttttcttttatgtcttgttataaagaagtatctcattggaccctattatcggaagctgcacatggaaagcaaggggaacaaagaaatcctgatcttgggaatatctgcctttatcttcttaatgttaacggtaattctcaaactatgtgttatttatgtaatctgatacataatctctttcactgaaatcttgtgatccattctttacctttccattttaataatggttaaaatatttgaa

SEQ ID NO: 1287 - DNA, 1360 bp, Homo sapiens
gtgcggaggcggcccgaggcctagtgacaggcgcgcggcgcggaccccggaagcccacctgtcagagttaccggtcagccgggcgggcgccgccggggtctggggtggacgccgcgagcctgcacgttgcgccgggaccccggggctgtgcccagaaaaatcatttttcttctctgggaaggtgaacatttgtagcattgatttcccggatctggtaacatggcaaaagatgccggtctaattgaagccaacggagaactcaaggtcttcatagaccagaaccttagtcccgggaaaggcgtggtgtccctcgtggccgttcacccctccaccgtcaacccgctcgggaagcagctcttgccaaaaacctttggacagtccaatgtcaacattgcccagcaagtgtttctcctggcggcgctggtcctgtctctcattctgccgaggagcagccagtacatcaagtggatcgtctctgcggggcttgcccaggtcagcgagttttcctttgtcctggggagccgggcgcgaagagcgggcgtcatctctcgggaggtgtacctccttatactgagtgtgaccacgctcagcctcttgctcgccccggtgctgtggagagctgcaatcacgaggtgtgtgcccagaccggagagacggtccagcctctgatggctcggagatgatggaccgtggaagggaagcgtctgtggggagtgagcgcttagatggccagcagctgctccttctgggaagctcgcaccttggcaacagaacagccctctagcagagcgtcagtgcagtcgtgttatcccggcttttacagaatattcttgtcctattttagaattttccggagtagtttatttgcagtctgttgattatgtgcagtagacccgggacactgcgttttaccgatcaccttgaatgtggtgcctggatgtgccttttttttttttccctgaaattattattaattttctattgtgagttcatcagttcatagtttttttagtaaagaagcaaaattaaaaggcttttaaaaatgtacaacttcagaattataatctgttagtcaaatatttgttattaaacatttctgtaatatgaagttgtaatcctggccgtgagcttggaagcttacttttgattcttaaagcctatgttttctaaaatgagacaaatacggatgtctatttgccttttattgtaacttttaaatgaaataatttcatgtcaatttctattagatatatcacttaaaatatttggttttaaatcacaagaatatgtattctttaataaagataatttatgatcatggtataattaattgaaatttattaaaatctgtttttattaa

SEQ ID NO: 1288 - DNA, 1849 bp, Homo sapiens
accgcgccgcgcgcacgtcacgccggcccgacgctcggccaggaaaaatcatttttcttctctgggaaggtgaacatttgtagcattgatttcccggatctggtaacatggcaaaagatctgaaaatgtgtgtctgacatgcaagctcagtggggcagagacccgtggattgctgtgccctgccctccggacctggatcatgaaggtgttgggaagaagcttcttctgggtgctgtttcccgtccttccctgggcggtgcaggctgtggagcacgaggaggtggcgcagcgtgtgatcaaactgcaccgcgggcgaggggtggctgccatgcagagccggcagtgggtccgggacagctgcaggaagctctcagggcttctccgccagaagaatgcagttctgaacaaactgaaaactgcaattggagcagtggagaaagacgtgggcctgtcggatgaagagaaactgtttcaggtgcacacgtttgaaattttccagaaagagctgaatgaaagtgaaaattccgttttccaagctgtctacggactgcagagagccctgcagggggattacaaagatgtcgtgaacatgaaggagagcagccggcagcgcctggaggccctgagagaggctgcaataaaggaagaaacagaatatatggaacttctggcagcagaaaaacatcaagttgaagcccttaaaaatatgcaacatcaaaaccaaagtttatccatgcttgacgagattcttgaagatgtaagaaaggcagcggatcgtctggaggaagagatagaggaacatgcttttgacgacaataaatcagtcaagggggtcaattttgaggcagttctgagggtggaggaagaagaggccaattctaagcaaaatataacaaaacgagaagtggaggatgacttgggtcttagcatgctgattgactcccagaacaaccagtatattttgaccaagcccagagattcaaccatcccacgtgcagatcaccactttataaaggacattgttaccataggaatgctgtccttgccttgtggctggctatgtacagccataggattgcctacaatgtttggttatattatttgtggtgtacttctgggaccttcaggactaaatagtattaagtctattgtgcaagtggagacattaggagaatttggggtgttttttactctttttcttgttggcttagaattttctccagaaaagctaagaaaggtgtggaagatttccttacaagggccgtgttacatgacactgttaatgattgcatttggcttgctgtgggggcatctcttgcggatcaaacccacgcagagcgtcttcatttccacgtgtctgtccttgtcaagcacacccctcgtgtccaggttcctcatgggcagtgctcggggtgacaaagaaggcgacattgactacagcaccgtgctcctcggcatgctggtgacgcaggacgtgcagctcgggctcttcatggccgtcatgccgactctcatacaggcgggcgccagtgcatcttctagcattgtcgtggaagttctccgaatcctggttttgattggtcagattcttttttcactagcggcggtttttcttttatgtcttgttataaagaagtatctcattggaccctattatcggaagctgcacatggaaagcaaggggaacaaagaaatcctgatcttgggaatatctgcctttatcttcttaatgttaacggtaattctcaaactatgtgttatttatgtaatctgatacataatctctttcactgaaatcttgtgatccattctttacctttccattttaataatggttaaaatatttgaa

SEQ ID NO: 1289 - DNA, 600 bp, Homo sapiens
accgcgccgcgcgcacgtcacgccggcccgacgctcggccaggaaaaatcatttttcttctctgggaaggtgaacatttgtagcattgatttcccggatctggtaacatggcaaaagatgccggtctaattgaagccaacggagaactcaaggtcttcatagaccagaaccttagtcccgggaaaggcgtggtgtccctcgtggccgttcacccctccaccgtcaacccgctcgggaagcagctcttgccaaaaacctttggacagtccaatgtcaacattgcccagcaagtgcattgtcgtggaagttctccgaatcctggttttgattggtcagattcttttttcactagcggcggtttttcttttatgtcttgttataaagaagtatctcattggaccctattatcggaagctgcacatggaaagcaaggggaacaaagaaatcctgatcttgggaatatctgcctttatcttcttaatgttaacggtaattctcaaactatgtgttatttatgtaatctgatacataatctctttcactgaaatcttgtgatccattctttacctttccattttaataatggttaaaatatttgaa

SEQ ID NO: 1290 - DNA, 1333 bp, Homo sapiens
gtgcggaggcggcccgaggcctagtgacaggcgcgcggcgcggaccccggaagcccacctgtcagagttaccggtcagccgggcgggcgccgccggggtctggggtggacgccgcgagcctgcacgttgcgccgggaccccggggctgtgcccagaaaaatcatttttcttctctgggaaggtgaacatttgtagcattgatttcccggatctggtaacatggcaaaagatgccggtctaattgaagccaacggagaactcaaggtcttcatagaccagaaccttagtcccgggaaagggctccacgtgttccccacgtttgtggcgtacgagctcacggtgctggtgttcctcaccttgtcagtggtggtgatgaagtttctcctggcggcgctggtcctgtctctcattctgccgaggagcagccagtacatcaagtggatcgtctctgcggggcttgcccaggtcagcgagttttcctttgtcctggggagccgggcgcgaagagcgggcgtcatctctcgggaggtgtacctccttatactgagtgtgaccacgctcagcctcttgctcgccccggtgctgtggagagctgcaatcacgaggtgtgtgcccagaccggagagacggtccagcctctgatggctcggagatgatggaccgtggaagggaagcgtctgtggggagtgagcgcttagatggccagcagctgctccttctgggaagctcgcaccttggcaacagaacagccctctagcagagcgtcagtgcagtcgtgttatcccggcttttacagaatattcttgtcctattttagaattttccggagtagtttatttgcagtctgttgattatgtgcagtagacccgggacactgcgttttaccgatcaccttgaatgtggtgcctggatgtgccttttttttttttccctgaaattattattaattttctattgtgagttcatcagttcatagtttttttagtaaagaagcaaaattaaaaggcttttaaaaatgtacaacttcagaattataatctgttagtcaaatatttgttattaaacatttctgtaatatgaagttgtaatcctggccgtgagcttggaagcttacttttgattcttaaagcctatgttttctaaaatgagacaaatacggatgtctatttgccttttattgtaacttttaaatgaaataatttcatgtcaatttctattagatatatcacttaaaatatttggttttaaatcacaagaatatgtattctttaataaagataatttatgatcatggtataattaattgaaatttattaaaatctgtttttattaa

SEQ ID NO: 1291 - DNA, 991 bp, Homo sapiens
ggtttccaggaagtgacgtcaggcggccgcggagatggaggatttgctcgacttggacgaggagcttcgctacagcttggctacctccagggccaagatgggtcgccgagctcaacaggagtcagcgcaggccgagaatcacctcaatggcaagaattcctctttgactctgactggagagacttcctctgctaaattacctcgctgccgacagggaggctgggcaggtgattccgtgaaggcttcgaaagggtcctccgcggaagggcagctgaatggactccagagcagccttaaccctgcagcctttgtgcccatcaccagctctacagatcctgctcacactaaaatatgaaccacaaacacacagagaaacaacctgttcaccactcctgggtgcatgattgagggtgaagcatccaccagcacttcaaggggtccatagtatttttttttttgctgcctcaaagtccccaaagccttcgagcagaagtggcagtagatggttgccaatcagccaatgcagactttcactgggacaacaagaaagcagatcttctgggttttgatggaacttggcagtggggacattcagctgatgcattatataccccgtcagagcacacttgtatcttttaccttccctttgccccatgcccccaaactgcttaggtcttctctgtccctttactgctgctgcacagagatgatataaaagaggctctttggctatttgcattttgcttcctcttcttttccagattacagtatgaagctttattttctttgtacaagcttaaaatttcaacatcatcatccgccaaagttgttcctcccttttcggaggatctagggggaaagaggagcattcatcacaagtttcctagagagaggagacaaatcggtgtgccattgacaacatgagccagggtaaaggcaccctttggaattactgatttcaaagattaataaagtaattctatttttattt

SEQ ID NO: 1292 - DNA, 1358 bp, Homo sapiens
ggtttccaggaagtgacgtcaggcggccgcggagatggaggatttgctcgacttggacgaggagcttcgctacagcttggctacctccagggccaagatgggtcgccgagctcaacaggagtcagcgcaggccgagaatcacctcaatggcaagaattcctctttgactctgactggagaggtaacaaacctgaatttggcaactggcatcataaacagaagcagtgcttcagctcccccaaccctccgacccatcatcagtcctagtggcccgacatggtctacacagtcagacccccaagctcccgagaatcactccagctctcctggaagcaggagcctgcagacagggggatttgcctgggaaggagaagtagaaaacaacgtgtacagccaggctacaggggtggtcccccagcacaagtatcaccccacagcaggcagctatcagcttcaatttgccctgcagcaacttgaacaacaaaaacttcagtcccggcagctcctggaccagagtcgagcccggcaccaggcaatctttggcagccagacactacctaactccaatttatggacaatgaataatggtgcaggttgtagaatttccagtgccacagctagtggccagaagccaaccactctgccacaaaaagtggtaccacctccaagttcttgcgcctccctggttcccaaacccccacccaaccacgaacaagtgctcagaagggcaacatcccagaaagcttccaatacccgcttcagatcctcctttcaaaactatttgtggtatttcttccaagcagtcagctgaactgaggacgacagcctacaaacaactacatgcatctgaactgtctcttgtaaatgagcttttttcagagccagaatcatactctccaggaaatatggagaaagaaacctgaggagattgaagtttgccaggcacaagggcaaaactcagactgaatgaatttgaaagggtggggccaaagatgttgtaacctgggagacttctctgaagaaagaaaactgtttaagaaacacagactgaactgcagtacttttccttaaatagctgagatgaccttctttaccctgggcttaggtgattctcatcagggtgacctgagtggaagttggtggtaacgactgttctgtgtcagcacccaggacagtggtgtctgttaaggctgccagggattagcagggaggaaagccatcaggactgggtagcctggtagcaccaaatcccaattaatgttacctgaacatgtggtgaggtcagccgtatgatgaaagatgtttaagagattaatgtcagaagaatatgaaaataaacaccggcttaaaaaatgtta

SEQ ID NO: 1293 - DNA, 1492 bp, Homo sapiens
ggtttccaggaagtgacgtcaggcggccgcggagatggaggatttgctcgacttggacgaggagcttcgctacagcttggctacctccagggccaagatgggtcgccgagctcaacaggagtcagcgcaggccgagaatcacctcaatggcaagaattcctctttgactctgactggagaggtaacaaacctgaatttggcaactggcatcataaacagaagcagtgcttcagctcccccaaccctccgacccatcatcagtcctagtggcccgacatggtctacacagtcagacccccaagctcccgagaatcactccagctctcctggaagcaggagcctgcagacagggggatttgcctgggaaggagaagtagaaaacaacgtgtacagccaggctacaggggtggtcccccagcacaagtatcaccccacagcaggcagctatcagcttcaatttgccctgcagcaacttgaacaacaaaaacttcagtcccggcagctcctggaccagagtcgagcccggcaccaggcaatctttggcagccagacactacctaactccaatttatggacaatgaataatggtgcaggttgtagaatttccagtgccacagctagtggccagaagccaaccactctgccacaaaaagtggtaccacctccaagttcttgcgcctccctggttcccaaacccccacccaaccacgaacaagtgctcagaagggcaacatcccagaaagcttccaaagggtcctccgcggaagggcagctgaatggactccagagcagccttaaccctgcagcctttgtgcccatcaccagctctacagatcctgctcacactaaaatatgaaccacaaacacacagagaaacaacctgttcaccactcctgggtgcatgattgagggtgaagcatccaccagcacttcaaggggtccatagtatttttttttttgctgcctcaaagtccccaaagccttcgagcagaagtggcagtagatggttgccaatcagccaatgcagactttcactgggacaacaagaaagcagatcttctgggttttgatggaacttggcagtggggacattcagctgatgcattatataccccgtcagagcacacttgtatcttttaccttccctttgccccatgcccccaaactgcttaggtcttctctgtccctttactgctgctgcacagagatgatataaaagaggctctttggctatttgcattttgcttcctcttcttttccagattacagtatgaagctttattttctttgtacaagcttaaaatttcaacatcatcatccgccaaagttgttcctcccttttcggaggatctagggggaaagaggagcattcatcacaagtttcctagagagaggagacaaatcggtgtgccattgacaacatgagccagggtaaaggcaccctttggaattactgatttcaaagattaataaagtaattctatttttattt

SEQ ID NO: 1294 - DNA, 2485 bp, Homo sapiens
agattatagcccagcgtacgagaagcacgagtcctatagttggcgtaccctgaggcctgccagttcctgccttaatgcatatgtagtcgtaattgagttctgacacggccttggatgtttctgtcctaaatagctgacattgcatcttcaagactgtcattccagttggcttttgagtggatacgtgcagtgagatcattgacactggaaacactagttcccattttaattacttaaaacaccacgatgaaaagaaatacctgtgatttgctttctcggagcaaaagttggaatgagaccgtggagctttttcgtgctaagatgccgttacggaaacatcgctgtcgtttcaagagctatgagcattgtttcacagcggccgaagctgtggattggctgcatgagctgctgaggtgcagtcaaaacttcggccctgaagtgacccgcaaacaaacggtccagctgctaaaaaaattcctgaagaatcacgttattgaagacatcaagggaaaatggggtgaggaagattttgaagacaatcgtcacttatacagatttcctccttcttcacccctgaaaccatatccaaagaagcccccaaaccaaaaggatgttattaaatttccagaatggaatgatctcccaccaggcacttcacaagagaacatcccagtgaggccagttgtgatgaattctgagatgtggtacaagcgtcacagtattgcaattggagaggtgccagcttgccgtcttgtccaccgcagacagctgacagaggccaatgtagaagagatatggaagtctatgacattatcatacttacagaaaattcttggcctggattccttagaagaagttttagacgtcaaacttgtcaattcgaagttcatcatccataatgtatatagtgttagcaagcagggagttgttattcttgatgacaagtcaaaagaacttcctcattgggtgctgtcagctatgaagtgtttggcaaattggcccaactgttctgatttgaagcagcctatgtacttgggatttgaaaaagatgtctttaaaaccatagctgattactatggtcacttgaaagagcctctacttacatttcatctttttgatgcttttgtcagtgtactgggtttgttacagaaggagaaagtggcagttgaagcatttcagatttgctgccttctcctacctcctgaaaataggagaaagttacagctattgatgaggatgatggcaaggatttgcttaaacaaagagatgccacccctgtgtgatggctttggtacccgaacactgatggttcagacattttcccgttgcatcttgtgttccaaggatgaagtggacttggatgagttattagctgctagattggtaacgtttctgatggacaattaccaggaaattctgaaagtccctttggccttgcagacctctatagaggagcgtgtggctcatctacgaagagtccagtttcagaaatcctatcctgaagtctatcaagaacgatttcctacaccagaaagtgcagcacttctgtttcctgaaaaacccaaaccgaaaccacagctgctaatgtgggcactaaagaagcctttccaaccatttcaaagaactagaagttttcgaatgtaataatacttccacagcaacaggtgctagagaccactgttgttgttttgagtgaatggtggttaggagaaagactttggtggtggaagaaagaaaagcataaaacaaagactactgaaatatagataaagattgccttagtttttaaaaatgtttggccattagtatttttataaaactcaatgctagttttaaagtgtataaattggttaaaatttatgagtcaaatatatagtgataatgttaacatgtttgtaattgctacagaatttaagggtatttttatctctgtgctttctttttcatggtgtttattaaataattgtgtatatacatcctagctactgatatctttattatagccttaagacttaattttaagtcttaaaaatagcgtgtatacttgaataagaaagacactgggtactgttactgtgatgctattgacttagtagccaattatcatttctcctgtataaattccagtttttattgctgcacataaattttttaatgtcttatattgtgatagctatgtcttttattgcagatttattggatgttatgacagattttactaaagctagtgtttttataacatatatattagttgatgtttacctataagtggagtagattttcatctgcctgcaatggtataatttcagtcttagctaaaaatggaaagttgaactggataaattctttgggtacccttagacctctgattctaagtcaaatgcaaatgggttaaataaaatgagactacttcctttataaatatattttcatccttttgaaagtaagtgaaatgtaaataaacttattttttttaaaaatgcca

SEQ ID NO: 1295 - DNA, 2671 bp, Homo sapiens
agattatagcccagcgtacgagaagcacgagtcctatagttggcgtaccctgaggcctgccagttcctgccttaatgcatatgtagtcgtaattgagttctgacacggccttggatgtttctgtcctaaatagctgacattgcatcttcaagactgtcattccagttggcttttgagtggatacgtgcagtgagatcattgacactggaaacactagttcccattttaattacttaaaacaccacgatgaaaagaaatacctgtgatttgctttctcggagcaaaagttggaatgagaccgtggagctttttcgtgctaagatgccgttacggaaacatcgctgtcgtttcaagagctatgagcattgtttcacagcggccgaagctgtggattggctgcatgagctgctgaggtgcagtcaaaacttcggccctgaagtgacccgcaaacaaacggtccagctgctaaaaaaattcctgaagaatcacgttattgaagacatcaagggaaaatggggtgaggaagattttgaagacaatcgtcacttatacagatttcctccttcttcacccctgaaaccatatccaaagaagcccccaaaccaaaaggatgttattaaatttccagaatggaatgatctcccaccaggcacttcacaagagaacatcccagtgaggccagttgtgatgaattctgagatgtggtacaagcgtcacagtattgcaattggagaggtgccagcttgccgtcttgtccaccgcagacagctgacagaggccaatgtagaagagatatggaagtctatgacattatcatacttacagaaaattcttggcctggattccttagaagaagttttagacgtcaaacttgtcaattcgaagttcatcatccataatgtatatagtgttagcaagcagggagttgttattcttgatgacaagtcaaaagaacttcctcattgggtgctgtcagctatgaagtgtttggcaaattggcccaactgttctgatttgaagcagcctatgtacttgggatttgaaaaagatgtctttaaaaccatagctgattactatggtcacttgaaagagcctctacttacatttcatctttttgatgcttttgtcagtgtactgggtttgttacagaaggagaaagtggcagttgaagcatttcagatttgctgccttctcctacctcctgaaaataggagaaagttacagctattgatgaggatgatggcaaggatttgcttaaacaaagagatgccacccctgtgtgatggctttggtacccgaacactgatggttcagacattttcccgttgcatcttgtgttccaaggatgaagtggacttggatgagttattagctgctagattggtaacgtttctgatggacaattaccaggaaattctgaaagtccctttggccttgcagacctctatagaggagcgtgtggctcatctacgaagagtccagataaaatacccaggagctgatatggatatcactttatctgctccatcattttgccgtcaaattagtccagaggaatttgaatatcaaagatcatatggctctcaggaacctctggcagccttgttggaggaagtcataacagatgccaaactctccaacaaagagaaaaagaagaaactgaagcagtttcagaaatcctatcctgaagtctatcaagaacgatttcctacaccagaaagtgcagcacttctgtttcctgaaaaacccaaaccgaaaccacagctgctaatgtgggcactaaagaagcctttccaaccatttcaaagaactagaagttttcgaatgtaataatacttccacagcaacaggtgctagagaccactgttgttgttttgagtgaatggtggttaggagaaagactttggtggtggaagaaagaaaagcataaaacaaagactactgaaatatagataaagattgccttagtttttaaaaatgtttggccattagtatttttataaaactcaatgctagttttaaagtgtataaattggttaaaatttatgagtcaaatatatagtgataatgttaacatgtttgtaattgctacagaatttaagggtatttttatctctgtgctttctttttcatggtgtttattaaataattgtgtatatacatcctagctactgatatctttattatagccttaagacttaattttaagtcttaaaaatagcgtgtatacttgaataagaaagacactgggtactgttactgtgatgctattgacttagtagccaattatcatttctcctgtataaattccagtttttattgctgcacataaattttttaatgtcttatattgtgatagctatgtcttttattgcagatttattggatgttatgacagattttactaaagctagtgtttttataacatatatattagttgatgtttacctataagtggagtagattttcatctgcctgcaatggtataatttcagtcttagctaaaaatggaaagttgaactggataaattctttgggtacccttagacctctgattctaagtcaaatgcaaatgggttaaataaaatgagactacttcctttataaatatattttcatccttttgaaagtaagtgaaatgtaaataaacttattttttttaaaaatgcca

SEQ ID NO: 1296 - DNA, 2686 bp, Homo sapiens
aaagagaggctttctgtgtcctgggaatgttctgctaagaagacagtgatgataatagttaccactgaataagtactgacatgtgaggaactaccaggatccctgctttacaggaagaagccgaggctcagaagtacacttgtctaaggtcccagaacaagtcattccagttggcttttgagtggatacgtgcagtgagatcattgacactggaaacactagttcccattttaattacttaaaacaccacgatgaaaagaaatacctgtgatttgctttctcggagcaaaagtgacaaaaagtaagagatgtggagaggaagacaggaatactagggaaaagtttctctttctccaatcactcactctggaggcagctagctgtcaactcacaaagacactcaagcagcctatggaagaaggccacatggtaaaatatggaggcctccagccaacagtcagcaaggaactgagacaagtcaacaaccattggaatgagaccgtggagctttttcgtgctaagatgccgttacggaaacatcgctgtcgtttcaagagctatgagcattgtttcacagcggccgaagctgtggattggctgcatgagctgctgaggtgcagtcaaaacttcggccctgaagtgacccgcaaacaaacggtccagctgctaaaaaaattcctgaagaatcacgttattgaagacatcaagggaaaatggggtgaggaagattttgaagacaatcgtcacttatacagatttcctccttcttcacccctgaaaccatatccaaagaagcccccaaaccaaaaggatgttattaaatttccagaatggaatgatctcccaccaggcacttcacaagagaacatcccagtgaggccagttgtgatgaattctgagatgtggtacaagcgtcacagtattgcaattggagaggtgccagcttgccgtcttgtccaccgcagacagctgacagaggccaatgtagaagagatatggaagtctatgacattatcatacttacagaaaattcttggcctggattccttagaagaagttttagacgtcaaacttgtcaattcgaagttcatcatccataatgtatatagtgttagcaagcagggagttgttattcttgatgacaagtcaaaagaacttcctcattgggtgctgtcagctatgaagtgtttggcaaattggcccaactgttctgatttgaagcagcctatgtacttgggatttgaaaaagatgtctttaaaaccatagctgattactatggtcacttgaaagagcctctacttacatttcatctttttgatgcttttgtcagtgtactgggtttgttacagaaggagaaagtggcagttgaagcatttcagatttgctgccttctcctacctcctgaaaataggagaaagttacagctattgatgaggatgatggcaaggatttgcttaaacaaagagatgccacccctgtgtgatggctttggtacccgaacactgatggttcagacattttcccgttgcatcttgtgttccaaggatgaagtggacttggatgagttattagctgctagattggtaacgtttctgatggacaattaccaggaaattctgaaagtccctttggccttgcagacctctatagaggagcgtgtggctcatctacgaagagtccagtttcagaaatcctatcctgaagtctatcaagaacgatttcctacaccagaaagtgcagcacttctgtttcctgaaaaacccaaaccgaaaccacagctgctaatgtgggcactaaagaagcctttccaaccatttcaaagaactagaagttttcgaatgtaataatacttccacagcaacaggtgctagagaccactgttgttgttttgagtgaatggtggttaggagaaagactttggtggtggaagaaagaaaagcataaaacaaagactactgaaatatagataaagattgccttagtttttaaaaatgtttggccattagtatttttataaaactcaatgctagttttaaagtgtataaattggttaaaatttatgagtcaaatatatagtgataatgttaacatgtttgtaattgctacagaatttaagggtatttttatctctgtgctttctttttcatggtgtttattaaataattgtgtatatacatcctagctactgatatctttattatagccttaagacttaattttaagtcttaaaaatagcgtgtatacttgaataagaaagacactgggtactgttactgtgatgctattgacttagtagccaattatcatttctcctgtataaattccagtttttattgctgcacataaattttttaatgtcttatattgtgatagctatgtcttttattgcagatttattggatgttatgacagattttactaaagctagtgtttttataacatatatattagttgatgtttacctataagtggagtagattttcatctgcctgcaatggtataatttcagtcttagctaaaaatggaaagttgaactggataaattctttgggtacccttagacctctgattctaagtcaaatgcaaatgggttaaataaaatgagactacttcctttataaatatattttcatccttttgaaagtaagtgaaatgtaaataaacttattttttttaaaaatgcca

SEQ ID NO: 1297 - DNA, 2872 bp, Homo sapiens
aaagagaggctttctgtgtcctgggaatgttctgctaagaagacagtgatgataatagttaccactgaataagtactgacatgtgaggaactaccaggatccctgctttacaggaagaagccgaggctcagaagtacacttgtctaaggtcccagaacaagtcattccagttggcttttgagtggatacgtgcagtgagatcattgacactggaaacactagttcccattttaattacttaaaacaccacgatgaaaagaaatacctgtgatttgctttctcggagcaaaagtgacaaaaagtaagagatgtggagaggaagacaggaatactagggaaaagtttctctttctccaatcactcactctggaggcagctagctgtcaactcacaaagacactcaagcagcctatggaagaaggccacatggtaaaatatggaggcctccagccaacagtcagcaaggaactgagacaagtcaacaaccattggaatgagaccgtggagctttttcgtgctaagatgccgttacggaaacatcgctgtcgtttcaagagctatgagcattgtttcacagcggccgaagctgtggattggctgcatgagctgctgaggtgcagtcaaaacttcggccctgaagtgacccgcaaacaaacggtccagctgctaaaaaaattcctgaagaatcacgttattgaagacatcaagggaaaatggggtgaggaagattttgaagacaatcgtcacttatacagatttcctccttcttcacccctgaaaccatatccaaagaagcccccaaaccaaaaggatgttattaaatttccagaatggaatgatctcccaccaggcacttcacaagagaacatcccagtgaggccagttgtgatgaattctgagatgtggtacaagcgtcacagtattgcaattggagaggtgccagcttgccgtcttgtccaccgcagacagctgacagaggccaatgtagaagagatatggaagtctatgacattatcatacttacagaaaattcttggcctggattccttagaagaagttttagacgtcaaacttgtcaattcgaagttcatcatccataatgtatatagtgttagcaagcagggagttgttattcttgatgacaagtcaaaagaacttcctcattgggtgctgtcagctatgaagtgtttggcaaattggcccaactgttctgatttgaagcagcctatgtacttgggatttgaaaaagatgtctttaaaaccatagctgattactatggtcacttgaaagagcctctacttacatttcatctttttgatgcttttgtcagtgtactgggtttgttacagaaggagaaagtggcagttgaagcatttcagatttgctgccttctcctacctcctgaaaataggagaaagttacagctattgatgaggatgatggcaaggatttgcttaaacaaagagatgccacccctgtgtgatggctttggtacccgaacactgatggttcagacattttcccgttgcatcttgtgttccaaggatgaagtggacttggatgagttattagctgctagattggtaacgtttctgatggacaattaccaggaaattctgaaagtccctttggccttgcagacctctatagaggagcgtgtggctcatctacgaagagtccagataaaatacccaggagctgatatggatatcactttatctgctccatcattttgccgtcaaattagtccagaggaatttgaatatcaaagatcatatggctctcaggaacctctggcagccttgttggaggaagtcataacagatgccaaactctccaacaaagagaaaaagaagaaactgaagcagtttcagaaatcctatcctgaagtctatcaagaacgatttcctacaccagaaagtgcagcacttctgtttcctgaaaaacccaaaccgaaaccacagctgctaatgtgggcactaaagaagcctttccaaccatttcaaagaactagaagttttcgaatgtaataatacttccacagcaacaggtgctagagaccactgttgttgttttgagtgaatggtggttaggagaaagactttggtggtggaagaaagaaaagcataaaacaaagactactgaaatatagataaagattgccttagtttttaaaaatgtttggccattagtatttttataaaactcaatgctagttttaaagtgtataaattggttaaaatttatgagtcaaatatatagtgataatgttaacatgtttgtaattgctacagaatttaagggtatttttatctctgtgctttctttttcatggtgtttattaaataattgtgtatatacatcctagctactgatatctttattatagccttaagacttaattttaagtcttaaaaatagcgtgtatacttgaataagaaagacactgggtactgttactgtgatgctattgacttagtagccaattatcatttctcctgtataaattccagtttttattgctgcacataaattttttaatgtcttatattgtgatagctatgtcttttattgcagatttattggatgttatgacagattttactaaagctagtgtttttataacatatatattagttgatgtttacctataagtggagtagattttcatctgcctgcaatggtataatttcagtcttagctaaaaatggaaagttgaactggataaattctttgggtacccttagacctctgattctaagtcaaatgcaaatgggttaaataaaatgagactacttcctttataaatatattttcatccttttgaaagtaagtgaaatgtaaataaacttattttttttaaaaatgcca

SEQ ID NO: 1298 - DNA, 2490 bp, Homo sapiens
aaagagaggctttctgtgtcctgggaatgttctgctaagaagacagtgatgataatagttaccactgaataagtactgacatgtgaggaactaccaggatccctgctttacaggaagaagccgaggctcagaagtacacttgtctaaggtcccagaacaagtcattccagttggcttttgagtggatacgtgcagtgagatcattgacactggaaacactagttcccattttaattacttaaaacaccacgatgaaaagaaatacctgtgatttgctttctcggagcaaaagttggaatgagaccgtggagctttttcgtgctaagatgccgttacggaaacatcgctgtcgtttcaagagctatgagcattgtttcacagcggccgaagctgtggattggctgcatgagctgctgaggtgcagtcaaaacttcggccctgaagtgacccgcaaacaaacggtccagctgctaaaaaaattcctgaagaatcacgttattgaagacatcaagggaaaatggggtgaggaagattttgaagacaatcgtcacttatacagatttcctccttcttcacccctgaaaccatatccaaagaagcccccaaaccaaaaggatgttattaaatttccagaatggaatgatctcccaccaggcacttcacaagagaacatcccagtgaggccagttgtgatgaattctgagatgtggtacaagcgtcacagtattgcaattggagaggtgccagcttgccgtcttgtccaccgcagacagctgacagaggccaatgtagaagagatatggaagtctatgacattatcatacttacagaaaattcttggcctggattccttagaagaagttttagacgtcaaacttgtcaattcgaagttcatcatccataatgtatatagtgttagcaagcagggagttgttattcttgatgacaagtcaaaagaacttcctcattgggtgctgtcagctatgaagtgtttggcaaattggcccaactgttctgatttgaagcagcctatgtacttgggatttgaaaaagatgtctttaaaaccatagctgattactatggtcacttgaaagagcctctacttacatttcatctttttgatgcttttgtcagtgtactgggtttgttacagaaggagaaagtggcagttgaagcatttcagatttgctgccttctcctacctcctgaaaataggagaaagttacagctattgatgaggatgatggcaaggatttgcttaaacaaagagatgccacccctgtgtgatggctttggtacccgaacactgatggttcagacattttcccgttgcatcttgtgttccaaggatgaagtggacttggatgagttattagctgctagattggtaacgtttctgatggacaattaccaggaaattctgaaagtccctttggccttgcagacctctatagaggagcgtgtggctcatctacgaagagtccagtttcagaaatcctatcctgaagtctatcaagaacgatttcctacaccagaaagtgcagcacttctgtttcctgaaaaacccaaaccgaaaccacagctgctaatgtgggcactaaagaagcctttccaaccatttcaaagaactagaagttttcgaatgtaataatacttccacagcaacaggtgctagagaccactgttgttgttttgagtgaatggtggttaggagaaagactttggtggtggaagaaagaaaagcataaaacaaagactactgaaatatagataaagattgccttagtttttaaaaatgtttggccattagtatttttataaaactcaatgctagttttaaagtgtataaattggttaaaatttatgagtcaaatatatagtgataatgttaacatgtttgtaattgctacagaatttaagggtatttttatctctgtgctttctttttcatggtgtttattaaataattgtgtatatacatcctagctactgatatctttattatagccttaagacttaattttaagtcttaaaaatagcgtgtatacttgaataagaaagacactgggtactgttactgtgatgctattgacttagtagccaattatcatttctcctgtataaattccagtttttattgctgcacataaattttttaatgtcttatattgtgatagctatgtcttttattgcagatttattggatgttatgacagattttactaaagctagtgtttttataacatatatattagttgatgtttacctataagtggagtagattttcatctgcctgcaatggtataatttcagtcttagctaaaaatggaaagttgaactggataaattctttgggtacccttagacctctgattctaagtcaaatgcaaatgggttaaataaaatgagactacttcctttataaatatattttcatccttttgaaagtaagtgaaatgtaaataaacttattttttttaaaaatgcca

SEQ ID NO: 1299 - DNA, 2025 bp, Homo sapiens
ccccacccccaggaccagcctgagtggctgcgctcaccacgacgaggaccgcggcgtgttcgccccccaacagacggagccagcggcgaaggcggcgtgcgcgcgcccgtgccgtggtgggcgtggccggggcggagacgcgaggaggggagcagagaacgcgctcgcgtagaggaattccgggtcctcctcctcgccctaccttggtttacctgcagccgcctagtcctcttctccttctctttgatgattcagggcctcggcttccctcacgggcataattggaatatcatttggagaaagtgtcatggaagttctgcgtccacagcttataagaattgatggccggaattacaggaagaatccagtccaagaacagacctatcaacatgaagaagatgaagaggacttctatcaaggctccatggagtgtgctgatgagccctgtgatgcctacgaggtggagcagaccccacaaggattccggtctactttgagggcccccagcttgctctataagcatatagttggaaagagaggggacactaggaagaaaatagaaatggagaccaaaacttctattagcattcctaaacctggacaagacggggaaattgtaatcactggccagcatcgaaatggtgtaatttcagcccgaacacggattgatgttcttttggacacttttcgaagaaagcagcccttcactcacttccttgcctttttcctcaatgaagttgaggttcaggaaggattcctgagattccaggaggaagtactggcgaagtgctccatgggtctgacatttcaggaggtggagaacttctttactttcctaaagaacattaatgatgtggacactgcattgagtttttaccatatggctggagcatctcttgataaagtgaccatgcagcaggtggccaggacagtggctaaagtggagctctcagaccacgtgtgtgatgtggtgtttgcactctttgactgtgatggcaatggcgaactgagcaataaggaatttgtttccatcatgaagcaacggctgatgagaggcctggaaaagcccaaagacatgggtttcactcgcctcatgcaggccatgtggaaatgtgcacaggaaactgcctgggacttcgctttacccaaacagtaaccccacactgcaagaggggacccctccacccccagtaccctggaccccctccgcagagtctcggcagagccctttgtgctgctgcttctggaagtagtcccccttcctcccgggatgacctcaggactctgtcggtttcccctctttacccttccccgtccccgtgttctgctgggctctgattctgcccaatgagtatccccataggttctcaaaaacatgaacaagtctgtaaagctcagacatttgtcagcctcaacagcaccacccattcaagcatcctgtggataaagaattcagggaaccatccacacacctgccaaccctgggaagcatccagttctcaaatcgtttttgctatggatttatactaacaagaacattccttgacttccctcctgctggtgttttaaagccacaagtagggaagatatctggcaggcagaaagaagtctgtgatgataaacaatgatgaggatgacctaggcaccctacgctagtgtgagaagcctgcgccccaggaaggatctgtgttagtccctgggatggctccaaggcctgctctaggaaggcagcatgctcagtgggaacacagcaagattcagaatttaaagtagttgcttcatggctctgtgcactcccttttcttcctcgcagcctccctaagatgactccagtgtgaccctgtgcttagtgagcaatagtgattgagctcatgttccctgcaagtgccatttcctctccaggatgggcctctaaagctgaggcctggctcagagcctgtttgccctctgtcttaaacaattgtaaatatcacttaaattataaccatttgcaataaacatccccaaagttccctgtctccttta

SEQ ID NO: 1300 - DNA, 2343 bp, Homo sapiens
agagaggggagcgctcagaacaccagcggctcccaagctaactcctagccacttttcccacccagctgggtccccaggaaactacgccatcggcgctgtcccactgcgcaggcgccagccctcggcccgcatgcgcactcggtcaaacccggcctggggaaatttcctatcgcacgtctgctgcagcagtctcctgtttctcctcctaccttctccatttttctagtccctgcagggcataattggaatatcatttggagaaagtgtcatggaagttctgcgtccacagcttataagaattgatggccggaattacaggaagaatccagtccaagaacagacctatcaacatgaagaagatgaagaggacttctatcaaggctccatggagtgtgctgatgagccctgtgatgcctacgaggtggagcagaccccacaaggattccggtctactttgagggcccccagcttgctctataatctcattcacttgaacacatcaaacgactgtgggttccagaagataactttggattgtcagaatatttatacttggaagtccaggcatatagttggaaagagaggggacactaggaagaaaatagaaatggagaccaaaacttctattagcattcctaaacctggacaagacggggaaattgtaatcactggccagcatcgaaatggtgtaatttcagcccgaacacggattgatgttcttttggacacttttcgaagaaagcagcccttcactcacttccttgcctttttcctcaatgaagttgaggttcaggaaggattcctgagattccaggaggaagtactggcgaagtgctccatggatcatggggttgacagcagcattttccagaatcctaaaaagcttcatctaactattgggatgttggtgcttttgagtgaggaagagatccagcagacatgtgagatgctacagcagtgtaaagaggaattcattaatgatatttctgggggtaaacccctagaagtggagatggcagggatagaatacatgaatgatgatcctggcatggtggatgttctttacgccaaagtccatatgaaagatggctccaacaggctacaagaattagttgatcgagtgctggaacgttttcaggcatctggactaatagtgaaagagtggaatagtgtgaaactgcatgctacagttatgaatacactattcaggaaagaccccaatgtgaccatgcagcaggtggccaggacagtggctaaagtggagctctcagaccacgtgtgtgatgtggtgtttgcactctttgactgtgatggcaatggcgaactgagcaataaggaatttgtttccatcatgaagcaacggctgatgagaggcctggaaaagcccaaagacatgggtttcactcgcctcatgcaggccatgtggaaatgtgcacaggaaactgcctgggacttcgctttacccaaacagtaaccccacactgcaagaggggacccctccacccccagtaccctggaccccctccgcagagtctcggcagagccctttgtgctgctgcttctggaagtagtcccccttcctcccgggatgacctcaggactctgtcggtttcccctctttacccttccccgtccccgtgttctgctgggctctgattctgcccaatgagtatccccataggttctcaaaaacatgaacaagtctgtaaagctcagacatttgtcagcctcaacagcaccacccattcaagcatcctgtggataaagaattcagggaaccatccacacacctgccaaccctgggaagcatccagttctcaaatcgtttttgctatggatttatactaacaagaacattccttgacttccctcctgctggtgttttaaagccacaagtagggaagatatctggcaggcagaaagaagtctgtgatgataaacaatgatgaggatgacctaggcaccctacgctagtgtgagaagcctgcgccccaggaaggatctgtgttagtccctgggatggctccaaggcctgctctaggaaggcagcatgctcagtgggaacacagcaagattcagaatttaaagtagttgcttcatggctctgtgcactcccttttcttcctcgcagcctccctaagatgactccagtgtgaccctgtgcttagtgagcaatagtgattgagctcatgttccctgcaagtgccatttcctctccaggatgggcctctaaagctgaggcctggctcagagcctgtttgccctctgtcttaaacaattgtaaatatcacttaaattataaccatttgcaataaacatccccaaagttccctgtctccttta

SEQ ID NO: 1301 - DNA, 1506 bp, Homo sapiens
gcatatagttggaaagagaggggacactaggaagaaaatagaaatggagaccaaaacttctattagcattcctaaacctggacaagacggggaaattgtaatcactggccagcatcgaaatggtgtaatttcagcccgaacacggattgatgttcttttggacacttttcgaagaaagcagcccttcactcacttccttgcctttttcctcaatgaagttgaggttcaggaaggattcctgagattccaggaggaagtactggcgaagtgctccatgggtctgacatttcaggaggtggagaacttctttactttcctaaagaacattaatgatgtggacactgcattgagtttttaccatatggctggagcatctcttgataaagtgaccatgcagcaggtggccaggacagtggctaaagtggagctctcagaccacgtgtgtgatgtggtgtttgcactctttgactgtgatggcaatggcgaactgagcaataaggaatttgtttccatcatgaagcaacggctgatgagaggcctggaaaagcccaaagacatgggtttcactcgcctcatgcaggccatgtggaaatgtgcacaggaaactgcctgggacttcgctttacccaaacagtaaccccacactgcaagaggggacccctccacccccagtaccctggaccccctccgcagagtctcggcagagccctttgtgctgctgcttctggaagtagtcccccttcctcccgggatgacctcaggactctgtcggtttcccctctttacccttccccgtccccgtgttctgctgggctctgattctgcccaatgagtatccccataggttctcaaaaacatgaacaagtctgtaaagctcagacatttgtcagcctcaacagcaccacccattcaagcatcctgtggataaagaattcagggaaccatccacacacctgccaaccctgggaagcatccagttctcaaatcgtttttgctatggatttatactaacaagaacattccttgacttccctcctgctggtgttttaaagccacaagtagggaagatatctggcaggcagaaagaagtctgtgatgataaacaatgatgaggatgacctaggcaccctacgctagtgtgagaagcctgcgccccaggaaggatctgtgttagtccctgggatggctccaaggcctgctctaggaaggcagcatgctcagtgggaacacagcaagattcagaatttaaagtagttgcttcatggctctgtgcactcccttttcttcctcgcagcctccctaagatgactccagtgtgaccctgtgcttagtgagcaatagtgattgagctcatgttccctgcaagtgccatttcctctccaggatgggcctctaaagctgaggcctggctcagagcctgtttgccctctgtcttaaacaattgtaaatatcacttaaattataaccatttgcaataaacatccccaaagttccctgtctccttta

SEQ ID NO: 1302 - DNA, 2070 bp, Homo sapiens
agagaggggagcgctcagaacaccagcggctcccaagctaactcctagccacttttcccacccagctgggtccccaggaaactacgccatcggcgctgtcccactgcgcaggcgccagccctcggcccgcatgcgcactcggtcaaacccggcctggggaaatttcctatcgcacgtctgctgcagcagtctcctgtttctcctcctaccttctccatttttctagtccctgcagggcataattggaatatcatttggagaaagtgtcatggaagttctgcgtccacagcttataagaattgatggccggaattacaggaagaatccagtccaagaacagacctatcaacatgaagaagatgaagaggacttctatcaaggctccatggagtgtgctgatgagccctgtgatgcctacgaggtggagcagaccccacaaggattccggtctactttgagggcccccagcttgctctataatctcattcacttgaacacatcaaacgactgtgggttccagaagataactttggattgtcagaatatttatacttggaagtccaggcatatagttggaaagagaggggacactaggaagaaaatagaaatggagaccaaaacttctattagcattcctaaacctggacaagacggggaaattgtaatcactggccagcatcgaaatggtgtaatttcagcccgaacacggattgatgttcttttggacacttttcgaagaaagcagcccttcactcacttccttgcctttttcctcaatgaagttgaggttcaggaaggattcctgagattccaggaggaagtactggcgaagtgctccatgggtctgacatttcaggaggtggagaacttctttactttcctaaagaacattaatgatgtggacactgcattgagtttttaccatatggctggagcatctcttgataaagtgaccatgcagcaggtggccaggacagtggctaaagtggagctctcagaccacgtgtgtgatgtggtgtttgcactctttgactgtgatggcaatggcgaactgagcaataaggaatttgtttccatcatgaagcaacggctgatgagaggcctggaaaagcccaaagacatgggtttcactcgcctcatgcaggccatgtggaaatgtgcacaggaaactgcctgggacttcgctttacccaaacagtaaccccacactgcaagaggggacccctccacccccagtaccctggaccccctccgcagagtctcggcagagccctttgtgctgctgcttctggaagtagtcccccttcctcccgggatgacctcaggactctgtcggtttcccctctttacccttccccgtccccgtgttctgctgggctctgattctgcccaatgagtatccccataggttctcaaaaacatgaacaagtctgtaaagctcagacatttgtcagcctcaacagcaccacccattcaagcatcctgtggataaagaattcagggaaccatccacacacctgccaaccctgggaagcatccagttctcaaatcgtttttgctatggatttatactaacaagaacattccttgacttccctcctgctggtgttttaaagccacaagtagggaagatatctggcaggcagaaagaagtctgtgatgataaacaatgatgaggatgacctaggcaccctacgctagtgtgagaagcctgcgccccaggaaggatctgtgttagtccctgggatggctccaaggcctgctctaggaaggcagcatgctcagtgggaacacagcaagattcagaatttaaagtagttgcttcatggctctgtgcactcccttttcttcctcgcagcctccctaagatgactccagtgtgaccctgtgcttagtgagcaatagtgattgagctcatgttccctgcaagtgccatttcctctccaggatgggcctctaaagctgaggcctggctcagagcctgtttgccctctgtcttaaacaattgtaaatatcacttaaattataaccatttgcaataaacatccccaaagttccctgtctccttta

SEQ ID NO: 1303 - DNA, 2163 bp, Homo sapiens
ccccacccccaggaccagcctgagtggctgcgctcaccacgacgaggaccgcggcgtgttcgccccccaacagacggagccagcggcgaaggcggcgtgcgcgcgcccgtgccgtggtgggcgtggccggggcggagacgcgaggaggggagcagagaacgcgctcgcgtagaggaattccgggtcctcctcctcgccctaccttggtttacctgcagccgcctagtcctcttctccttctctttgatgattcagggcctcggcttccctcacgggcataattggaatatcatttggagaaagtgtcatggaagttctgcgtccacagcttataagaattgatggccggaattacaggaagaatccagtccaagaacagacctatcaacatgaagaagatgaagaggacttctatcaaggctccatggagtgtgctgatgagccctgtgatgcctacgaggtggagcagaccccacaaggattccggtctactttgagggcccccagcttgctctataagcatatagttggaaagagaggggacactaggaagaaaatagaaatggagaccaaaacttctattagcattcctaaacctggacaagacggggaaattgtaatcactggccagcatcgaaatggtgtaatttcagcccgaacacggattgatgttcttttggacacttttcgaagaaagcagcccttcactcacttccttgcctttttcctcaatgaagttgaggttcaggaaggattcctgagattccaggaggaagtactggcgaagtgctccatgtttgaacgccatgaccctgtggatgggagaattactgagaggcagtttggtggcatgctacttgcctacagtggggtgcagtccaagaagctgaccgccatgcagaggcagctcaagaagcacttcaaagaaggaaagggtctgacatttcaggaggtggagaacttctttactttcctaaagaacattaatgatgtggacactgcattgagtttttaccatatggctggagcatctcttgataaagtgaccatgcagcaggtggccaggacagtggctaaagtggagctctcagaccacgtgtgtgatgtggtgtttgcactctttgactgtgatggcaatggcgaactgagcaataaggaatttgtttccatcatgaagcaacggctgatgagaggcctggaaaagcccaaagacatgggtttcactcgcctcatgcaggccatgtggaaatgtgcacaggaaactgcctgggacttcgctttacccaaacagtaaccccacactgcaagaggggacccctccacccccagtaccctggaccccctccgcagagtctcggcagagccctttgtgctgctgcttctggaagtagtcccccttcctcccgggatgacctcaggactctgtcggtttcccctctttacccttccccgtccccgtgttctgctgggctctgattctgcccaatgagtatccccataggttctcaaaaacatgaacaagtctgtaaagctcagacatttgtcagcctcaacagcaccacccattcaagcatcctgtggataaagaattcagggaaccatccacacacctgccaaccctgggaagcatccagttctcaaatcgtttttgctatggatttatactaacaagaacattccttgacttccctcctgctggtgttttaaagccacaagtagggaagatatctggcaggcagaaagaagtctgtgatgataaacaatgatgaggatgacctaggcaccctacgctagtgtgagaagcctgcgccccaggaaggatctgtgttagtccctgggatggctccaaggcctgctctaggaaggcagcatgctcagtgggaacacagcaagattcagaatttaaagtagttgcttcatggctctgtgcactcccttttcttcctcgcagcctccctaagatgactccagtgtgaccctgtgcttagtgagcaatagtgattgagctcatgttccctgcaagtgccatttcctctccaggatgggcctctaaagctgaggcctggctcagagcctgtttgccctctgtcttaaacaattgtaaatatcacttaaattataaccatttgcaataaacatccccaaagttccctgtctccttta

SEQ ID NO: 1304 - DNA, 2298 bp, Homo sapiens
ccccacccccaggaccagcctgagtggctgcgctcaccacgacgaggaccgcggcgtgttcgccccccaacagacggagccagcggcgaaggcggcgtgcgcgcgcccgtgccgtggtgggcgtggccggggcggagacgcgaggaggggagcagagaacgcgctcgcgtagaggaattccgggtcctcctcctcgccctaccttggtttacctgcagccgcctagtcctcttctccttctctttgatgattcagggcctcggcttccctcacgggcataattggaatatcatttggagaaagtgtcatggaagttctgcgtccacagcttataagaattgatggccggaattacaggaagaatccagtccaagaacagacctatcaacatgaagaagatgaagaggacttctatcaaggctccatggagtgtgctgatgagccctgtgatgcctacgaggtggagcagaccccacaaggattccggtctactttgagggcccccagcttgctctataagcatatagttggaaagagaggggacactaggaagaaaatagaaatggagaccaaaacttctattagcattcctaaacctggacaagacggggaaattgtaatcactggccagcatcgaaatggtgtaatttcagcccgaacacggattgatgttcttttggacacttttcgaagaaagcagcccttcactcacttccttgcctttttcctcaatgaagttgaggttcaggaaggattcctgagattccaggaggaagtactggcgaagtgctccatggatcatggggttgacagcagcattttccagaatcctaaaaagcttcatctaactattgggatgttggtgcttttgagtgaggaagagatccagcagacatgtgagatgctacagcagtgtaaagaggaattcattaatgatatttctgggggtaaacccctagaagtggagatggcagggatagaatacatgaatgatgatcctggcatggtggatgttctttacgccaaagtccatatgaaagatggctccaacaggctacaagaattagttgatcgagtgctggaacgttttcaggcatctggactaatagtgaaagagtggaatagtgtgaaactgcatgctacagttatgaatacactattcaggaaagaccccaatgtgaccatgcagcaggtggccaggacagtggctaaagtggagctctcagaccacgtgtgtgatgtggtgtttgcactctttgactgtgatggcaatggcgaactgagcaataaggaatttgtttccatcatgaagcaacggctgatgagaggcctggaaaagcccaaagacatgggtttcactcgcctcatgcaggccatgtggaaatgtgcacaggaaactgcctgggacttcgctttacccaaacagtaaccccacactgcaagaggggacccctccacccccagtaccctggaccccctccgcagagtctcggcagagccctttgtgctgctgcttctggaagtagtcccccttcctcccgggatgacctcaggactctgtcggtttcccctctttacccttccccgtccccgtgttctgctgggctctgattctgcccaatgagtatccccataggttctcaaaaacatgaacaagtctgtaaagctcagacatttgtcagcctcaacagcaccacccattcaagcatcctgtggataaagaattcagggaaccatccacacacctgccaaccctgggaagcatccagttctcaaatcgtttttgctatggatttatactaacaagaacattccttgacttccctcctgctggtgttttaaagccacaagtagggaagatatctggcaggcagaaagaagtctgtgatgataaacaatgatgaggatgacctaggcaccctacgctagtgtgagaagcctgcgccccaggaaggatctgtgttagtccctgggatggctccaaggcctgctctaggaaggcagcatgctcagtgggaacacagcaagattcagaatttaaagtagttgcttcatggctctgtgcactcccttttcttcctcgcagcctccctaagatgactccagtgtgaccctgtgcttagtgagcaatagtgattgagctcatgttccctgcaagtgccatttcctctccaggatgggcctctaaagctgaggcctggctcagagcctgtttgccctctgtcttaaacaattgtaaatatcacttaaattataaccatttgcaataaacatccccaaagttccctgtctccttta

SEQ ID NO: 1305 - DNA, 2338 bp, Homo sapiens
ctttctaccctcaatgccgagcacagaacctggggcagtgtttccactgtgcttccagtcccgagcatttcggatgaatgaatgatgaacaaacgacagaacgcagggcgagcagctcagcaaaggtcatgcaggagatagagaagcgctgtgtcatgagtattggatcattatggatttttttctttctcattgtgcagatctattcgcacaactctatcttcaaccagtttgccaggcccaccggaggtgcccagtaaaattttgtcaaacaaatactgatgatgaagtatcctgggacttggccctgtcagggcataattggaatatcatttggagaaagtgtcatggaagttctgcgtccacagcttataagaattgatggccggaattacaggaagaatccagtccaagaacagacctatcaacatgaagaagatgaagaggacttctatcaaggctccatggagtgtgctgatgagccctgtgatgcctacgaggtggagcagaccccacaaggattccggtctactttgagggcccccagcttgctctataagcatatagttggaaagagaggggacactaggaagaaaatagaaatggagaccaaaacttctattagcattcctaaacctggacaagacggggaaattgtaatcactggccagcatcgaaatggtgtaatttcagcccgaacacggattgatgttcttttggacacttttcgaagaaagcagcccttcactcacttccttgcctttttcctcaatgaagttgaggttcaggaaggattcctgagattccaggaggaagtactggcgaagtgctccatggatcatggggttgacagcagcattttccagaatcctaaaaagcttcatctaactattgggatgttggtgcttttgagtgaggaagagatccagcagacatgtgagatgctacagcagtgtaaagaggaattcattaatgatatttctgggggtaaacccctagaagtggagatggcagggatagaatacatgaatgatgatcctggcatggtggatgttctttacgccaaagtccatatgaaagatggctccaacaggctacaagaattagttgatcgagtgctggaacgttttcaggcatctggactaatagtgaaagagtggaatagtgtgaaactgcatgctacagttatgaatacactattcaggaaagaccccaatgtgaccatgcagcaggtggccaggacagtggctaaagtggagctctcagaccacgtgtgtgatgtggtgtttgcactctttgactgtgatggcaatggcgaactgagcaataaggaatttgtttccatcatgaagcaacggctgatgagaggcctggaaaagcccaaagacatgggtttcactcgcctcatgcaggccatgtggaaatgtgcacaggaaactgcctgggacttcgctttacccaaacagtaaccccacactgcaagaggggacccctccacccccagtaccctggaccccctccgcagagtctcggcagagccctttgtgctgctgcttctggaagtagtcccccttcctcccgggatgacctcaggactctgtcggtttcccctctttacccttccccgtccccgtgttctgctgggctctgattctgcccaatgagtatccccataggttctcaaaaacatgaacaagtctgtaaagctcagacatttgtcagcctcaacagcaccacccattcaagcatcctgtggataaagaattcagggaaccatccacacacctgccaaccctgggaagcatccagttctcaaatcgtttttgctatggatttatactaacaagaacattccttgacttccctcctgctggtgttttaaagccacaagtagggaagatatctggcaggcagaaagaagtctgtgatgataaacaatgatgaggatgacctaggcaccctacgctagtgtgagaagcctgcgccccaggaaggatctgtgttagtccctgggatggctccaaggcctgctctaggaaggcagcatgctcagtgggaacacagcaagattcagaatttaaagtagttgcttcatggctctgtgcactcccttttcttcctcgcagcctccctaagatgactccagtgtgaccctgtgcttagtgagcaatagtgattgagctcatgttccctgcaagtgccatttcctctccaggatgggcctctaaagctgaggcctggctcagagcctgtttgccctctgtcttaaacaattgtaaatatcacttaaattataaccatttgcaataaacatccccaaagttccctgtctccttta

SEQ ID NO: 1306 - DNA, 2203 bp, Homo sapiens
ctttctaccctcaatgccgagcacagaacctggggcagtgtttccactgtgcttccagtcccgagcatttcggatgaatgaatgatgaacaaacgacagaacgcagggcgagcagctcagcaaaggtcatgcaggagatagagaagcgctgtgtcatgagtattggatcattatggatttttttctttctcattgtgcagatctattcgcacaactctatcttcaaccagtttgccaggcccaccggaggtgcccagtaaaattttgtcaaacaaatactgatgatgaagtatcctgggacttggccctgtcagggcataattggaatatcatttggagaaagtgtcatggaagttctgcgtccacagcttataagaattgatggccggaattacaggaagaatccagtccaagaacagacctatcaacatgaagaagatgaagaggacttctatcaaggctccatggagtgtgctgatgagccctgtgatgcctacgaggtggagcagaccccacaaggattccggtctactttgagggcccccagcttgctctataagcatatagttggaaagagaggggacactaggaagaaaatagaaatggagaccaaaacttctattagcattcctaaacctggacaagacggggaaattgtaatcactggccagcatcgaaatggtgtaatttcagcccgaacacggattgatgttcttttggacacttttcgaagaaagcagcccttcactcacttccttgcctttttcctcaatgaagttgaggttcaggaaggattcctgagattccaggaggaagtactggcgaagtgctccatgtttgaacgccatgaccctgtggatgggagaattactgagaggcagtttggtggcatgctacttgcctacagtggggtgcagtccaagaagctgaccgccatgcagaggcagctcaagaagcacttcaaagaaggaaagggtctgacatttcaggaggtggagaacttctttactttcctaaagaacattaatgatgtggacactgcattgagtttttaccatatggctggagcatctcttgataaagtgaccatgcagcaggtggccaggacagtggctaaagtggagctctcagaccacgtgtgtgatgtggtgtttgcactctttgactgtgatggcaatggcgaactgagcaataaggaatttgtttccatcatgaagcaacggctgatgagaggcctggaaaagcccaaagacatgggtttcactcgcctcatgcaggccatgtggaaatgtgcacaggaaactgcctgggacttcgctttacccaaacagtaaccccacactgcaagaggggacccctccacccccagtaccctggaccccctccgcagagtctcggcagagccctttgtgctgctgcttctggaagtagtcccccttcctcccgggatgacctcaggactctgtcggtttcccctctttacccttccccgtccccgtgttctgctgggctctgattctgcccaatgagtatccccataggttctcaaaaacatgaacaagtctgtaaagctcagacatttgtcagcctcaacagcaccacccattcaagcatcctgtggataaagaattcagggaaccatccacacacctgccaaccctgggaagcatccagttctcaaatcgtttttgctatggatttatactaacaagaacattccttgacttccctcctgctggtgttttaaagccacaagtagggaagatatctggcaggcagaaagaagtctgtgatgataaacaatgatgaggatgacctaggcaccctacgctagtgtgagaagcctgcgccccaggaaggatctgtgttagtccctgggatggctccaaggcctgctctaggaaggcagcatgctcagtgggaacacagcaagattcagaatttaaagtagttgcttcatggctctgtgcactcccttttcttcctcgcagcctccctaagatgactccagtgtgaccctgtgcttagtgagcaatagtgattgagctcatgttccctgcaagtgccatttcctctccaggatgggcctctaaagctgaggcctggctcagagcctgtttgccctctgtcttaaacaattgtaaatatcacttaaattataaccatttgcaataaacatccccaaagttccctgtctccttta

SEQ ID NO: 1307 - DNA, 2065 bp, Homo sapiens
ctttctaccctcaatgccgagcacagaacctggggcagtgtttccactgtgcttccagtcccgagcatttcggatgaatgaatgatgaacaaacgacagaacgcagggcgagcagctcagcaaaggtcatgcaggagatagagaagcgctgtgtcatgagtattggatcattatggatttttttctttctcattgtgcagatctattcgcacaactctatcttcaaccagtttgccaggcccaccggaggtgcccagtaaaattttgtcaaacaaatactgatgatgaagtatcctgggacttggccctgtcagggcataattggaatatcatttggagaaagtgtcatggaagttctgcgtccacagcttataagaattgatggccggaattacaggaagaatccagtccaagaacagacctatcaacatgaagaagatgaagaggacttctatcaaggctccatggagtgtgctgatgagccctgtgatgcctacgaggtggagcagaccccacaaggattccggtctactttgagggcccccagcttgctctataagcatatagttggaaagagaggggacactaggaagaaaatagaaatggagaccaaaacttctattagcattcctaaacctggacaagacggggaaattgtaatcactggccagcatcgaaatggtgtaatttcagcccgaacacggattgatgttcttttggacacttttcgaagaaagcagcccttcactcacttccttgcctttttcctcaatgaagttgaggttcaggaaggattcctgagattccaggaggaagtactggcgaagtgctccatgggtctgacatttcaggaggtggagaacttctttactttcctaaagaacattaatgatgtggacactgcattgagtttttaccatatggctggagcatctcttgataaagtgaccatgcagcaggtggccaggacagtggctaaagtggagctctcagaccacgtgtgtgatgtggtgtttgcactctttgactgtgatggcaatggcgaactgagcaataaggaatttgtttccatcatgaagcaacggctgatgagaggcctggaaaagcccaaagacatgggtttcactcgcctcatgcaggccatgtggaaatgtgcacaggaaactgcctgggacttcgctttacccaaacagtaaccccacactgcaagaggggacccctccacccccagtaccctggaccccctccgcagagtctcggcagagccctttgtgctgctgcttctggaagtagtcccccttcctcccgggatgacctcaggactctgtcggtttcccctctttacccttccccgtccccgtgttctgctgggctctgattctgcccaatgagtatccccataggttctcaaaaacatgaacaagtctgtaaagctcagacatttgtcagcctcaacagcaccacccattcaagcatcctgtggataaagaattcagggaaccatccacacacctgccaaccctgggaagcatccagttctcaaatcgtttttgctatggatttatactaacaagaacattccttgacttccctcctgctggtgttttaaagccacaagtagggaagatatctggcaggcagaaagaagtctgtgatgataaacaatgatgaggatgacctaggcaccctacgctagtgtgagaagcctgcgccccaggaaggatctgtgttagtccctgggatggctccaaggcctgctctaggaaggcagcatgctcagtgggaacacagcaagattcagaatttaaagtagttgcttcatggctctgtgcactcccttttcttcctcgcagcctccctaagatgactccagtgtgaccctgtgcttagtgagcaatagtgattgagctcatgttccctgcaagtgccatttcctctccaggatgggcctctaaagctgaggcctggctcagagcctgtttgccctctgtcttaaacaattgtaaatatcacttaaattataaccatttgcaataaacatccccaaagttccctgtctccttta

SEQ ID NO: 1308 - DNA, 1779 bp, Homo sapiens
gcatatagttggaaagagaggggacactaggaagaaaatagaaatggagaccaaaacttctattagcattcctaaacctggacaagacggggaaattgtaatcactggccagcatcgaaatggtgtaatttcagcccgaacacggattgatgttcttttggacacttttcgaagaaagcagcccttcactcacttccttgcctttttcctcaatgaagttgaggttcaggaaggattcctgagattccaggaggaagtactggcgaagtgctccatggatcatggggttgacagcagcattttccagaatcctaaaaagcttcatctaactattgggatgttggtgcttttgagtgaggaagagatccagcagacatgtgagatgctacagcagtgtaaagaggaattcattaatgatatttctgggggtaaacccctagaagtggagatggcagggatagaatacatgaatgatgatcctggcatggtggatgttctttacgccaaagtccatatgaaagatggctccaacaggctacaagaattagttgatcgagtgctggaacgttttcaggcatctggactaatagtgaaagagtggaatagtgtgaaactgcatgctacagttatgaatacactattcaggaaagaccccaatgtgaccatgcagcaggtggccaggacagtggctaaagtggagctctcagaccacgtgtgtgatgtggtgtttgcactctttgactgtgatggcaatggcgaactgagcaataaggaatttgtttccatcatgaagcaacggctgatgagaggcctggaaaagcccaaagacatgggtttcactcgcctcatgcaggccatgtggaaatgtgcacaggaaactgcctgggacttcgctttacccaaacagtaaccccacactgcaagaggggacccctccacccccagtaccctggaccccctccgcagagtctcggcagagccctttgtgctgctgcttctggaagtagtcccccttcctcccgggatgacctcaggactctgtcggtttcccctctttacccttccccgtccccgtgttctgctgggctctgattctgcccaatgagtatccccataggttctcaaaaacatgaacaagtctgtaaagctcagacatttgtcagcctcaacagcaccacccattcaagcatcctgtggataaagaattcagggaaccatccacacacctgccaaccctgggaagcatccagttctcaaatcgtttttgctatggatttatactaacaagaacattccttgacttccctcctgctggtgttttaaagccacaagtagggaagatatctggcaggcagaaagaagtctgtgatgataaacaatgatgaggatgacctaggcaccctacgctagtgtgagaagcctgcgccccaggaaggatctgtgttagtccctgggatggctccaaggcctgctctaggaaggcagcatgctcagtgggaacacagcaagattcagaatttaaagtagttgcttcatggctctgtgcactcccttttcttcctcgcagcctccctaagatgactccagtgtgaccctgtgcttagtgagcaatagtgattgagctcatgttccctgcaagtgccatttcctctccaggatgggcctctaaagctgaggcctggctcagagcctgtttgccctctgtcttaaacaattgtaaatatcacttaaattataaccatttgcaataaacatccccaaagttccctgtctccttta

SEQ ID NO: 1309 - DNA, 2208 bp, Homo sapiens
agagaggggagcgctcagaacaccagcggctcccaagctaactcctagccacttttcccacccagctgggtccccaggaaactacgccatcggcgctgtcccactgcgcaggcgccagccctcggcccgcatgcgcactcggtcaaacccggcctggggaaatttcctatcgcacgtctgctgcagcagtctcctgtttctcctcctaccttctccatttttctagtccctgcagggcataattggaatatcatttggagaaagtgtcatggaagttctgcgtccacagcttataagaattgatggccggaattacaggaagaatccagtccaagaacagacctatcaacatgaagaagatgaagaggacttctatcaaggctccatggagtgtgctgatgagccctgtgatgcctacgaggtggagcagaccccacaaggattccggtctactttgagggcccccagcttgctctataatctcattcacttgaacacatcaaacgactgtgggttccagaagataactttggattgtcagaatatttatacttggaagtccaggcatatagttggaaagagaggggacactaggaagaaaatagaaatggagaccaaaacttctattagcattcctaaacctggacaagacggggaaattgtaatcactggccagcatcgaaatggtgtaatttcagcccgaacacggattgatgttcttttggacacttttcgaagaaagcagcccttcactcacttccttgcctttttcctcaatgaagttgaggttcaggaaggattcctgagattccaggaggaagtactggcgaagtgctccatgtttgaacgccatgaccctgtggatgggagaattactgagaggcagtttggtggcatgctacttgcctacagtggggtgcagtccaagaagctgaccgccatgcagaggcagctcaagaagcacttcaaagaaggaaagggtctgacatttcaggaggtggagaacttctttactttcctaaagaacattaatgatgtggacactgcattgagtttttaccatatggctggagcatctcttgataaagtgaccatgcagcaggtggccaggacagtggctaaagtggagctctcagaccacgtgtgtgatgtggtgtttgcactctttgactgtgatggcaatggcgaactgagcaataaggaatttgtttccatcatgaagcaacggctgatgagaggcctggaaaagcccaaagacatgggtttcactcgcctcatgcaggccatgtggaaatgtgcacaggaaactgcctgggacttcgctttacccaaacagtaaccccacactgcaagaggggacccctccacccccagtaccctggaccccctccgcagagtctcggcagagccctttgtgctgctgcttctggaagtagtcccccttcctcccgggatgacctcaggactctgtcggtttcccctctttacccttccccgtccccgtgttctgctgggctctgattctgcccaatgagtatccccataggttctcaaaaacatgaacaagtctgtaaagctcagacatttgtcagcctcaacagcaccacccattcaagcatcctgtggataaagaattcagggaaccatccacacacctgccaaccctgggaagcatccagttctcaaatcgtttttgctatggatttatactaacaagaacattccttgacttccctcctgctggtgttttaaagccacaagtagggaagatatctggcaggcagaaagaagtctgtgatgataaacaatgatgaggatgacctaggcaccctacgctagtgtgagaagcctgcgccccaggaaggatctgtgttagtccctgggatggctccaaggcctgctctaggaaggcagcatgctcagtgggaacacagcaagattcagaatttaaagtagttgcttcatggctctgtgcactcccttttcttcctcgcagcctccctaagatgactccagtgtgaccctgtgcttagtgagcaatagtgattgagctcatgttccctgcaagtgccatttcctctccaggatgggcctctaaagctgaggcctggctcagagcctgtttgccctctgtcttaaacaattgtaaatatcacttaaattataaccatttgcaataaacatccccaaagttccctgtctccttta

SEQ ID NO: 1310 - DNA, 1644 bp, Homo sapiens
gcatatagttggaaagagaggggacactaggaagaaaatagaaatggagaccaaaacttctattagcattcctaaacctggacaagacggggaaattgtaatcactggccagcatcgaaatggtgtaatttcagcccgaacacggattgatgttcttttggacacttttcgaagaaagcagcccttcactcacttccttgcctttttcctcaatgaagttgaggttcaggaaggattcctgagattccaggaggaagtactggcgaagtgctccatgtttgaacgccatgaccctgtggatgggagaattactgagaggcagtttggtggcatgctacttgcctacagtggggtgcagtccaagaagctgaccgccatgcagaggcagctcaagaagcacttcaaagaaggaaagggtctgacatttcaggaggtggagaacttctttactttcctaaagaacattaatgatgtggacactgcattgagtttttaccatatggctggagcatctcttgataaagtgaccatgcagcaggtggccaggacagtggctaaagtggagctctcagaccacgtgtgtgatgtggtgtttgcactctttgactgtgatggcaatggcgaactgagcaataaggaatttgtttccatcatgaagcaacggctgatgagaggcctggaaaagcccaaagacatgggtttcactcgcctcatgcaggccatgtggaaatgtgcacaggaaactgcctgggacttcgctttacccaaacagtaaccccacactgcaagaggggacccctccacccccagtaccctggaccccctccgcagagtctcggcagagccctttgtgctgctgcttctggaagtagtcccccttcctcccgggatgacctcaggactctgtcggtttcccctctttacccttccccgtccccgtgttctgctgggctctgattctgcccaatgagtatccccataggttctcaaaaacatgaacaagtctgtaaagctcagacatttgtcagcctcaacagcaccacccattcaagcatcctgtggataaagaattcagggaaccatccacacacctgccaaccctgggaagcatccagttctcaaatcgtttttgctatggatttatactaacaagaacattccttgacttccctcctgctggtgttttaaagccacaagtagggaagatatctggcaggcagaaagaagtctgtgatgataaacaatgatgaggatgacctaggcaccctacgctagtgtgagaagcctgcgccccaggaaggatctgtgttagtccctgggatggctccaaggcctgctctaggaaggcagcatgctcagtgggaacacagcaagattcagaatttaaagtagttgcttcatggctctgtgcactcccttttcttcctcgcagcctccctaagatgactccagtgtgaccctgtgcttagtgagcaatagtgattgagctcatgttccctgcaagtgccatttcctctccaggatgggcctctaaagctgaggcctggctcagagcctgtttgccctctgtcttaaacaattgtaaatatcacttaaattataaccatttgcaataaacatccccaaagttccctgtctccttta

SEQ ID NO: 1311-1318 - skipped (8 entries)

SEQ ID NO: 1319 - DNA, 668 bp, Homo sapiens
gctgccgccgccgctaaccgagggagagctgcgagcgagcacccaggccccgccgccgccgccgccaccgctgcccgcctgccgccgcccgcctccgcctgccttctgccgccggccggcgcgtcgtccccacagagggtgtctggctgttttggggaaactattcctgaccttattttgactaaaaagttgcctgctgtaccagcaaaaaatcaccatgtaccaacctatccaaacttatccatggatgaatctatccagaagacgggagttccgatgcttgtcttgctctgaatgtctgcttgtcacctgcttagggttatcgactgtgattctgggactcattgttgttctacaggacccctctgactctgtggttttctctactggattaacaatgatagccataggtgctttttttgttgtcctcactggagtgacagccctgtgtacggttacagtcgacgagaacttgcagaaaaccacgaggctaagactaggagtgatacgaaaaagcggaagtctccaaggaactacagagccttccatgactcactcaataatcgctagcacctcgctgtagttgtacattgaaccctggcatcttcgtctttggaactaagtctcctgagcattgtttttaaatagaaataaaatctggcttttaa

SEQ ID NO: 1320-1339 - skipped (20 entries)

SEQ ID NO: 1340 - DNA, 2382 bp, Homo sapiens
tttgcccgactggccgcgcacccagctggcccgcccctgcccgacacgaccgctgcccgccccttgccttcctgacccaggggctccgctggctgcggtcgcctgggagctgccgccagggccaggaggggagcggcacctggaagatgcgcccattggctggtgctccagtccccaaaaggcaaaaatgtgaccactggactccctgcccatctgacacctatgcctacaggttactcagcggaggtggcagaagcaagtacgccaaaatctgctttgaggataacctacttatgggagaacagctgggaaatgttgccagaggaataaacattgccattgtcaactatgtaactgggaatgtgacagcaacacgatgttttgatatgtatgaaggtgataactctggaccgatgacaaagtttattcagagtgctgctccaaaatccctgctcttcatggtgacctatgacgacggaagcacaagactgaataacgatgccaagaatgccatagaagcacttggaagtaaagaaatcaggaacatgaaattcaggtctagctgggtatttattgcagcaaaaggcttggaactcccttccgaaattcagagagaaaagccatcaagttctctggagaccttcttcgactccctggtgacacaagcaaacatccccaacgttttctccatgcagatgtgtggagccggcttgcccgttgctggatctgggaccaacggaggtagtcttgtcttgggtggaattgaaccaagtttgtataaaggagacatctggtatacccctattaaggaagagtggtactaccagatagaaattctgaaattggaaattggaggccaaagccttaatctggactgcagagagtataacgcagacaaggccatcgtggacagtggcaccacgctgctgcgcctgccccagaaggtgtttgatgcggtggtggaagctgtggcccgcgcatctctgctttacattcagcccatgatgggggccggcctgaattatgaatgttaccgattcggcatttccccatccacaaatgcgctggtgatcggtgccacggtgatggagggcttctacgtcatcttcgacagagcccagaagagggtgggcttcgcagcgagcccctgtgcagaaattgcaggtgctgcagtgtctgaaatttccgggcctttctcaacagaggatgtagccagcaactgtgtccccgctcagtctttgagcgagcccattttgtggattgtgtcctatgcgctcatgagcgtctgtggagccatcctccttgtcttaatcgtcctgctgctgctgccgttccggtgtcagcgtcgcccccgtgaccctgaggtcgtcaatgatgagtcctctctggtcagacatcgctggaaatgaatagccaggcctgacctcaagcaaccatgaactcagctattaagaaaatcacatttccagggcagcagccgggatcgatggtggcgctttctcctgtgcccacccgtcttcaatctctgttctgctcccagatgccttctagattcactgtcttttgattcttgattttcaagctttcaaatcctccctacttccaagaaaaataattaaaaaaaaaacttcattctaaaccaaaacagagtggattgggctgcaggctctatggggttcgttatgccaaagtgtctacatgtgccaccaacataaaacaaaaccaagccttggctcgttctcttctctcttcaatctctggaaaaataagtacatatagttgataacccctcttagcttacaggaagctttttgtattaattgcctttgaggttattttccgccagacctcaacctgggtcaaagtggtacaggaaggcttgcagtatgatggcaggagaatcagcctggggcctggggatgtaaccaagctgtacccttgagacctggaaccagagccacaggccccttttgtgggtttctctgtgctctgaatgggagccagaattcactaggaggtcatcaaccgatggtcctcacaagcctcttctgaagatggaaggccttttgcccgttgaggtagaggggaaggaaatctcctcttttgtacccaatacttatgttgtattgttggtgcgaaagtaaaaacactacctcttttgagactttgcccagggtcctgtgcctggatgggggtgcaggcagccttgaccacggctgttcccctcacccaaaagaattatcatcccaacagccaagacccaacaggtgctgaactgtgcatcaaccaggaagagttctatccccaagctggccactatcacatatgcttactcttgcttaaaattaataaatcatgttttgatgagaaaaaactattcta

SEQ ID NO: 1341 - DNA, 2363 bp, Homo sapiens
tttgcccgactggccgcgcacccagctggcccgcccctgcccgacacgaccgctgcccgccccttgccttcctgacccaggggctccgctggctgcggtcgcctgggagctgccgccagggccaggaggggagcggcacctggaagatgcgcccattggctggtgctccagtccccaaaaggcaaaaatgtgaccactggactccctgcccatctgacacctatgcctacaggttactcagcggaggtggcagaagcaagtacgccaaaatctgctttgaggataacctacttatgggagaacagctgggaaatgttgccagaggaataaacattgccattgtcaactatgtaactgggaatgtgacagcaacacgatgttttgatatgtatgaaggtgataactctggaccgatgacaaagtttattcagagtgctgctccaaaatccctgctcttcatggtgacctatgacgacggaagcacaagactgaataacgatgccaagaatgccatagaagcacttggaagtaaagaaatcaggaacatgaaattcaggtctagctgggtatttattgcagcaaaaggcttggaactcccttccgaaattcagagagaaaagccatcaagttctctggagaccttcttcgactccctggtgacacaagcaaacatccccaacgttttctccatgcagatgtgtggagccggcttgcccgttgctggatctgggaccaacggaggtagtcttgtcttgggtggaattgaaccaagtttgtataaaggagacatctggtatacccctattaaggaagagtggtactaccagatagaaattctgaaattggaaattggaggccaaagccttaatctggactgcagagagtataacgcagacaaggccatcgtggacagtggcaccacgctgctgcgcctgccccagaaggtgtttgatgcggtggtggaagctgtggcccgcgcatctctgattccagaattctctgatggtttctggactgggtcccagctggcgtgctggacgaattcggaaacaccttggtcttacttccctaaaatctccatctacctgagagacgagaactccagcaggtcattccgtatcacaatcctgcctcagaaattgcaggtgctgcagtgtctgaaatttccgggcctttctcaacagaggatgtagccagcaactgtgtccccgctcagtctttgagcgagcccattttgtggattgtgtcctatgcgctcatgagcgtctgtggagccatcctccttgtcttaatcgtcctgctgctgctgccgttccggtgtcagcgtcgcccccgtgaccctgaggtcgtcaatgatgagtcctctctggtcagacatcgctggaaatgaatagccaggcctgacctcaagcaaccatgaactcagctattaagaaaatcacatttccagggcagcagccgggatcgatggtggcgctttctcctgtgcccacccgtcttcaatctctgttctgctcccagatgccttctagattcactgtcttttgattcttgattttcaagctttcaaatcctccctacttccaagaaaaataattaaaaaaaaaacttcattctaaaccaaaacagagtggattgggctgcaggctctatggggttcgttatgccaaagtgtctacatgtgccaccaacataaaacaaaaccaagccttggctcgttctcttctctcttcaatctctggaaaaataagtacatatagttgataacccctcttagcttacaggaagctttttgtattaattgcctttgaggttattttccgccagacctcaacctgggtcaaagtggtacaggaaggcttgcagtatgatggcaggagaatcagcctggggcctggggatgtaaccaagctgtacccttgagacctggaaccagagccacaggccccttttgtgggtttctctgtgctctgaatgggagccagaattcactaggaggtcatcaaccgatggtcctcacaagcctcttctgaagatggaaggccttttgcccgttgaggtagaggggaaggaaatctcctcttttgtacccaatacttatgttgtattgttggtgcgaaagtaaaaacactacctcttttgagactttgcccagggtcctgtgcctggatgggggtgcaggcagccttgaccacggctgttcccctcacccaaaagaattatcatcccaacagccaagacccaacaggtgctgaactgtgcatcaaccaggaagagttctatccccaagctggccactatcacatatgcttactcttgcttaaaattaataaatcatgttttgatgagaaaaaactattcta

SEQ ID NO: 1342 - DNA, 2532 bp, Homo sapiens
tttgcccgactggccgcgcacccagctggcccgcccctgcccgacacgaccgctgcccgccccttgccttcctgacccaggggctccgctggctgcggtcgcctgggagctgccgccagggccaggaggggagcggcacctggaagatgcgcccattggctggtgctccagtccccaaaaggcaaaaatgtgaccactggactccctgcccatctgacacctatgcctacaggttactcagcggaggtggcagaagcaagtacgccaaaatctgctttgaggataacctacttatgggagaacagctgggaaatgttgccagaggaataaacattgccattgtcaactatgtaactgggaatgtgacagcaacacgatgttttgatatgtatgaaggtgataactctggaccgatgacaaagtttattcagagtgctgctccaaaatccctgctcttcatggtgacctatgacgacggaagcacaagactgaataacgatgccaagaatgccatagaagcacttggaagtaaagaaatcaggaacatgaaattcaggtctagctgggtatttattgcagcaaaaggcttggaactcccttccgaaattcagagagaaaagccatcaagttctctggagaccttcttcgactccctggtgacacaagcaaacatccccaacgttttctccatgcagatgtgtggagccggcttgcccgttgctggatctgggaccaacggaggtagtcttgtcttgggtggaattgaaccaagtttgtataaaggagacatctggtatacccctattaaggaagagtggtactaccagatagaaattctgaaattggaaattggaggccaaagccttaatctggactgcagagagtataacgcagacaaggccatcgtggacagtggcaccacgctgctgcgcctgccccagaaggtgtttgatgcggtggtggaagctgtggcccgcgcatctctgattccagaattctctgatggtttctggactgggtcccagctggcgtgctggacgaattcggaaacaccttggtcttacttccctaaaatctccatctacctgagagacgagaactccagcaggtcattccgtatcacaatcctgcctcagctttacattcagcccatgatgggggccggcctgaattatgaatgttaccgattcggcatttccccatccacaaatgcgctggtgatcggtgccacggtgatggagggcttctacgtcatcttcgacagagcccagaagagggtgggcttcgcagcgagcccctgtgcagaaattgcaggtgctgcagtgtctgaaatttccgggcctttctcaacagaggatgtagccagcaactgtgtccccgctcagtctttgagcgagcccattttgtggattgtgtcctatgcgctcatgagcgtctgtggagccatcctccttgtcttaatcgtcctgctgctgctgccgttccggtgtcagcgtcgcccccgtgaccctgaggtcgtcaatgatgagtcctctctggtcagacatcgctggaaatgaatagccaggcctgacctcaagcaaccatgaactcagctattaagaaaatcacatttccagggcagcagccgggatcgatggtggcgctttctcctgtgcccacccgtcttcaatctctgttctgctcccagatgccttctagattcactgtcttttgattcttgattttcaagctttcaaatcctccctacttccaagaaaaataattaaaaaaaaaacttcattctaaaccaaaacagagtggattgggctgcaggctctatggggttcgttatgccaaagtgtctacatgtgccaccaacataaaacaaaaccaagccttggctcgttctcttctctcttcaatctctggaaaaataagtacatatagttgataacccctcttagcttacaggaagctttttgtattaattgcctttgaggttattttccgccagacctcaacctgggtcaaagtggtacaggaaggcttgcagtatgatggcaggagaatcagcctggggcctggggatgtaaccaagctgtacccttgagacctggaaccagagccacaggccccttttgtgggtttctctgtgctctgaatgggagccagaattcactaggaggtcatcaaccgatggtcctcacaagcctcttctgaagatggaaggccttttgcccgttgaggtagaggggaaggaaatctcctcttttgtacccaatacttatgttgtattgttggtgcgaaagtaaaaacactacctcttttgagactttgcccagggtcctgtgcctggatgggggtgcaggcagccttgaccacggctgttcccctcacccaaaagaattatcatcccaacagccaagacccaacaggtgctgaactgtgcatcaaccaggaagagttctatccccaagctggccactatcacatatgcttactcttgcttaaaattaataaatcatgttttgatgagaaaaaactattcta

SEQ ID NO: 1343 - DNA, 2676 bp, Homo sapiens
tttgcccgactggccgcgcacccagctggcccgcccctgcccgacacgaccgctgcccgccccttgccttcctgacccaggggctccgctggctgcggtcgcctgggagctgccgccagggccaggaggggagcggcacctggaagatgcgcccattggctggtggcctgctcaaggtggtgttcgtggtcttcgcctccttgtgtgcctggtattcggggtacctgctcgcagagctcattccagatgcacccctgtccagtgctgcctatagcatccgcagcatcggggagaggcctgtcctcaaagctccagtccccaaaaggcaaaaatgtgaccactggactccctgcccatctgacacctatgcctacaggttactcagcggaggtggcagaagcaagtacgccaaaatctgctttgaggataacctacttatgggagaacagctgggaaatgttgccagaggaataaacattgccattgtcaactatgtaactgggaatgtgacagcaacacgatgttttgatatgtatgaaggtgataactctggaccgatgacaaagtttattcagagtgctgctccaaaatccctgctcttcatggtgacctatgacgacggaagcacaagactgaataacgatgccaagaatgccatagaagcacttggaagtaaagaaatcaggaacatgaaattcaggtctagctgggtatttattgcagcaaaaggcttggaactcccttccgaaattcagagagaaaagccatcaagttctctggagaccttcttcgactccctggtgacacaagcaaacatccccaacgttttctccatgcagatgtgtggagccggcttgcccgttgctggatctgggaccaacggaggtagtcttgtcttgggtggaattgaaccaagtttgtataaaggagacatctggtatacccctattaaggaagagtggtactaccagatagaaattctgaaattggaaattggaggccaaagccttaatctggactgcagagagtataacgcagacaaggccatcgtggacagtggcaccacgctgctgcgcctgccccagaaggtgtttgatgcggtggtggaagctgtggcccgcgcatctctgattccagaattctctgatggtttctggactgggtcccagctggcgtgctggacgaattcggaaacaccttggtcttacttccctaaaatctccatctacctgagagacgagaactccagcaggtcattccgtatcacaatcctgcctcagctttacattcagcccatgatgggggccggcctgaattatgaatgttaccgattcggcatttccccatccacaaatgcgctggtgatcggtgccacggtgatggagggcttctacgtcatcttcgacagagcccagaagagggtgggcttcgcagcgagcccctgtgcagaaattgcaggtgctgcagtgtctgaaatttccgggcctttctcaacagaggatgtagccagcaactgtgtccccgctcagtctttgagcgagcccattttgtggattgtgtcctatgcgctcatgagcgtctgtggagccatcctccttgtcttaatcgtcctgctgctgctgccgttccggtgtcagcgtcgcccccgtgaccctgaggtcgtcaatgatgagtcctctctggtcagacatcgctggaaatgaatagccaggcctgacctcaagcaaccatgaactcagctattaagaaaatcacatttccagggcagcagccgggatcgatggtggcgctttctcctgtgcccacccgtcttcaatctctgttctgctcccagatgccttctagattcactgtcttttgattcttgattttcaagctttcaaatcctccctacttccaagaaaaataattaaaaaaaaaacttcattctaaaccaaaacagagtggattgggctgcaggctctatggggttcgttatgccaaagtgtctacatgtgccaccaacataaaacaaaaccaagccttggctcgttctcttctctcttcaatctctggaaaaataagtacatatagttgataacccctcttagcttacaggaagctttttgtattaattgcctttgaggttattttccgccagacctcaacctgggtcaaagtggtacaggaaggcttgcagtatgatggcaggagaatcagcctggggcctggggatgtaaccaagctgtacccttgagacctggaaccagagccacaggccccttttgtgggtttctctgtgctctgaatgggagccagaattcactaggaggtcatcaaccgatggtcctcacaagcctcttctgaagatggaaggccttttgcccgttgaggtagaggggaaggaaatctcctcttttgtacccaatacttatgttgtattgttggtgcgaaagtaaaaacactacctcttttgagactttgcccagggtcctgtgcctggatgggggtgcaggcagccttgaccacggctgttcccctcacccaaaagaattatcatcccaacagccaagacccaacaggtgctgaactgtgcatcaaccaggaagagttctatccccaagctggccactatcacatatgcttactcttgcttaaaattaataaatcatgttttgatgagaaaaaactattcta

SEQ ID NO: 1344 - DNA, 1536 bp, Homo sapiens
tttgcccgactggccgcgcacccagctggcccgcccctgcccgacacgaccgctgcccgccccttgccttcctgacccaggggctccgctggctgcggtcgcctgggagctgccgccagggccaggaggggagcggcacctggaagatgcgcccattggctggtggcctgctcaaggtggtgttcgtggtcttcgcctccttgtgtgcctggtattcggggtacctgctcgcagagctcattccagatgcacccctgtccagtgctgcctatagcatccgcagcatcggggagaggcctgtcctcaaagaaattgcaggtgctgcagtgtctgaaatttccgggcctttctcaacagaggatgtagccagcaactgtgtccccgctcagtctttgagcgagcccattttgtggattgtgtcctatgcgctcatgagcgtctgtggagccatcctccttgtcttaatcgtcctgctgctgctgccgttccggtgtcagcgtcgcccccgtgaccctgaggtcgtcaatgatgagtcctctctggtcagacatcgctggaaatgaatagccaggcctgacctcaagcaaccatgaactcagctattaagaaaatcacatttccagggcagcagccgggatcgatggtggcgctttctcctgtgcccacccgtcttcaatctctgttctgctcccagatgccttctagattcactgtcttttgattcttgattttcaagctttcaaatcctccctacttccaagaaaaataattaaaaaaaaaacttcattctaaaccaaaacagagtggattgggctgcaggctctatggggttcgttatgccaaagtgtctacatgtgccaccaacataaaacaaaaccaagccttggctcgttctcttctctcttcaatctctggaaaaataagtacatatagttgataacccctcttagcttacaggaagctttttgtattaattgcctttgaggttattttccgccagacctcaacctgggtcaaagtggtacaggaaggcttgcagtatgatggcaggagaatcagcctggggcctggggatgtaaccaagctgtacccttgagacctggaaccagagccacaggccccttttgtgggtttctctgtgctctgaatgggagccagaattcactaggaggtcatcaaccgatggtcctcacaagcctcttctgaagatggaaggccttttgcccgttgaggtagaggggaaggaaatctcctcttttgtacccaatacttatgttgtattgttggtgcgaaagtaaaaacactacctcttttgagactttgcccagggtcctgtgcctggatgggggtgcaggcagccttgaccacggctgttcccctcacccaaaagaattatcatcccaacagccaagacccaacaggtgctgaactgtgcatcaaccaggaagagttctatccccaagctggccactatcacatatgcttactcttgcttaaaattaataaatcatgttttgatgagaaaaaactattcta

SEQ ID NO: 1345 - DNA, 2507 bp, Homo sapiens
tttgcccgactggccgcgcacccagctggcccgcccctgcccgacacgaccgctgcccgccccttgccttcctgacccaggggctccgctggctgcggtcgcctgggagctgccgccagggccaggaggggagcggcacctggaagatgcgcccattggctggtggcctgctcaaggtggtgttcgtggtcttcgcctccttgtgtgcctggtattcggggtacctgctcgcagagctcattccagatgcacccctgtccagtgctgcctatagcatccgcagcatcggggagaggcctgtcctcaaagctccagtccccaaaaggcaaaaatgtgaccactggactccctgcccatctgacacctatgcctacaggttactcagcggaggtggcagaagcaagtacgccaaaatctgctttgaggataacctacttatgggagaacagctgggaaatgttgccagaggaataaacattgccattgtcaactatgtaactgggaatgtgacagcaacacgatgttttgatatgtatgaaggtgataactctggaccgatgacaaagtttattcagagtgctgctccaaaatccctgctcttcatggtgacctatgacgacggaagcacaagactgaataacgatgccaagaatgccatagaagcacttggaagtaaagaaatcaggaacatgaaattcaggtctagctgggtatttattgcagcaaaaggcttggaactcccttccgaaattcagagagaaaagccatcaagttctctggagaccttcttcgactccctggtgacacaagcaaacatccccaacgttttctccatgcagatgtgtggagccggcttgcccgttgctggatctgggaccaacggaggtagtcttgtcttgggtggaattgaaccaagtttgtataaaggagacatctggtatacccctattaaggaagagtggtactaccagatagaaattctgaaattggaaattggaggccaaagccttaatctggactgcagagagtataacgcagacaaggccatcgtggacagtggcaccacgctgctgcgcctgccccagaaggtgtttgatgcggtggtggaagctgtggcccgcgcatctctgattccagaattctctgatggtttctggactgggtcccagctggcgtgctggacgaattcggaaacaccttggtcttacttccctaaaatctccatctacctgagagacgagaactccagcaggtcattccgtatcacaatcctgcctcagaaattgcaggtgctgcagtgtctgaaatttccgggcctttctcaacagaggatgtagccagcaactgtgtccccgctcagtctttgagcgagcccattttgtggattgtgtcctatgcgctcatgagcgtctgtggagccatcctccttgtcttaatcgtcctgctgctgctgccgttccggtgtcagcgtcgcccccgtgaccctgaggtcgtcaatgatgagtcctctctggtcagacatcgctggaaatgaatagccaggcctgacctcaagcaaccatgaactcagctattaagaaaatcacatttccagggcagcagccgggatcgatggtggcgctttctcctgtgcccacccgtcttcaatctctgttctgctcccagatgccttctagattcactgtcttttgattcttgattttcaagctttcaaatcctccctacttccaagaaaaataattaaaaaaaaaacttcattctaaaccaaaacagagtggattgggctgcaggctctatggggttcgttatgccaaagtgtctacatgtgccaccaacataaaacaaaaccaagccttggctcgttctcttctctcttcaatctctggaaaaataagtacatatagttgataacccctcttagcttacaggaagctttttgtattaattgcctttgaggttattttccgccagacctcaacctgggtcaaagtggtacaggaaggcttgcagtatgatggcaggagaatcagcctggggcctggggatgtaaccaagctgtacccttgagacctggaaccagagccacaggccccttttgtgggtttctctgtgctctgaatgggagccagaattcactaggaggtcatcaaccgatggtcctcacaagcctcttctgaagatggaaggccttttgcccgttgaggtagaggggaaggaaatctcctcttttgtacccaatacttatgttgtattgttggtgcgaaagtaaaaacactacctcttttgagactttgcccagggtcctgtgcctggatgggggtgcaggcagccttgaccacggctgttcccctcacccaaaagaattatcatcccaacagccaagacccaacaggtgctgaactgtgcatcaaccaggaagagttctatccccaagctggccactatcacatatgcttactcttgcttaaaattaataaatcatgttttgatgagaaaaaactattcta

SEQ ID NO: 1346 - DNA, 1432 bp, Homo sapiens
atggctggggcaccctggcgccatctttttccaccgtgcgaaggcaggagcccgagactgggcctgctcaaggtggtgttcgtggtcttcgcctccttgtgtgcctggtattcggggtacctgctcgcagagctcattccagatgcacccctgtccagtgctgcctatagcatccgcagcatcggggagaggcctgtcctcaaagaaattgcaggtgctgcagtgtctgaaatttccgggcctttctcaacagaggatgtagccagcaactgtgtccccgctcagtctttgagcgagcccattttgtggattgtgtcctatgcgctcatgagcgtctgtggagccatcctccttgtcttaatcgtcctgctgctgctgccgttccggtgtcagcgtcgcccccgtgaccctgaggtcgtcaatgatgagtcctctctggtcagacatcgctggaaatgaatagccaggcctgacctcaagcaaccatgaactcagctattaagaaaatcacatttccagggcagcagccgggatcgatggtggcgctttctcctgtgcccacccgtcttcaatctctgttctgctcccagatgccttctagattcactgtcttttgattcttgattttcaagctttcaaatcctccctacttccaagaaaaataattaaaaaaaaaacttcattctaaaccaaaacagagtggattgggctgcaggctctatggggttcgttatgccaaagtgtctacatgtgccaccaacataaaacaaaaccaagccttggctcgttctcttctctcttcaatctctggaaaaataagtacatatagttgataacccctcttagcttacaggaagctttttgtattaattgcctttgaggttattttccgccagacctcaacctgggtcaaagtggtacaggaaggcttgcagtatgatggcaggagaatcagcctggggcctggggatgtaaccaagctgtacccttgagacctggaaccagagccacaggccccttttgtgggtttctctgtgctctgaatgggagccagaattcactaggaggtcatcaaccgatggtcctcacaagcctcttctgaagatggaaggccttttgcccgttgaggtagaggggaaggaaatctcctcttttgtacccaatacttatgttgtattgttggtgcgaaagtaaaaacactacctcttttgagactttgcccagggtcctgtgcctggatgggggtgcaggcagccttgaccacggctgttcccctcacccaaaagaattatcatcccaacagccaagacccaacaggtgctgaactgtgcatcaaccaggaagagttctatccccaagctggccactatcacatatgcttactcttgcttaaaattaataaatcatgttttgatgagaaaaaactattcta

SEQ ID NO: 1347 - DNA, 2526 bp, Homo sapiens
tttgcccgactggccgcgcacccagctggcccgcccctgcccgacacgaccgctgcccgccccttgccttcctgacccaggggctccgctggctgcggtcgcctgggagctgccgccagggccaggaggggagcggcacctggaagatgcgcccattggctggtggcctgctcaaggtggtgttcgtggtcttcgcctccttgtgtgcctggtattcggggtacctgctcgcagagctcattccagatgcacccctgtccagtgctgcctatagcatccgcagcatcggggagaggcctgtcctcaaagctccagtccccaaaaggcaaaaatgtgaccactggactccctgcccatctgacacctatgcctacaggttactcagcggaggtggcagaagcaagtacgccaaaatctgctttgaggataacctacttatgggagaacagctgggaaatgttgccagaggaataaacattgccattgtcaactatgtaactgggaatgtgacagcaacacgatgttttgatatgtatgaaggtgataactctggaccgatgacaaagtttattcagagtgctgctccaaaatccctgctcttcatggtgacctatgacgacggaagcacaagactgaataacgatgccaagaatgccatagaagcacttggaagtaaagaaatcaggaacatgaaattcaggtctagctgggtatttattgcagcaaaaggcttggaactcccttccgaaattcagagagaaaagccatcaagttctctggagaccttcttcgactccctggtgacacaagcaaacatccccaacgttttctccatgcagatgtgtggagccggcttgcccgttgctggatctgggaccaacggaggtagtcttgtcttgggtggaattgaaccaagtttgtataaaggagacatctggtatacccctattaaggaagagtggtactaccagatagaaattctgaaattggaaattggaggccaaagccttaatctggactgcagagagtataacgcagacaaggccatcgtggacagtggcaccacgctgctgcgcctgccccagaaggtgtttgatgcggtggtggaagctgtggcccgcgcatctctgctttacattcagcccatgatgggggccggcctgaattatgaatgttaccgattcggcatttccccatccacaaatgcgctggtgatcggtgccacggtgatggagggcttctacgtcatcttcgacagagcccagaagagggtgggcttcgcagcgagcccctgtgcagaaattgcaggtgctgcagtgtctgaaatttccgggcctttctcaacagaggatgtagccagcaactgtgtccccgctcagtctttgagcgagcccattttgtggattgtgtcctatgcgctcatgagcgtctgtggagccatcctccttgtcttaatcgtcctgctgctgctgccgttccggtgtcagcgtcgcccccgtgaccctgaggtcgtcaatgatgagtcctctctggtcagacatcgctggaaatgaatagccaggcctgacctcaagcaaccatgaactcagctattaagaaaatcacatttccagggcagcagccgggatcgatggtggcgctttctcctgtgcccacccgtcttcaatctctgttctgctcccagatgccttctagattcactgtcttttgattcttgattttcaagctttcaaatcctccctacttccaagaaaaataattaaaaaaaaaacttcattctaaaccaaaacagagtggattgggctgcaggctctatggggttcgttatgccaaagtgtctacatgtgccaccaacataaaacaaaaccaagccttggctcgttctcttctctcttcaatctctggaaaaataagtacatatagttgataacccctcttagcttacaggaagctttttgtattaattgcctttgaggttattttccgccagacctcaacctgggtcaaagtggtacaggaaggcttgcagtatgatggcaggagaatcagcctggggcctggggatgtaaccaagctgtacccttgagacctggaaccagagccacaggccccttttgtgggtttctctgtgctctgaatgggagccagaattcactaggaggtcatcaaccgatggtcctcacaagcctcttctgaagatggaaggccttttgcccgttgaggtagaggggaaggaaatctcctcttttgtacccaatacttatgttgtattgttggtgcgaaagtaaaaacactacctcttttgagactttgcccagggtcctgtgcctggatgggggtgcaggcagccttgaccacggctgttcccctcacccaaaagaattatcatcccaacagccaagacccaacaggtgctgaactgtgcatcaaccaggaagagttctatccccaagctggccactatcacatatgcttactcttgcttaaaattaataaatcatgttttgatgagaaaaaactattcta

SEQ ID NO: 1348 - DNA, 950 bp, Homo sapiens
agtctaacttccgcgcatctacgagggccgggactgccgctacctttctggaaggcgccggccggccagtcaccggagggatcccgccagaggcggctccgcgtctccagcagcggggcagggacccgggcgccccgccctcgccagcgcccgcccccgcccgcccccggcccgccctctgtatctggcccctgggcagctgcccggggaggcggccagcgagctggggccgcgcaatgtcgcacggagccgggctcgtccgcaccacgtgcagcagcggcagcgcgctcggacccggggccggcgcggcccagcccagcgcgagccccttggaggggctgctggacctcagctacccccgcacccacgcggccctgctgaaagtggcgcaaatgggcctgtgctttaacggcagtgccttcgtcttgtacctctctgccgctgttgtagatgcatcttccgtctcccctgagagggacagtcacaacttcaacagctgggcggcctcatcgttctttgccttcctggtcaccatctgctacgctggaaatacatatttcagttttatagcatggagatccaggaccatacagtgatttaccattttgataattaaaaggaaaaaaaaaggaagactctcactgtaaaaacagctgtaggtataatgtatattcccagagaattgtatttaactaattaatgttttttatattcttaaatttgctcacaaattgtggtttgttacaattaaactggatacttatttgcaaagtgttgtagcttataatgaactcttaagtatcttattaatgtattaatgtcttcatagatcatattttcttagacaatgtttaaatagataaattgctaatattgagaatgtgtcaagtttgtaaacctaacttttaagatgccagattcttttttgattaaatgttgcaaaatcccaa

SEQ ID NO: 1349 - DNA, 1124 bp, Homo sapiens
agtctaacttccgcgcatctacgagggccgggactgccgctacctttctggaaggcgccggccggccagtcaccggagggatcccgccagaggcggctccgcgtctccagcagcggggcagggacccgggcgccccgccctcgccagcgcccgcccccgcccgcccccggcccgccctctgtatctggcccctgggcagctgcccggggaggcggccagcgagctggggccgcgcaatgtcgcacggagccgggctcgtccgcaccacgtgcagcagcggcagcgcgctcggacccggggccggcgcggcccagcccagcgcgagccccttggaggggctgctggacctcagctacccccgcacccacgcggccctgctgaaagtggcgcaaatggtcaccctgctgattgccttcatctgtgtgcggagctccctgtggaccaactacagcgcctacagctactttgaagtggtcaccatttgcgacttgataatgatcctcgccttttacctggtccacctcttccgcttctaccgcgtgctcacctgtatcagctggcccctgtcgggcctgtgctttaacggcagtgccttcgtcttgtacctctctgccgctgttgtagatgcatcttccgtctcccctgagagggacagtcacaacttcaacagctgggcggcctcatcgttctttgccttcctggtcaccatctgctacgctggaaatacatatttcagttttatagcatggagatccaggaccatacagtgatttaccattttgataattaaaaggaaaaaaaaaggaagactctcactgtaaaaacagctgtaggtataatgtatattcccagagaattgtatttaactaattaatgttttttatattcttaaatttgctcacaaattgtggtttgttacaattaaactggatacttatttgcaaagtgttgtagcttataatgaactcttaagtatcttattaatgtattaatgtcttcatagatcatattttcttagacaatgtttaaatagataaattgctaatattgagaatgtgtcaagtttgtaaacctaacttttaagatgccagattcttttttgattaaatgttgcaaaatcccaa

SEQ ID NO: 1350 - DNA, 1298 bp, Homo sapiens
agtctaacttccgcgcatctacgagggccgggactgccgctacctttctggaaggcgccggccggccagtcaccggagggatcccgccagaggcggctccgcgtctccagcagcggggcagggacccgggcgccccgccctcgccagcgcccgcccccgcccgcccccggcccgccctctgtatctggcccctgggcagctgcccggggaggcggccagcgagctggggccgcgcaatgtcgcacggagccgggctcgtccgcaccacgtgcagcagcggcagcgcgctcggacccggggccggcgcggcccagcccagcgcgagccccttggaggggctgctggacctcagctacccccgcacccacgcggccctgctgaaagtggcgcaaatggtcaccctgctgattgccttcatctgtgtgcggagctccctgtggaccaactacagcgcctacagctactttgaagtggtcaccatttgcgacttgataatgatcctcgccttttacctggtccacctcttccgcttctaccgcgtgctcacctgtatcagctggcccctgtcggttctggggctgctggtatggacgcttattgctggaactgagtacttccgggtccccgcatttggctgggtcatgtttgtagctgtattttactgggtcctcaccgtcttcttcctcattatctacataacaatgacctacaccaggattccccaggtgccctggacaacagtgggcctgtgctttaacggcagtgccttcgtcttgtacctctctgccgctgttgtagatgcatcttccgtctcccctgagagggacagtcacaacttcaacagctgggcggcctcatcgttctttgccttcctggtcaccatctgctacgctggaaatacatatttcagttttatagcatggagatccaggaccatacagtgatttaccattttgataattaaaaggaaaaaaaaaggaagactctcactgtaaaaacagctgtaggtataatgtatattcccagagaattgtatttaactaattaatgttttttatattcttaaatttgctcacaaattgtggtttgttacaattaaactggatacttatttgcaaagtgttgtagcttataatgaactcttaagtatcttattaatgtattaatgtcttcatagatcatattttcttagacaatgtttaaatagataaattgctaatattgagaatgtgtcaagtttgtaaacctaacttttaagatgccagattcttttttgattaaatgttgcaaaatcccaa

SEQ ID NO: 1351 - DNA, 1007 bp, Homo sapiens
agtctaacttccgcgcatctacgagggccgggactgccgctacctttctggaaggcgccggccggccagtcaccggagggatcccgccagaggcggctccgcgtctccagcagcggggcagggacccgggcgccccgccctcgccagcgcccgcccccgcccgcccccggcccgccctctgtatctggcccctgggcagctgcccggggaggcggccagcgagctggggccgcgcaatgtcgcacggagccgggctcgtccgcaccacgtgcagcagcggcagcgcgctcggacccggggccggcgcggcccagcccagcgcgagccccttggaggggctgctggacctcagctacccccgcacccacgcggccctgctgaaagtggcgcaaatggtcaccctgctgattgccttcatctgtgtgcggagctccctgtggaccaactacagcgcctacagctactttgaagtggtcaccatttgcgacttgataatgatcctcgccttttacctggtccacctcttccgcttctaccgcgtgctcacctgtatcagctggcccctgtcgttctttgccttcctggtcaccatctgctacgctggaaatacatatttcagttttatagcatggagatccaggaccatacagtgatttaccattttgataattaaaaggaaaaaaaaaggaagactctcactgtaaaaacagctgtaggtataatgtatattcccagagaattgtatttaactaattaatgttttttatattcttaaatttgctcacaaattgtggtttgttacaattaaactggatacttatttgcaaagtgttgtagcttataatgaactcttaagtatcttattaatgtattaatgtcttcatagatcatattttcttagacaatgtttaaatagataaattgctaatattgagaatgtgtcaagtttgtaaacctaacttttaagatgccagattcttttttgattaaatgttgcaaaatcccaa

SEQ ID NO: 1352 - DNA, 1461 bp, Homo sapiens
gccggaaggcggcgtccgcgacgcagctgttcacgcttaggatggcaaaacagaagagaaaagttcctgaagtgacagagaaaaagaacaaaaagctgaagaaggcgtcagcagaggggccactgctgggccctgaggctgcaccaagtggcgaaggagccggctccaaggagcgggacggtatgcgggccatcctggggtcctacgacagcgagctgaccccggccgagtactcaccccagctgacgcggcgcatgcgggaggctgaggatatggtgcagaaggtgcacagccacagcgccgagatggaggctcagctgtcgcaggccctggaggagctgggaggccagaaacaaagagcagacatgctggagatggagctgaagatgctgaagtctcagtccagctctgccgaacagagcttcctgttctccagggaggaggcggacacgctcaggttgaaggtcgaggagctggaaggcgagcggagtcggctggaggaggaaaagaggatgctggaggcacagctggagcggcgagctctgcagggtgactatgaccagagcaggaccaaagtgctgcacatgagcctgaaccccaccagtgtggccaggcagcgcctgcgcgaggaccacagccagctgcaggcggagtgcgagcgactgcgcgggctcctgcgcgccatggagagaggaggcaccgtcccagccgaccttgaggctgccgccgcgagtctgccatcgtccaaggaggtggcagagctgaagaagcaggtggagagtgccgagctgaagaaccagcggctcaaggaggttttccagaccaagatccaggagttccgcaaggcctgctacacgctcaccggctaccagatcgacatcaccacggagaaccagtaccggctgacctcgctgtacgccgagcacccaggcgactgcctcatcttcaaggtgggtcctgcgtgtgacggctctccggctgtctcgctctctgtctcctcctgtggggagatccgaccgtagccctcagcaaaggagcagcctcgcgtccaaaggggatggtgtggagggctgggcgggaaggaggtgcactggcccgtcctcgtcaccccctgaggcttctcagccttgggccaaccctatgtggctttgcagccctggacctcctgggtgcagaagaccctaggctgtccccctgactttctcagcctctgtctgtcgcaacttgggcttcgttccatgagggctgcggccgtaggcgtgtgtgtcagtgtgtccagaggcagtggtgcctggggaggactgaagtccgtgtggggccggggcaggggacgccttccaagatgccaggctgcgcagtgggacagcgcagtcccagaagccagcacagggcaaggtagacagactagaagaggaaaggagagccagccgcatctctacactcgcgtcctgcgagccagca

SEQ ID NO: 1353 - DNA, 1054 bp, Homo sapiens
gccggaaggcggcgtccgcgacgcagctgttcacgcttaggtgggcgacgtgggcgcaggatggcaaaacagaagagaaaagttcctgaagtgacagagaaaaagaacaaaaagctgaagaaggcgtcagcagaggggccactgctgggccctgaggctgcaccaagtggcgaaggagccggctccaaggagcgggacggtatgcgggccatcctggggtcctacgacagcgagctgaccccggccgagtactcaccccagctgacgcggcgcatgcgggaggctgaggatatggtgcagaaggtgcacagccacagcgccgagatggaggctcagctgtcgcaggccctggaggagctgggaggccagaaacaaagagcagacatgctggagatggagctgaagatgctgaagtctcagtccagctctgccgaacagagcttcctgttctccagggaggaggcggacacgctcaggttgaaggtcgaggagctggaaggcgagcggagtcggctggaggaggaaaagaggatgctggaggcacagctggagcggcgagctctgcagggtgactatgaccagagcaggaccaaagtgctgcacatgagcctgaaccccaccagtgtggccaggcagcgcctgcgcgaggaccacagccagctgcaggcggagtgcgagcgactgcgcgggctcctgcgcgccatggagagaggaggcaccgtcccagccgaccttgaggctgccgccgcgagtctgccatcgtccaaggaggtggcagagctgaagaagcaggtggagagtgccgagctgaagaaccagcggctcaaggaggttttccagaccaagatccaggagttccgcaaggcctgctacacgctcaccggctaccagatcgacatcaccacggagaaccagtaccggctgacctcgctgtacgccgagcacccaggcgactgcctcatcttcaaggaagccgcactcagccacaagctgtgcggaaagctataggattatcaagatcaaaaggtcagccctccgcctcctctcctccacc

SEQ ID NO: 1354 - DNA, 636 bp, Homo sapiens
gccggaaggcggcgtccgcgacgcagctgttcacgcttaggtgggcgacgtgggcgcaggtgggcgcaggatggcaaaacagaagagaaaagttcctgaagtgacagagaaaaagaacaaaaagctgaagaaggcgtcagcagaggggccactgctgggccctgaggctgcaccaagtggcgaaggagccggctccaaggccaccagcccctcgggttccaagatgcagctactggagacagagttctcacacaccgtgggcgagctcatcgaggtgcacctgcggcgccaggacagcatccctgccttcctcagctcgctcaccctcgagctcttcagccgccagaccgtggcgtagcctgcaggctcgggggcatagccggagccactctgcttggcctgacctgcaggtcccctgccccgccagccacaggctgggtgcacgtcctgcctctccagccccacagggcagcagcatgactgacagacacgctgggacctacgtcgggcttcctgctggggcggccagcaccctctccacgtgcagaccccatgcgtcccggagcctggtgtgtgggcgtcggccaccagcctgggttcctcaccttgtgaaataaaatcttctcccctagacac

SEQ ID NO: 1355 - DNA, 1416 bp, Homo sapiens
gccggaaggcggcgtccgcgacgcagctgttcacgcttaggtgggcgacgtgggcgcaggtgggcgcaggatggcaaaacagaagagaaaagttcctgaagtgacagagaaaaagaacaaaaagctgaagaaggcgtcagcagaggggccactgctgggccctgaggctgcaccaagtggcgaaggagccggctccaaggagcgggacggtatgcgggccatcctggggtcctacgacagcgagctgaccccggccgagtactcaccccagctgacgcggcgcatgcgggaggctgaggatatggtgcagaaggtgcacagccacagcgccgagatggaggctcagctgtcgcaggccctggaggagctgggaggccagaaacaaagagcagacatgctggagatggagctgaagatgctgaagtctcagtccagctctgccgaacagagcttcctgttctccagggaggaggcggacacgctcaggttgaaggtcgaggagctggaaggcgagcggagtcggctggaggaggaaaagaggatgctggaggcacagctggagcggcgagctctgcagggtgactatgaccagagcaggaccaaagtgctgcacatgagcctgaaccccaccagtgtggccaggcagcgcctgcgcgaggaccacagccagctgcaggcggagtgcgagcgactgcgcgggctcctgcgcgccatggagagaggaggcaccgtcccagccgaccttgaggctgccgccgcgagtctgccatcgtccaaggaggtggcagagctgaagaagcaggtggagagtgccgagctgaagaaccagcggctcaaggaggttttccagaccaagatccaggagttccgcaaggcctgctacacgctcaccggctaccagatcgacatcaccacggagaaccagtaccggctgacctcgctgtacgccgagcacccaggcgactgcctcatcttcaaggccaccagcccctcgggttccaagatgcagctactggagacagagttctcacacaccgtgggcgagctcatcgaggtgcacctgcggcgccaggacagcatccctgccttcctcagctcgctcaccctcgagctcttcagccgccagaccgtggcgtagcctgcaggctcgggggcatagccggagccactctgcttggcctgacctgcaggtcccctgccccgccagccacaggctgggtgcacgtcctgcctctccagccccacagggcagcagcatgactgacagacacgctgggacctacgtcgggcttcctgctggggcggccagcaccctctccacgtgcagaccccatgcgtcccggagcctggtgtgtgggcgtcggccaccagcctgggttcctcaccttgtgaaataaaatcttctcccctagacac

SEQ ID NO: 1356 - DNA, 2410 bp, Homo sapiens
gtggtccagtgcttgctggggatggagaaggaacatgaagtagaagtcaatggcaccgacacattgtggggagaaacaggaggaatgccagctcctgagcaggcctcattggtggaggaggggcaaccacagacccgccaggaagctgcctccactggcccaggcatggaacccgagaccacagccaccactattctagcatccgtgaaggagcaggagcttcagtttcagcgactcacccgagaactggaagtggaaaggcagattgttgccagtcagctagaaagatgtaggcttggagcagaatcaccaagcatcgccagcaccagctcaactgagaagtcatttccttggagatcaacagacgtgccaaatactggtgtaagcaaacctagagtttctgacgctgtccagcccaacaactatctcatcaggacagagccagaacaaggaaccctctattcaccagaacagacatctctccatgaaagtgagggatcattgggtaactcaagaagttcaacacaaatgaattcttattccgacagtggataccaggaagcagggagtttccacaacagccagaacgtgagcaaggcagacaacagacagcagcattcattcataggatcaactaacaaccatgtggtgaggaattcaagagctgaaggacaaacactggttcagcacaggcgtgtctccttcaagggggtctctgagaacttctctgggtagtggatttggctctccgtcagtgaccgacccccgacctctgaaccccagtgcatattcctccaccacattacctgctgcacgggcagcctctccgtactcacagagacccgcctccccaacagctatacggcggattgggtcagtcacctcccggcagacctccaatcccaacggaccaacccctcaataccaaaccaccgccagagtggggtccccactgaccctgacggatgcacagactcgagtagcttccccatcccaaggccaggtggggtcgtcgtcccccaaacgctcagggatgaccgccgtaccacagcatctgggaccttcactgcaaaggactgttcatgacatggagcaattcggacagcagcagtatgacatttatgagaggatggttccacccaggccagacagcctgacaggcttacggagttcctatgctagtcagcatagtcagcttgggcaagaccttcgttctgccgtgtctcccgacttgcacattactcctatatatgaggggaggacctattacagcccagtgtaccgcagcccaaaccatggaactgtggagctccaaggatcgcagacggcgttgtatcgcacaggttcagtaggtattggaaatctacaaaggacatccagccaacgaagtacccttacataccaaagaaataattatgctctgaacacaacagctacctacgcggagccctacaggcctatacaataccgagtgcaagagtgcaattataacaggcttcagcatgcagtgccggctgatgatggcaccacaagatccccatcaatagacagcattcagaaggaccccagggagtttgcctggcgtgatcctgagttgcctgaggtcattcacatgcttcagcaccagttcccatctgttcaggcaaatgcagcggcctacctgcagcacctgtgctttggtgacaacaaagtgaagatggaggtgtgtaggttagggggaatcaagcatctggttgaccttctggaccacagagttttggaagttcagaagaatgcttgtggtgcccttcgaaacctcgtttttggcaagtctacagatgaaaataaaatagcaatgaagaatgttggtgggatacctgccttgttgcgactgttgagaaaatctattgatgcagaagtaagggagcttgttacaggagttctttggaatttatcctcatgtgatgctgtaaaaatgacaatcattcgagatgctctctcaaccttaacaaacactgtgattgttccacattctggatggaataactcttcttttgatgatgatcataaaattaaatttcagacttcactagttctgcgtaacacgacaggttgcctaaggaacctcagctccgcgggggaagaagctcggaagcaaatgcggtcctgcgaggggctggtagactcactgttgtatgtgatccacacgtgtgtgaacacatccgattacgacagcaagacggtggagaactgcgtgtgcaccctgaggaacctgtcctatcggctggagctggaggtgccccaggcccggttactgggactgaacgaattggatgacttactaggaaaagagtctcccagcaaagactctgagccaagttgctgggggaagaagaagaaaaagaaaaagaggactccgcaagaagatcaa

SEQ ID NO: 1357 - skipped

SEQ ID NO: 1358 - DNA, 4334 bp, Homo sapiens
gtggtccagtgcttgctggggatggagaaggaacatgaagtagaagtcaatggcaccgacacattgtggggagaaacaggaggaatgccagctcctgagcaggcctcattggtggaggaggggcaaccacagacccgccaggaagctgcctccactggcccaggcatggaacccgagaccacagccaccactattctagcatccgtgaaggagcaggagcttcagtttcagcgactcacccgagaactggaagtggaaaggcagattgttgccagtcagctagaaagatgtaggcttggagcagaatcaccaagcatcgccagcaccagctcaactgagaagtcatttccttggagatcaacagacgtgccaaatactggtgtaagcaaacctagagtttctgacgctgtccagcccaacaactatctcatcaggacagagccagaacaaggaaccctctattcaccagaacagacatctctccatgaaagtgagggatcattgggtaactcaagaagttcaacacaaatgaattcttattccgacagtggataccaggaagcagggagtttccacaacagccagaacgtgagcaaggcagacaacagacagcagcattcattcataggatcaactaacaaccatgtggtgaggaattcaagagctgaaggacaaacactggttcagcacaggcgtgtctccttcaagggggtctctgagaacttctctgggtagtggatttggctctccgtcagtgaccgacccccgacctctgaaccccagtgcatattcctccaccacattacctgctgcacgggcagcctctccgtactcacagagacccgcctccccaacagctatacggcggattgggtcagtcacctcccggcagacctccaatcccaacggaccaacccctcaataccaaaccaccgccagagtggggtccccactgaccctgacggatgcacagactcgagtagcttccccatcccaaggccaggtggggtcgtcgtcccccaaacgctcagggatgaccgccgtaccacagcatctgggaccttcactgcaaaggactgttcatgacatggagcaattcggacagcagcagtatgacatttatgagaggatggttccacccaggccagacagcctgacaggcttacggagttcctatgctagtcagcatagtcagcttgggcaagaccttcgttctgccgtgtctcccgacttgcacattactcctatatatgaggggaggacctattacagcccagtgtaccgcagcccaaaccatggaactgtggagctccaaggatcgcagacggcgttgtatcgcacaggttcaggtattggaaatctacaaaggacatccagccaacgaagtacccttacataccaaagaaataattatgctctgaacacaacagctacctacgcggagccctacaggcctatacaataccgagtgcaagagtgcaattataacaggcttcagcatgcagtgccggctgatgatggcaccacaagatccccatcaatagacagcattcagaaggaccccagggagtttgcctggcgtgatcctgagttgcctgaggtcattcacatgcttcagcaccagttcccatctgttcaggcaaatgcagcggcctacctgcagcacctgtgctttggtgacaacaaagtgaagatggaggtgtgtaggttagggggaatcaagcatctggttgaccttctggaccacagagttttggaagttcagaagaatgcttgtggtgcccttcgaaacctcgtttttggcaagtctacagatgaaaataaaatagcaatgaagaatgttggtgggatacctgccttgttgcgactgttgagaaaatctattgatgcagaagtaagggagcttgttacaggagttctttggaatttatcctcatgtgatgctgtaaaaatgacaatcattcgagatgctctctcaaccttaacaaacactgtgattgttccacattctggatggaataactcttcttttgatgatgatcataaaattaaatttcagacttcactagttctgcgtaacacgacaggttgcctaaggaacctcagctccgcgggggaagaagctcggaagcaaatgcggtcctgcgaggggctggtagactcactgttgtatgtgatccacacgtgtgtgaacacatccgattacgacagcaagacggtggagaactgcgtgtgcaccctgaggaacctgtcctatcggctggagctggaggtgccccaggcccggttactgggactgaacgaattggatgacttactaggaaaagagtctcccagcaaagactctgagccaagttgctgggggaagaagaagaaaaagaaaaagaggactccgcaagaagatcaatgggatggagttggtcctatcccaggactgtcgaagtcccccaaaggggttgagatgctgtggcacccatcggtggtaaaaccatatctgactcttctagcagaaagttccaacccagccaccttggaaggctctgcagggtctctccagaacctctctgctggcaactggaagtttgcagcatatatccgggcggccgtccgaaaagaaaaggggctccccatccttgtggagcttctgagaatggataacgatagagttgtttcttccgtggcaacagccttgaggaatatggcactagatgttcgcaacaaggagctcataggcaaatacgccatgcgagacctggtcaaccggctccccggcggcaatggccccagtgtcttgtctgatgagaccatggcagccatctgctgtgctctgcacgaggtcaccagcaaaaacatggagaacgcaaaagccctggccgactcaggaggcatagagaagctggtgaacataaccaaaggcaggggcgacagatcatctctgaaagtggtgaaggcagcagcccaggtcttgaatacattatggcaatatcgggacctccggagcatttataaaaaggatgggtggaatcagaaccattttattacacctgtgtcgacattggagcgagaccgattcaaatcacatccttccttgtctaccaccaaccaacagatgtcacccatcattcagtcagtcggcagcacctcttcctcaccagcactgttaggaatcagagaccctcgctctgaatacgataggacccagccacctatgcagtattacaatagccaaggggatgccacacataaaggcctgtaccctggctccagcaaaccttcaccaatttacatcagttcctattcctcaccagcaagagaacaaaatagacggctacagcatcaacagctgtattatagtcaagatgactccaacagaaagaactttgatgcatacagattgtatttgcagtctcctcatagctatgaagatccttattttgatgaccgagttcactttccagcttctactgattactcaacacagtatggactgaaatcgaccacaaattatgtagacttttattccactaaacgaccttcttatagagcagaacagtacccagggtccccagactcatgggtgtagcatcaagatgcccaacagaggaactctttctttctaaccttgttcagattgaggtgaaaagtccatcttgctgatttgatgattgaaatgtgaaagtgaagtggaaggaatgaatgaagtgtgttttttttttcttttttgaggaattatcagggaagtgaggaaatgtttgggagaggactttctaagctctatttaggtgttagatctaattacttatagattctgtagtctggtgaaggtgtgggtgacgtgatgagaggtttgagaaatgggtgaaatgaaatgggggatatgtaggtcaaatcaaattaaagatgatttttttaatgtgaataaagttatgttctgatagtttgtacagaaaaaataaaatggatgcccatgttttattgctattactaaatgtcaagattgtatgctattatgtcttgtaaatttcttttgttggtgtaaatatggaaatgccacattggttaagtgccatcatttgtaatgcaatgtgtcacttgaaaagagatttgaagaaactgacaacttcaaaaacaaatgagaagcccaaggaactgtgagcaattaaaagcaaaccgcgacaccctttgtctccaccacacatagtgtactttggaagcacaacgtccaggctggtaccgcagcgccatgcccattcctcgcctcattcataggacacttcactgccattttctattcacataaaagaaaaataaatgtggaaatttcatccttggaa

SEQ ID NO: 1359 - DNA, 4414 bp, Homo sapiens
gtggtccagtgcttgctggggatggagaaggaacatgaagtagaagtcaatggcaccgacacattgtggggagaaacaggaggaatgccagctcctgagcaggcctcattggtggaggaggggcaaccacagacccgccaggaagctgcctccactggcccaggcatggaacccgagaccacagccaccactattctagcatccgtgaaggagcaggagcttcagtttcagcgactcacccgagaactggaagtggaaaggcagattgttgccagtcagctagaaagatgtaggcttggagcagaatcaccaagcatcgccagcaccagctcaactgagaagtcatttccttggagatcaacagacgtgccaaatactggtgtaagcaaacctagagtttctgacgctgtccagcccaacaactatctcatcaggacagagccagaacaaggaaccctctattcaccagaacagacatctctccatgaaagtgagggatcattgggtaactcaagaagttcaacacaaatgaattcttattccgacagtggataccaggaagcagggagtttccacaacagccagaacgtgagcaaggcagacaacagacagcagcattcattcataggatcaactaacaaccatgtggtgaggaattcaagagctgaaggacaaacactggttcagccatcagtagccaatcgggccatgagaagagttagttcagttccatctagagcacagtctccttcttatgttatcagcacaggcgtgtctccttcaagggggtctctgagaacttctctgggtagtggatttggctctccgtcagtgaccgacccccgacctctgaaccccagtgcatattcctccaccacattacctgctgcacgggcagcctctccgtactcacagagacccgcctccccaacagctatacggcggattgggtcagtcacctcccggcagacctccaatcccaacggaccaacccctcaataccaaaccaccgccagagtggggtccccactgaccctgacggatgcacagactcgagtagcttccccatcccaaggccaggtggggtcgtcgtcccccaaacgctcagggatgaccgccgtaccacagcatctgggaccttcactgcaaaggactgttcatgacatggagcaattcggacagcagcagtatgacatttatgagaggatggttccacccaggccagacagcctgacaggcttacggagttcctatgctagtcagcatagtcagcttgggcaagaccttcgttctgccgtgtctcccgacttgcacattactcctatatatgaggggaggacctattacagcccagtgtaccgcagcccaaaccatggaactgtggagctccaaggatcgcagacggcgttgtatcgcacaggttcagtaggtattggaaatctacaaaggacatccagccaacgaagtacccttacataccaaagaaataattatgctctgaacacaacagctacctacgcggagccctacaggcctatacaataccgagtgcaagagtgcaattataacaggcttcagcatgcagtgccggctgatgatggcaccacaagatccccatcaatagacagcattcagaaggaccccagggagtttgcctggcgtgatcctgagttgcctgaggtcattcacatgcttcagcaccagttcccatctgttcaggcaaatgcagcggcctacctgcagcacctgtgctttggtgacaacaaagtgaagatggaggtgtgtaggttagggggaatcaagcatctggttgaccttctggaccacagagttttggaagttcagaagaatgcttgtggtgcccttcgaaacctcgtttttggcaagtctacagatgaaaataaaatagcaatgaagaatgttggtgggatacctgccttgttgcgactgttgagaaaatctattgatgcagaagtaagggagcttgttacaggagttctttggaatttatcctcatgtgatgctgtaaaaatgacaatcattcgagatgctctctcaaccttaacaaacactgtgattgttccacattctggatggaataactcttcttttgatgatgatcataaaattaaatttcagacttcactagttctgcgtaacacgacaggttgcctaaggaacctcagctccgcgggggaagaagctcggaagcaaatgcggtcctgcgaggggctggtagactcactgttgtatgtgatccacacgtgtgtgaacacatccgattacgacagcaagacggtggagaactgcgtgtgcaccctgaggaacctgtcctatcggctggagctggaggtgccccaggcccggttactgggactgaacgaattggatgacttactaggaaaagagtctcccagcaaagactctgagccaagttgctgggggaagaagaagaaaaagaaaaagaggactccgcaagaagatcaatgggatggagttggtcctatcccaggactgtcgaagtcccccaaaggggttgagatgctgtggcacccatcggtggtaaaaccatatctgactcttctagcagaaagttccaacccagccaccttggaaggctctgcagggtctctccagaacctctctgctggcaactggaagtttgcagcatatatccgggcggccgtccgaaaagaaaaggggctccccatccttgtggagcttctgagaatggataacgatagagttgtttcttccgtggcaacagccttgaggaatatggcactagatgttcgcaacaaggagctcataggcaaatacgccatgcgagacctggtcaaccggctccccggcggcaatggccccagtgtcttgtctgatgagaccatggcagccatctgctgtgctctgcacgaggtcaccagcaaaaacatggagaacgcaaaagccctggccgactcaggaggcatagagaagctggtgaacataaccaaaggcaggggcgacagatcatctctgaaagtggtgaaggcagcagcccaggtcttgaatacattatggcaatatcgggacctccggagcatttataaaaaggatgggtggaatcagaaccattttattacacctgtgtcgacattggagcgagaccgattcaaatcacatccttccttgtctaccaccaaccaacagatgtcacccatcattcagtcagtcggcagcacctcttcctcaccagcactgttaggaatcagagaccctcgctctgaatacgataggacccagccacctatgcagtattacaatagccaaggggatgccacacataaaggcctgtaccctggctccagcaaaccttcaccaatttacatcagttcctattcctcaccagcaagagaacaaaatagacggctacagcatcaacagctgtattatagtcaagatgactccaacagaaagaactttgatgcatacagattgtatttgcagtctcctcatagctatgaagatccttattttgatgaccgagttcactttccagcttctactgattactcaacacagtatggactgaaatcgaccacaaattatgtagacttttattccactaaacgaccttcttatagagcagaacagtacccagggtccccagactcatgggtgtagcatcaagatgcccaacagaggaactctttctttctaaccttgttcagattgaggtgaaaagtccatcttgctgatttgatgattgaaatgtgaaagtgaagtggaaggaatgaatgaagtgtgttttttttttcttttttgaggaattatcagggaagtgaggaaatgtttgggagaggactttctaagctctatttaggtgttagatctaattacttatagattctgtagtctggtgaaggtgtgggtgacgtgatgagaggtttgagaaatgggtgaaatgaaatgggggatatgtaggtcaaatcaaattaaagatgatttttttaatgtgaataaagttatgttctgatagtttgtacagaaaaaataaaatggatgcccatgttttattgctattactaaatgtcaagattgtatgctattatgtcttgtaaatttcttttgttggtgtaaatatggaaatgccacattggttaagtgccatcatttgtaatgcaatgtgtcacttgaaaagagatttgaagaaactgacaacttcaaaaacaaatgagaagcccaaggaactgtgagcaattaaaagcaaaccgcgacaccctttgtctccaccacacatagtgtactttggaagcacaacgtccaggctggtaccgcagcgccatgcccattcctcgcctcattcataggacacttcactgccattttctattcacataaaagaaaaataaatgtggaaatttcatccttggaa

SEQ ID NO: 1360-1362 - skipped (3 entries)

SEQ ID NO: 1363 - DNA, 2171 bp, Homo sapiens
gtggtccagtgcttgctggggatggagaaggaacatgaagtagaagtcaatggcaccgacacattgtggggagaaacaggaggaatgccagctcctgagcaggcctcattggtggaggaggggcaaccacagacccgccaggaagctgcctccactggcccaggcatggaacccgagaccacagccaccactattctagcatccgtgaaggagcaggagcttcagtttcagcgactcacccgagaactggaagtggaaaggcagattgttgccagtcagctagaaagatgtaggcttggagcagaatcaccaagcatcgccagcaccagctcaactgagaagtcatttccttggagatcaacagacgtgccaaatactggtgtaagcaaacctagagtttctgacgctgtccagcccaacaactatctcatcaggacagagccagaacaaggaaccctctattcaccagaacagacatctctccatgaaagatcattgggtaactcaagaagttcaacacaaatgaattcttattccgacagtggataccaggaagcagggagtttccacaacagccagaacgtgagcaaggcagacaacagacagcagcattcattcataggatcaactaacaaccatgtggtgaggaattcaagagctgaaggacaaacactggttcagccatcagtagccaatcgggccatgagaagagttagttcagttccatctagagcacagtctccttcttatgttatcagcacaggcgtgtctccttcaagggggtctctgagaacttctctgggtagtggatttggctctccgtcagtgaccgacccccgacctctgaaccccagtgcatattcctccaccacattacctgctgcacgggcagcctctccgtactcacagagacccgcctccccaacagctatacggcggattgggtcagtcacctcccggcagacctccaatcccaacggaccaacccctcaataccaaaccaccgccagagtggggtccccactgaccctgacggatgcacagactcgagtagcttccccatcccaaggccaggtggggtcgtcgtcccccaaacgctcagggatgaccgccgtaccacagcatctgggaccttcactgcaaaggactgttcatgacatggagcaattcggacagcagcagtatgacatttatgagaggatggttccacccaggccagacagcctgacaggcttacggagttcctatgctagtcagcatagtcagcttgggcaagaccttcgttctgccgtgtctcccgacttgcacattactcctatatatgaggggaggacctattacagcccagtgtaccgcagcccaaaccatggaactgtggagctccaaggatcgcagacggcgttgtatcgcacaggttcagtaggtattggaaatctacaaaggacatccagccaacgaagtacccttacataccaaagaaataattatgctctgaacacaacagctacctacgcggagccctacaggcctatacaataccgagtgcaagagtgcaattataacaggcttcagcatgcagtgccggctgatgatggcaccacaagatccccatcaatagacagcattcagaaggaccccagggagtttgcctggcgtgatcctgagttgcctgaggtcattcacatgcttcagcaccagttcccatctgttcaggcaaatgcagcggcctacctgcagcacctgtgctttggtgacaacaaagtgaagatggaggtgtgtaggttagggggaatcaagcatctggttgaccttctggaccacagagttttggaagttcagaagaatgcttgtggtgcccttcgaaacctcgtttttggcaagtctacagatgaaaataaaatagcaatgaagaatgttggtgggatacctgccttgttgcgactgttgagaaaatctattgatgcagaagtaagggagcttgttacaggagttctttggaatttatcctcatgtgatgctgtaaaaatgacaatcattcgagatgctctctcaaccttaacaaacactgtgattgttccacattctggatggaataactcttcttttgatgatgatcataaaattaaatttcagacttcactagttctgcgtaacacgacaggttgcctaag

SEQ ID NO: 1364 - DNA, 2909 bp, Homo sapiens
gtggtccagtgcttgctggggatggagaaggaacatgaagtagaagtcaatggcaccgacacattgtggggagaaacaggaggaatgccagctcctgagcaggcctcattggtggaggaggggcaaccacagacccgccaggaagctgcctccactggcccaggcatggaacccgagaccacagccaccactattctagcatccgtgaaggagcaggagcttcagtttcagcgactcacccgagaactggaagtggaaaggcagattgttgccagtcagctagaaagatgtaggcttggagcagaatcaccaagcatcgccagcaccagctcaactgagaagtcatttccttggagatcaacagacgtgccaaatactggtgtaagcaaacctagagtttctgacgctgtccagcccaacaactatctcatcaggacagagccagaacaaggaaccctctattcaccagaacagacatctctccatgaaagtgagggatcattgggtaactcaagaagttcaacacaaatgaattcttattccgacagtggataccaggaagcagggagtttccacaacagccagaacgtgagcaaggcagacaacagacagcagcattcattcataggatcaactaacaaccatgtggtgaggaattcaagagctgaaggacaaacactggttcagccatcagtagccaatcgggccatgagaagagttagttcagttccatctagagcacagtctccttcttatgttatcagcacaggcgtgtctccttcaagggggtctctgagaacttctctgggtagtggatttggctctccgtcagtgaccgacccccgacctctgaaccccagtgcatattcctccaccacattacctgctgcacgggcagcctctccgtactcacagagacccgcctccccaacagctatacggcggattgggtcagtcacctcccggcagacctccaatcccaacggaccaacccctcaataccaaaccaccgccagagtggggtccccactgaccctgacggatgcacagactcgagtagcttccccatcccaaggccaggtggggtcgtcgtcccccaaacgctcagggatgaccgccgtaccacagcatctgggaccttcactgcaaaggactgttcatgacatggagcaattcggacagcagcagtatgacatttatgagaggatggttccacccaggccagacagcctgacaggcttacggagttcctatgctagtcagcatagtcagcttgggcaagaccttcgttctgccgtgtctcccgacttgcacattactcctatatatgaggggaggacctattacagcccagtgtaccgcagcccaaaccatggaactgtggagctccaaggatcgcagacggcgttgtatcgcacaggttcagtaggtattggaaatctacaaaggacatccagccaacgaagtacccttacataccaaagaaataattatgctctgaacacaacagctacctacgcggagccctacaggcctatacaataccgagtgcaagagtgcaattataacaggcttcagcatgcagtgccggctgatgatggcaccacaagatccccatcaatagacagcattcagaaggaccccagggagtttgcctggcgtgatcctgagttgcctgaggtcattcacatgcttcagcaccagttcccatctgttcaggcaaatgcagcggcctacctgcagcacctgtgctttggtgacaacaaagtgaagatggaggtgtgtaggttagggggaatcaagcatctggttgaccttctggaccacagagttttggaagttcagaagaatgcttgtggtgcccttcgaaacctcgtttttggcaagtctacagatgaaaataaaatagcaatgaagaatgttggtgggatacctgccttgttgcgactgttgagaaaatctattgatgcagaagtaagggagcttgttacaggagttctttggaatttatcctcatgtgatgctgtaaaaatgacaatcattcgagatgctctctcaaccttaacaaacactgtgattgttccacattctggatggaataactcttcttttgatgatgatcataaaattaaatttcagacttcactagttctgcgtaacacgacaggttgcctaaggaacctcagctccgcgggggaagaagctcggaagcaaatgcggtcctgcgaggggctggtagactcactgttgtatgtgatccacacgtgtgtgaacacatccgattacgacagcaagacggtggagaactgcgtgtgcaccctgaggaacctgtcctatcggctggagctggaggtgccccaggcccggttactgggactgaacgaattggatgacttactaggaaaagagtctcccagcaaagactctgagccaagttgctgggggaagaagaagaaaaagaaaaagaggactccgcaagaagatcaatgggatggagttggtcctatcccaggactgtcgaagtcccccaaaggggttgagatgctgtggcacccatcggtggtaaaaccatatctgactcttctagcagaaagttccaacccagccaccttggaaggctctgcagggtctctccagaacctctctgctggcaactggaagtttgcagcatatatccgggcggccgtccgaaaagaaaaggggctccccatccttgtggagcttctgagaatggataacgatagagttgtttcttccgtggcaacagccttgaggaatatggcactagatgttcgcaacaaggagctcataggtatgttctggtgacaagatgagctgtaaatgtgagagcagctacaaaattcatgaaactcttcttttgattaataaatatatggcttgtaaaatca

SEQ ID NO: 1365 - skipped

SEQ ID NO: 1366 - DNA, 4285 bp, Homo sapiens
gtggtccagtgcttgctggggatggagaaggaacatgaagtagaagtcaatggcaccgacacattgtggggagaaacaggaggaatgccagctcctgagcaggcctcattggtggaggaggggcaaccacagacccgccaggaagctgcctccactggcccaggcatggaacccgagaccacagccaccactattctagcatccgtgaaggagcaggagcttcagtttcagcgactcacccgagaactggaagtggaaaggcagattgttgccagtcagctagaaagatgtaggcttggagcagaatcaccaagcatcgccagcaccagctcaactgagaagtcatttccttggagatcaacagacgtgccaaatactggtgtaagcaaacctagagtttctgacgctgtccagcccaacaactatctcatcaggacagagccagaacaaggaaccctctattcaccagaacagacatctctccatgaaagtgagggatcattgggtaactcaagaagttcaacacaaatgaattcttattccgacagtggataccaggaagcagggagtttccacaacagccagaacgtgagcaaggcagacaacagacagcagcattcattcataggatcaactaacaaccatgtggtgaggaattcaagagctgaaggacaaacactggttcagccatcagtagccaatcgggccatgagaagagttagttcagttccatctagagcacagtctccttcttatgttatcagcacaggcgtgtctccttcaagggggtctctgagaacttctctgggtagtggatttggctctccgtcagtgaccgacccccgacctctgaaccccagtgcatattcctccaccacattacctgctgcacgggcagcctctccgtactcacagagacccgcctccccaacagctatacggcggattgggtcagtcacctcccggcagacctccaatcccaacggaccaacccctcaataccaaaccaccgccagagtggggtccccactgaccctgacggatgcacagactcgagtagcttccccatcccaaggccaggtggggtcgtcgtcccccaaacgctcagggatgaccgccgtaccacagcatctgggaccttcactgcaaaggactgttcatgacatggagcaattcggacagcagcagtatgacatttatgagaggatggttccacccaggccagacagcctgacaggcttacggagttcctatgctagtcagcatagtcagcttgggcaagaccttcgttctgccgtgtctcccgacttgcacattactcctatatatgaggggaggacctattacagcccagtgtaccgcagcccaaaccatggaactgtggagctccaaggatcgcagacggcgttgtatcgcacaggttcagtaggtattggaaatctacaaaggacatccagccaacgaagtacccttacataccaaagaaataattatgctctgaacacaacagctacctacgcggagccctacaggcctatacaataccgagtgcaagagtgcaattataacaggcttcagcatgcagtgccggctgatgatggcaccacaagatccccatcaatagacagcattcagaaggaccccagggagtttgcctggcgtgatcctgagttgcctgaggtcattcacatgcttcagcaccagttcccatctgttcaggcaaatgcagcggcctacctgcagcacctgtgctttggtgacaacaaagtgaagatggaggtgtgtaggttagggggaatcaagcatctggttgaccttctggaccacagagttttggaagttcagaagaatgcttgtggtgcccttcgaaacctcgtttttggcaagtctacagatgaaaataaaatagcaatgaagaatgttggtgggatacctgccttgttgcgactgttgagaaaatctattgatgcagaagtaagggagcttgttacaggagttctttggaatttatcctcatgtgatgctgtaaaaatgacaatcattcgagatgctctctcaaccttaacaaacactgtgattgttccacattctggatggaataactcttcttttgatgatgatcataaaattaaatttcagacttcactagttctgcgtaacacgacaggttgcctaaggaacctcagctccgcgggggaagaagctcggaagcaaatgcggtcctgcgaggggctggtagactcactgttgtatgtgatccacacgtgtgtgaacacatccgattacgacagcaagacggtggagaactgcgtgtgcaccctgaggaacctgtcctatcggctggagctggaggtgccccaggcccggttactgggactgaacgaattggatgacttactaggaaaagagtctcccagcaaagactctgagccaagttgctgggggaagaagaagaaaaagaaaaagaggactccgcaagaagatcaatgggatggagttggtcctatcccaggactgtcgaagtcccccaaaggggttgagatgctgtggcacccatcggtggtaaaaccatatctgactcttctagcagaaagttccaacccagccaccttggaaggctctgcagggtctctccagaacctctctgctggcaactggaagtttgcagcatatatccgggcggccgtccgaaaagaaaaggggctccccatccttgtggagcttctgagaatggataacgatagagttgtttcttccgtggcaacagccttgaggaatatggcactagatgttcgcaacaaggagctcataggcaaatacgccatgcgagacctggtcaaccggctccccggcggcaatggccccagtgtcttgtctgatgagaccatggcagccatctgctgtgctctgcacgaggtcaccagcaaaaacatggagaacgcaaaagccctggccgactcaggaggcatagagaagctggtgaacataaccaaaggcaggggcgacagatcatctctgaaagtggtgaaggcagcagcccaggtcttgaatacattatggcaatatcgggacctccggagcatttataaaaaggatgggtggaatcagaaccattttattacacctgtgtcgacattggagcgagaccgattcaaatcacatccttccttgtctaccaccaaccaacagatgtcacccatcattcagtcaggctccagcaaaccttcaccaatttacatcagttcctattcctcaccagcaagagaacaaaatagacggctacagcatcaacagctgtattatagtcaagatgactccaacagaaagaactttgatgcatacagattgtatttgcagtctcctcatagctatgaagatccttattttgatgaccgagttcactttccagcttctactgattactcaacacagtatggactgaaatcgaccacaaattatgtagacttttattccactaaacgaccttcttatagagcagaacagtacccagggtccccagactcatgggtgtagcatcaagatgcccaacagaggaactctttctttctaaccttgttcagattgaggtgaaaagtccatcttgctgatttgatgattgaaatgtgaaagtgaagtggaaggaatgaatgaagtgtgttttttttttcttttttgaggaattatcagggaagtgaggaaatgtttgggagaggactttctaagctctatttaggtgttagatctaattacttatagattctgtagtctggtgaaggtgtgggtgacgtgatgagaggtttgagaaatgggtgaaatgaaatgggggatatgtaggtcaaatcaaattaaagatgatttttttaatgtgaataaagttatgttctgatagtttgtacagaaaaaataaaatggatgcccatgttttattgctattactaaatgtcaagattgtatgctattatgtcttgtaaatttcttttgttggtgtaaatatggaaatgccacattggttaagtgccatcatttgtaatgcaatgtgtcacttgaaaagagatttgaagaaactgacaacttcaaaaacaaatgagaagcccaaggaactgtgagcaattaaaagcaaaccgcgacaccctttgtctccaccacacatagtgtactttggaagcacaacgtccaggctggtaccgcagcgccatgcccattcctcgcctcattcataggacacttcactgccattttctattcacataaaagaaaaataaatgtggaaatttcatccttggaa

SEQ ID NO: 1367 - DNA, 2374 bp, Homo sapiens
gtggtccagtgcttgctggggatggagaaggaacatgaagtagaagtcaatggcaccgacacattgtggggagaaacaggaggaatgccagctcctgagcaggcctcattggtggaggaggggcaaccacagacccgccaggaagctgcctccactggcccaggcatggaacccgagaccacagccaccactattctagcatccgtgaaggagcagctcaactgagaagtcatttccttggagatcaacagacgtgccaaatactggtgtaagcaaacctagagtttctgacgctgtccagcccaacaactatctcatcaggacagagccagaacaaggaaccctctattcaccagaacagacatctctccatgaaagtgagggatcattgggtaactcaagaagttcaacacaaatgaattcttattccgacagtggataccaggaagcagggagtttccacaacagccagaacgtgagcaaggcagacaacagacagcagcattcattcataggatcaactaacaaccatgtggtgaggaattcaagagctgaaggacaaacactggttcagccatcagtagccaatcgggccatgagaagagttagttcagttccatctagagcacagtctccttcttatgttatcagcacaggcgtgtctccttcaagggggtctctgagaacttctctgggtagtggatttggctctccgtcagtgaccgacccccgacctctgaaccccagtgcatattcctccaccacattacctgctgcacgggcagcctctccgtactcacagagacccgcctccccaacagctatacggcggattgggtcagtcacctcccggcagacctccaatcccaacggaccaacccctcaataccaaaccaccgccagagtggggtccccactgaccctgacggatgcacagactcgagtagcttccccatcccaaggccaggtggggtcgtcgtcccccaaacgctcagggatgaccgccgtaccacagcatctgggaccttcactgcaaaggactgttcatgacatggagcaattcggacagcagcagtatgacatttatgagaggatggttccacccaggccagacagcctgacaggcttacggagttcctatgctagtcagcatagtcagcttgggcaagaccttcgttctgccgtgtctcccgacttgcacattactcctatatatgaggggaggacctattacagcccagtgtaccgcagcccaaaccatggaactgtggagctccaaggatcgcagacggcgttgtatcgcacaggttcagtaggtattggaaatctacaaaggacatccagccaacgaagtacccttacataccaaagaaataattatgctctgaacacaacagctacctacgcggagccctacaggcctatacaataccgagtgcaagagtgcaattataacaggcttcagcatgcagtgccggctgatgatggcaccacaagatccccatcaatagacagcattcagaaggaccccagggagtttgcctggcgtgatcctgagttgcctgaggtcattcacatgcttcagcaccagttcccatctgttcaggcaaatgcagcggcctacctgcagcacctgtgctttggtgacaacaaagtgaagatggaggtgtgtaggttagggggaatcaagcatctggttgaccttctggaccacagagttttggaagttcagaagaatgcttgtggtgcccttcgaaacctcgtttttggcaagtctacagatgaaaataaaatagcaatgaagaatgttggtgggatacctgccttgttgcgactgttgagaaaatctattgatgcagaagtaagggagcttgttacaggagttctttggaatttatcctcatgtgatgctgtaaaaatgacaatcattcgagatgctctctcaaccttaacaaacactgtgattgttccacattctggatggaataactcttcttttgatgatgatcataaaattaaatttcagacttcactagttctgcgtaacacgacaggttgcctaaggaacctcagctccgcgggggaagaagctcggaagcaaatgcggtcctgcgaggggctggtagactcactgttgtatgtgatccacacgtgtgtgaacacatccgattacgacagcaagacggtggagaactgcgtgtgcaccctgaggaacctgtcctatcggctggagctggaggtgccccaggcccggttactgggactgaacgaattggatgacttactaggaaaagagtctcccagcaaagactctgagccaagttgctgggggaagaagaagaaaaagaaaaagaggactccgcaagaagatcaa

SEQ ID NO: 1368-1390 - skipped (23 entries)

SEQ ID NO: 1391 - DNA, 2343 bp, Homo sapiens
atatcccagtggcccccgtgcggcgactttagctgctgctgtctcagccgctccacagcgacggcagcggctgcggcttagtcggtggcggccggcggcggctgcgggctgagcggcgagtttccgatttaaagctgagctgcgaggaaaatggcggcgggaggatcaaaatacttgctggatggtggactcagagaccaataaaaataaactgcttgaacatcctttgactggttagccaggtacaaggaaatggtagaactagtgatctcacccagcctcactgtaaacagcgattgtctggataaactgaagtttaaccgtgctgacgctgctgtgtggactctgagtgacagacaaggcatcaccaaatcggcccccctgagagtgtcccagctcttctccagatcttgcccacgtgtcctcccccgccagccttccacagccatggcagcctacggccagacgcagtacagtgcggggatccagcaggctaccccctatacagcttacccacctccagcacaagcctatggaatcccttcctacagcatcaagacagaagacagcttgaaccattcccctggccagagtggattcctcagctatggctccagcttcagcacctcacccactggacagagcccatacacctaccagatgcacggcacaacagggttctatcaaggaggaaatggactgggcaacgcagccggtttcgggagtgtgcaccaggactatccttcctaccccggcttcccccagagccagtacccccagtattacggctcatcctacaaccctccctacgtcccggccagcagcatctgcccttcgcccctctccacgtccacctacgtcctccaggaggcatctcacaacgtccccaaccagagttccgagtcacttgctggtgaatacaacacacacaatggaccttccacaccagcgaaagagggagacacagacaggccgcaccgggcctccgacgggaagctccgaggccggtctaagaggagcagtgacccgtccccggcaggggacaatgagattgagcgtgtgttcgtgtgggacttggatgagacaataattatttttcactccttactcacggggacatttgcatccagatacgggaaggacaccacgacgtccgtgcgcattggccttatgatggaagagatgatcttcaaccttgcagatacacatctgttcttcaatgacctggaggattgtgaccagatccacgttgatgacgtctcatcagatgacaatggccaagatttaagcacatacaacttctccgctgacggcttccacagttcggccccaggagccaacctgtgcctgggctctggcgtgcacggcggcgtggactggatgaggaagctggccttccgctaccggcgggtgaaggagatgtacaatacctacaagaacaacgttggtgggaaggagagctgcttcgagaggataatgcagagattcggcagaaaagctgtctacgtggtgatcggtgatggtgtggaagaggagcaaggagcgaaaaagcacaacatgcctttctggcggatatcctgccacgcagacctggaggcactgaggcacgccctggagctggagtatttatagcaggatcagcagcatctccacctgccatctcaccctcagaccccctcgccttccccacctccccaccgagaactccagagacccagatgttggacaccaggaaggggccccacagccgagacgacgtgtccagtgaccatctcagaagccgtccatcagtccaaatgggggttctgagaaggaaagtacccaacattggcttcggagtatttgactttggggaaaagggctggctcggagtctagactcttctgtaagactcacagaacaaaagcaaggaattgctgatttggggggtgcctggtgatgaggaggggatgggtttgtcttgtcttctttttaatttatggactagtctcattactccggaattatgctcttgtacctgtgtggctgggtttcttagtcgttggtttggtttggttttttgaactggtatgtggggtggttcacagttctaatgtaagcactctattctccaagttgtgctttgtggggacaatcattctttgaacattagagaggaaggcagttcaagctgttgaaaagactattgcttatttttgtttttaaagacctacttgacgtcatgtggacagtgcacgtgccttacgctacatcttgttttctaggaagagggggatgctgggaaggaatgggtgctttgtgatggataaaaggcattaaataaaaccacgtttacattttgaa

SEQ ID NO: 1392 - DNA, 2411 bp, Homo sapiens
atatcccagtggcccccgtgcggcgactttagctgctgctgtctcagccgctccacagcgacggcagcggctgcggcttagtcggtggcggccggcggcggctgcgggctgagcggcgagtttccgatttaaagctgagctgcgaggaaaatggcggcgggaggtacaaggaaatggtagaactagtgatctcacccagcctcactgtaaacagcgattgtctggataaactgaagtttaaccgtgctgacgctgctgtgtggactctgagtgacagacaaggcatcaccaaatcggcccccctgagagtgtcccagctcttctccagatcttgcccacgtgtcctcccccgccagccttccacagccatggcagcctacggccagacgcagtacagtgcggggatccagcaggctaccccctatacagcttacccacctccagcacaagcctatggaatcccttcctacagcatcaagacagaagacagcttgaaccattcccctggccagagtggattcctcagctatggctccagcttcagcacctcacccactggacagagcccatacacctaccagatgcacggcacaacagggttctatcaaggaggaaatggactgggcaacgcagccggtttcgggagtgtgcaccaggactatccttcctaccccggcttcccccagagccagtacccccagtattacggctcatcctacaaccctccctacgtcccggccagcagcatctgcccttcgcccctctccacgtccacctacgtcctccaggaggcatctcacaacgtccccaaccagagttccgagtcacttgctggtgaatacaacacacacaatggaccttccacaccagcgaaagagggagacacagacaggccgcaccgggcctccgacgggaagctccgaggccggtctaagaggagcagtgacccgtccccggcaggggacaatgagattgagcgtgtgttcgtgtgggacttggatgagacaataattatttttcactccttactcacggggacatttgcatccagatacgggaaggattgtgaccagatccacgttgatgacgtctcatcagatgacaatggccaagatttaagcacatacaacttctccgctgacggcttccacagttcggccccaggagccaacctgtgcctgggctctggcgtgcacggcggcgtggactggatgaggaagctggccttccgctaccggcgggtgaaggagatgtacaatacctacaagaacaacgttggtgggttgataggcactcccaaaagggagacctggctacagctccgagctgagctggaagctctcacagacctctggctgacccactccctgaaggcactaaacctcatcaactcccggcccaactgtgtcaatgtgctggtcaccaccactcaactaattcctgccctggccaaagtcctgctatatggcctggggtctgtgtttcctattgagaacatctacagtgcaaccaagacagggaaggagagctgcttcgagaggataatgcagagattcggcagaaaagctgtctacgtggtgatcggtgatggtgtggaagaggagcaaggagcgaaaaagcacaacatgcctttctggcggatatcctgccacgcagacctggaggcactgaggcacgccctggagctggagtatttatagcaggatcagcagcatctccacctgccatctcaccctcagaccccctcgccttccccacctccccaccgagaactccagagacccagatgttggacaccaggaaggggccccacagccgagacgacgtgtccagtgaccatctcagaagccgtccatcagtccaaatgggggttctgagaaggaaagtacccaacattggcttcggagtatttgactttggggaaaagggctggctcggagtctagactcttctgtaagactcacagaacaaaagcaaggaattgctgatttggggggtgcctggtgatgaggaggggatgggtttgtcttgtcttctttttaatttatggactagtctcattactccggaattatgctcttgtacctgtgtggctgggtttcttagtcgttggtttggtttggttttttgaactggtatgtggggtggttcacagttctaatgtaagcactctattctccaagttgtgctttgtggggacaatcattctttgaacattagagaggaaggcagttcaagctgttgaaaagactattgcttatttttgtttttaaagacctacttgacgtcatgtggacagtgcacgtgccttacgctacatcttgttttctaggaagagggggatgctgggaaggaatgggtgctttgtgatggataaaaggcattaaataaaaccacgtttacattttgaa

SEQ ID NO: 1393 - DNA, 2580 bp, Homo sapiens
atatcccagtggcccccgtgcggcgactttagctgctgctgtctcagccgctccacagcgacggcagcggctgcggcttagtcggtggcggccggcggcggctgcgggctgagcggcgagtttccgatttaaagctgagctgcgaggaaaatggcggcgggaggatcaaaatacttgctggatggtggactcagagaccaataaaaataaactgcttgaacatcctttgactggttagccaggtacaaggaaatggtagaactagtgatctcacccagcctcactgtaaacagcgattgtctggataaactgaagtttaaccgtgctgacgctgctgtgtggactctgagtgacagacaaggcatcaccaaatcggcccccctgagagtgtcccagctcttctccagatcttgcccacgtgtcctcccccgccagccttccacagccatggcagcctacggccagacgcagtacagtgcggggatccagcaggctaccccctatacagcttacccacctccagcacaagcctatggaatcccttcctacagcatcaagacagaagacagcttgaaccattcccctggccagagtggattcctcagctatggctccagcttcagcacctcacccactggacagagcccatacacctaccagatgcacggcacaacagggttctatcaaggaggaaatggactgggcaacgcagccggtttcgggagtgtgcaccaggactatccttcctaccccggcttcccccagagccagtacccccagtattacggctcatcctacaaccctccctacgtcccggccagcagcatctgcccttcgcccctctccacgtccacctacgtcctccaggaggcatctcacaacgtccccaaccagagttccgagtcacttgctggtgaatacaacacacacaatggaccttccacaccagcgaaagagggagacacagacaggccgcaccgggcctccgacgggaagctccgaggccggtctaagaggagcagtgacccgtccccggcaggggacaatgagattgagcgtgtgttcgtgtgggacttggatgagacaataattatttttcactccttactcacggggacatttgcatccagatacgggaaggacaccacgacgtccgtgcgcattggccttatgatggaagagatgatcttcaaccttgcagatacacatctgttcttcaatgacctggaggattgtgaccagatccacgttgatgacgtctcatcagatgacaatggccaagatttaagcacatacaacttctccgctgacggcttccacagttcggccccaggagccaacctgtgcctgggctctggcgtgcacggcggcgtggactggatgaggaagctggccttccgctaccggcgggtgaaggagatgtacaatacctacaagaacaacgttggtgggttgataggcactcccaaaagggagacctggctacagctccgagctgagctggaagctctcacagacctctggctgacccactccctgaaggcactaaacctcatcaactcccggcccaactgtgtcaatgtgctggtcaccaccactcaactaattcctgccctggccaaagtcctgctatatggcctggggtctgtgtttcctattgagaacatctacagtgcaaccaagacagggaaggagagctgcttcgagaggataatgcagagattcggcagaaaagctgtctacgtggtgatcggtgatggtgtggaagaggagcaaggagcgaaaaagcacaacatgcctttctggcggatatcctgccacgcagacctggaggcactgaggcacgccctggagctggagtatttatagcaggatcagcagcatctccacctgccatctcaccctcagaccccctcgccttccccacctccccaccgagaactccagagacccagatgttggacaccaggaaggggccccacagccgagacgacgtgtccagtgaccatctcagaagccgtccatcagtccaaatgggggttctgagaaggaaagtacccaacattggcttcggagtatttgactttggggaaaagggctggctcggagtctagactcttctgtaagactcacagaacaaaagcaaggaattgctgatttggggggtgcctggtgatgaggaggggatgggtttgtcttgtcttctttttaatttatggactagtctcattactccggaattatgctcttgtacctgtgtggctgggtttcttagtcgttggtttggtttggttttttgaactggtatgtggggtggttcacagttctaatgtaagcactctattctccaagttgtgctttgtggggacaatcattctttgaacattagagaggaaggcagttcaagctgttgaaaagactattgcttatttttgtttttaaagacctacttgacgtcatgtggacagtgcacgtgccttacgctacatcttgttttctaggaagagggggatgctgggaaggaatgggtgctttgtgatggataaaaggcattaaataaaaccacgtttacattttgaa

SEQ ID NO: 1394-1452 - skipped (59 entries)

SEQ ID NO: 1453 - DNA, 2411 bp, Homo sapiens
atatcacaggtgcaggattagtgctgcctacggtgctgggctttttagtggaaacccctagcaattctgtgcctcctcctcatgtctctcatcctagggagcctggcaaccatatatcaagcgtacagaaatcaaaacaaacttccttgataacatgcttttgcgaagtgcaggaaaattaaatgtgggcaccaagaaagaggatggtgagagtacagcccccaccccccgtccaaaggtcttgcgttgtaaatgccaccaccattgtccagaagactcagtcaacaatatttgcagcacagacggatattgtttcacgatgatagaagaggatgactctgggttgcctgtggtcacttctggttgcctaggactagaaggctcagattttcagtgtcgggacactcccattcctcatcaaagaagatcaattgaatgctgcacagaaaggaacgaatgtaataaagacctacaccctacactgcctccattgaaaaacagagattttgttgatggacctatacaccacagggctttacttatatctgtgactgtctgtagtttgctcttggtccttatcatattattttgttacttccggtataaaagacaagaaaccagacctcgatacagcattgggttagaacaggatgaaacttacattcctcctggagaatccctgagagacttaattgagcagtctcagagctcaggaagtggatcaggcctccctctgctgctaaaagatggcggcaaggcagcccaggcaaatgtaagaataggcgatgtggttctcagcattgatggaataaatgcacaaggaatgactcatcttgaagcccagaataagattaagggttgtacaggctctttgaatatgactctgcaaagagcatctgctgcacccaagcctgagccggttcctgttcaaaagcccacagtcaccagcgtgtgttccgagacttctcaggagctagcagagggacagagaagaggatcccagggtgacagtaaacagcaaaatgggaaaatcccacctaaacgcccaccaagaaaacacattgtggagcgctatacagagttttatcatgtacccactcacagtgatgccagcaagaagagactgattgaggatactgaagactggcgtccaaggactggaacaactcagtctcgctctttccgaatccttgcccagatcactgggactgaacatttgaaagaatctgaagccgataatacaaagaaggcaaataactctcaggagccttctccgcagttggcttcctcggtagcttccacacggagcatgcccgagagcctggacagcccaacctctggcagaccaggggttaccagcctcacagctgcagctgccttcaagcctgtaggatccactggcgtcatcaagtcaccaagctggcaacggccaaaccaaggagtaccttccactggaagaatctcaaacagcgctacttactcaggatcagtggcaccagccaactcagctttgggacaaacccagccaagtgaccaggacactttagtgcaaagagctgagcacattccagcagggaaacgaactccgatgtgcgcccattgtaaccaggtcatcagaggaccattcttagtggcactggggaaatcttggcacccagaagaattcaactgcgctcactgcaaaaatacaatggcctacattggatttgtagaggagaaaggagccctgtattgtgagctgtgctatgagaaattctttgcccctgaatgtggtcgatgccaaaggaagatccttggagaagtcatcagtgcgttgaaacaaacttggcatgtttcctgttttgtgtgtgtagcctgtggaaagcccattcggaacaatgtttttcacttggaggatggtgaaccctactgtgagactgattattatgccctctttggtactatatgccatggatgtgaatttcccatagaagctggtgacatgttcctggaagctctgggctacacctggcatgacacttgctttgtatgctcagtgtgttgtgaaagtttggaaggtcagacctttttctccaagaaggacaagcccctgtaatggatgaaagtccatgaacctcctaagttataatttaaatttgtttggggcaaggtgattttatagtcgagacagagccctaggtccttcctgccccatcactcacttacgacatcacttccattgtgtgcatgtttgttatagaggaggttttaggctacaatatttgtttaacctccctaagaactttcaaggcatctgtcctgaaagctgttaatttatggtctagcagatttatattatatgcagataataattaactggggataaaagaatggcaaggggtgacacaaagtagcaaactgaatacttctcc

SEQ ID NO: 1454 - DNA, 6935 bp, Homo sapiens
gactggggtagtctaccccacagatgcctaactctcactatttcttctttcagcaaacttccttgataacatgcttttgcgaagtgcaggaaaattaaatgtgggcaccaagaaagaggatggtgagagtacagcccccaccccccgtccaaaggtcttgcgttgtaaatgccaccaccattgtccagaagactcagtcaacaatatttgcagcacagacggatattgtttcacgatgatagaagaggatgactctgggttgcctgtggtcacttctggttgcctaggactagaaggctcagattttcagtgtcgggacactcccattcctcatcaaagaagatcaattgaatgctgcacagaaaggaacgaatgtaataaagacctacaccctacactgcctccattgaaaaacagagattttgttgatggacctatacaccacagggctttacttatatctgtgactgtctgtagtttgctcttggtccttatcatattattttgttacttccggtataaaagacaagaaaccagacctcgatacagcattgggttagaacaggatgaaacttacattcctcctggagaatccctgagagacttaattgagcagtctcagagctcaggaagtggatcaggcctccctctgctggtccaaaggactatagctaagcagattcagatggtgaaacagattggaaaaggtcgctatggggaagtttggatgggaaagtggcgtggcgaaaaggtagctgtgaaagtgttcttcaccacagaggaagccagctggttcagagagacagaaatatatcagacagtgttgatgaggcatgaaaacattttgggtttcattgctgcagatatcaaagggacagggtcctggacccagttgtacctaatcacagactatcatgaaaatggttccctttatgattatctgaagtccaccaccctagacgctaaatcaatgctgaagttagcctactcttctgtcagtggcttatgtcatttacacacagaaatctttagtactcaaggcaaaccagcaattgcccatcgagatctgaaaagtaaaaacattctggtgaagaaaaatggaacttgctgtattgctgacctgggcctggctgttaaatttattagagcatctgctgcacccaagcctgagccggttcctgttcaaaagcccacagtcaccagcgtgtgttccgagacttctcaggagctagcagagggacagagaagaggatcccagggtgacagtaaacagcaaaatgggaaaatcccacctaaacgcccaccaagaaaacacattgtggagcgctatacagagttttatcatgtacccactcacagtgatgccagcaagaagagactgattgaggatactgaagactggcgtccaaggactggaacaactcagtctcgctctttccgaatccttgcccagatcactgggactgaacatttgaaagaatctgaagccgataatacaaagaaggcaaagtttgacagtgctctggaagacctacctaagagtggacctcaccctcctgcaactcctcaggtgttaactattggtagccaagtggccacactttctaaagtagcaactacttattctagtttaagcagctccacaggaaatgtggaagattctttcgaaggttttcgaaacttttctaccttctcttctcctgctagatatagtgctgcagttctgagcagcgcagctgctactgtgtctgctgttattgctacaaaaaccaggctctacactcctgaaagatatcactcactcctggatgcactttgcatcagccctgtctccaagcctttagctttttcctatctgcagtcctcaaggaaatcaactggctctatccatgttaagaaaacaagtaactctcaggagccttctccgcagttggcttcctcggtagcttccacacggagcatgcccgagagcctggacagcccaacctctggcagaccaggggttaccagcctcacagctgcagctgccttcaagcctgtaggatccactggcgtcatcaagtcaccaagctggcaacggccaaaccaaggagtaccttccactggaagaatctcaaacagcgctacttactcaggatcagtggcaccagccaactcagctttgggacaaacccagccaagtgaccaggacactttagtgcaaagagctgagcacattccagcagggaaacgaactccgatgtgcgcccattgtaaccaggtcatcagaggaccattcttagtggcactggggaaatcttggcacccagaagaattcaactgcgctcactgcaaaaatacaatggcctacattggatttgtagaggagaaaggagccctgtattgtgagctgtgctatgagaaattctttgcccctgaatgtggtcgatgccaaaggaagatccttggagaagtcatcagtgcgttgaaacaaacttggcatgtttcctgttttgtgtgtgtagcctgtggaaagcccattcggaacaatgtttttcacttggaggatggtgaaccctactgtgagactgattattatgccctctttggtactatatgccatggatgtgaatttcccatagaagctggtgacatgttcctggaagctctgggctacacctggcatgacacttgctttgtatgctcagtgtgttgtgaaagtttggaaggtcagacctttttctccaagaaggacaagcccctgtgtaagaaacatgctcattctgtgaatttttgaaagtcaacagttcaggagaagagaaggaatttgaagagaaaaaggaaaattaaaattactaattaatttttagattcaatatttatatggagttttgaaaaataatagtggccctgaaggaataaattccagctttaaaaaccaagtctgaggaaatatttggcttcataaagtaaagagacggtttggcatttattattactttttcctgtattttatgcccataaaataagctttataaaaaccaatttcctgatggactattaaattcatcttagaataaattagtgaagaatttaattttagaataaataatccaatctgaaataattataccttctttccttgttaggtagttatgagtaaatctgcaaaaggcaatgaaaatgccttaaattttatcaataacagaattattgtatttaaaaaaaaactaatacttatctttaaaatagtaaataggattttaaacagagaattttatcagtaataggtgtcagtttttaaaaaattgcttgtaggctgagcgcggtggctcacgcctgtaatcccagcactttgggaggccaaggtgggtggaccacatgaggtcaggagtttgagatcagcctggccaacatggtgaaaccccatctctactaaaaatacaaaaattagccggacgcagtggcacgcgcctgtaatcccagctactcaagaggctgaggcacgagaatcacttgaacccgggagggagaggttgcagtgagccaagatcgtaccactgcactccagcctgggtgacagagtgagactctgtctccaaaaaaaaactttgcttgtatattatttttgccttacagtggatcattctagtaggaaaggacaataagattttttatcaaaatgtgtcatgccagtaagagatgttatattcttttctcatttcttccccacccaaaaataagctaccatatagcttataagtctcaaatttttgccttttactaaaatgtgattgtttctattcattgtgtatgcttcatcacctatattaggcaaattccatttttttcccttgtgctaaggtaaagatttaattaaataattttggcctctcatagttttctctctctttaaagagaataaatagagggccaggtgtggtggctcacgcctgtgatcccagcactttgggaggccaagacgggcggatcatgaggtcaagagatcaagatcatcctggccaacatggtgaaaccctgtctctactaaaaatacaaaaatgagctgggcatggtggggcgtgcctgtagtcccatgtacttgggaggctgaggcaggaaaattcttgaacccaggagacggaagttgcagtgagctgagatcacaccactgcactccagcctggtgacagagcaagactccggctcttaaaaaaaaaaaaaaaaaaaaaaaaagagagagagagaataaatagaaaagaatgtggctgggaattgtgaatcagaagattataccccccaattgtttttcaatccccttttctcaaataataaattagttaaatcagtttctgagttatgccactggctgatgaagagttgagaggtctctttgcagaatgatctttttgtttcgttttgtttcttcttctgcatttaaaaattaaaagattggtttgaggatgtgatgaaattgagactttttgtggttttctctcaataataagtgaaccaatttcaaatgtgatcacaaagtttggaaagcttttattcacagaggttgggtagtgttgggaggggagtttaattactcagattggcctgttatttgatttcctcctttgggaaaagaattatgtagataccacatggagacagggaaacaattgtggtaaaactgtggatcctgttgctatttgcccagtgagaaaacagattctggtatttgatttggtttttctctttgtttccagaatggatgaaagtccatgaacctcctaagttataatttaaatttgtttggggcaaggtgattttatagtcgagacagagccctaggtccttcctgccccatcactcacttacgacatcacttccattgtgtgcatgtttgttatagaggaggttttaggctacaatatttgtttaacctccctaagaactttcaaggcatctgtcctgaaagctgttaatttatggtctagcagatttatattatatgcagataataattaactggggataaaagaatggcaaggggtgacacaaagtagcaaactgaatacttctccaatagcaaccccaagctacctcctcaccctgcatcttggagggaggcaggaaatttcttttgaaataaagtgctggagctgaattctgcattatttatcgttgctgctgaaaccacctataaaagacttgctggctaatgtgcattgtcatataatgtacactgtcacatctttacagtcttgtatgttatagaatacaaaataagttgatggttttgtttggtgtgagctttttgtttgtttgtttagttttgccttcataggttatatgccaagatagtatttgataagtcaatgacatttggatgttttcttcaaagaattttatttgacccagatttcttataaagttatcttacattaaggatgtcattttcatcagaccttctttctacatattattcatgaagcataatgttgcatttctccaaattttatgcctgaaagggtagtgttgcttcctaaggtatcatgttgtctttgtgctttgtccatctcttccgtggcgaagctttatatctgttcctaaaacagttaatcctgtgaaataaatattgaacataatccagaagaatctctctgtttcccttggggaatgccatatttaattcaccagcagtaatcctttaataactggcagagcactttattcttctggtgagctccctgaatatttatttttctgattataaattttctatattagtagcattttttaattattacttcttcactatagagcatttacttttagtctctagatgtatattttggaatgctgtacttggcataacatagattaaaatcataatgcatgactaaaaactccttggatttatttcccattttaaaatttttagcggtaagttcagatttataatctttctctagacttccatggtctgaatgttgcctgctgaagtagcaacctaaaaagtatcccctgcttatgcttgtccagttggccctccatgtccataggcttcgcatctgtgattcagcccactgtgggtcaaaaatatttggggaaaaaaatggatggttgcgcctttgctgaacatgtacaaacttttttttgtcattaaacaatatagtataacaactatttacaaagcatttacattgtattagctattataggtaatctagagatgatttaaagtgtatggtaggatgtgcataggttatatgcaaatactacaccattttctataagggacttgaacatcatggactttagtatcctagggggttcttggaacccatcacccataggggcaccataggacaactatagtaccgtgtttatttcctattaattcaggttccgtttagagtctaaaactaaaacctaatcatttagtcacagtgtaaaaacaaatggaaataacagctcaaatcttcaaaatattactatagcattatgtttaaaataatctacaacaaaaatgtaccattttcaagcagtactacattaggagcccttttatagaaaataatttcttctttacccccgttccagtgtgaatctagtattctgttaacatttgtgtggcatttggagtttgtcatccccattgaagggagagccttctcagacatgaagcaagggaaacatactgaatagttttacacaaatttgatctggcttccatttgtccccctcatttcccaaatgtttaaatgtattggatttggattctcaatgtataagttgccttatctgttaatgtctatcttctgtctctttaattttgtatatctgctgttttgcttttggatacattttctaattagaagtcacatgataaatataatcagtatagtaataataccataatgtgcacatactcaataaataaatgactgcattgttgtaaatga

SEQ ID NO: 1455 - DNA, 2081 bp, Homo sapiens
cgcggggcgcggagtcggcggggcctcgcgggacgccgggcagtgcggagaccgcggcgctgaggacgcgggagccgggagcgcagccgcggggtggagttcagcctactctttcttagatgtgaaaggaaaggaagatcatttcatgccttgttgataaaggttcagacttctgctgattcataaccatttggctctgagctatgacaagagaggaaacaaaaagttaaacaagcaagcctgccataagtgagaagcatatttcattttctgtcattggactttgagccattagaaccatgagcaactacagtgtgtcactggttggcccagctccttggggtttccggctgcagggcggtaaggatttcaacatgcctctgacaatctctagtctaaaagatggcggcaaggcagcccaggcaaatgtaagaataggcgatgtggttctcagcattgatggaataaatgcacaaggaatgactcatcttgaagcccagaataagattaagggttgtacaggctctttgaatatgactctgcaaagagcatctgctgcacccaagcctgagccggttcctgttcaaaagaaaacacaagtgacaaataaccctggcactgtgaaaatcccacctaaacgcccaccaagaaaacacattgtggagcgctatacagagttttatcatgtacccactcacagtgatgccagcaagaagagactgattgaggatactgaagactggcgtccaaggactggaacaactcagtctcgctctttccgaatccttgcccagatcactgggactgaacatttgaaagaatctgaagccgataatacaaagaaggcaaaggaaaagataccccttcacgtctttagtcccaaatacacaaaattacgtgactggcaccatgaagtttcagcacgtgctcttaacgtacagtgatttatgagccttgccccccaagcagccagcacataccttttcatttactttttttttttcaacttcatagcaaaatctgtattaaatttgccttatgaaaaaatagaactttttctatacttttctaacaatttcctattgttgtgagaaaaggaagatgaacatgttttgtgctagttggtagctcacaaatgtaaaaccaaaaaaaaaaaaaaatagaaaattaagggactagatctatttgtggatttgtatctgtttttgttgtgattagggtagtaatcttggaaaacgaattattttcataagttgaatttggttagttggttggttgaagcagaggataatgagcaaataaagtccttgtctaatttggaaaatactttctttatattattaacatctcccaagattactttttaagttcattattatgttacattcaaagttgattgtaaattattctaaataagtaaatataaggaggcaagaataaacaaagactttattaaagaagagtgcgtgcattgtagatttaggtatcttttaaagtaggtactattcaggatggctctatgaagaggaggaggtccagatttggctcctgaaaaaggaaagaagagaattttacccctatttgcaatggagaaatacagtattctttggtttggttggatttgcaaatcctatttcctatcaaaggaaatatctctagtggatatttttagaatatagacaatttctaggtattaactaataagatatggaaaagatagctttgctttttttaatcagaagaacataaaataaattacaatatgaatgattgtgagacatcagagaaatattttacttagtgacgtaaactactgtgcactgctgctattcctaggaagctgtgttttgggcaatacatggaagctaaatatatgaccagaaatgctttctgccttgtaatatagtgtattatatattagagctaaatttagtaataaatgcattttgaagtttggaaaagtattgtaataaagttgcctttaacttagctttgtacttgttctgtttccttgaggctagacacagtgccatccaggacttattacagtataactgggtaaaataaacaattctctgaca

SEQ ID NO: 1456 - DNA, 6596 bp, Homo sapiens
gactggggtagtctaccccacagatgcctaactctcactatttcttctttcagcaaacttccttgataacatgcttttgcgaagtgcaggaaaattaaatgtgggcaccaagaaagaggatggtgagagtacagcccccaccccccgtccaaaggtcttgcgttgtaaatgccaccaccattgtccagaagactcagtcaacaatatttgcagcacagacggatattgtttcacgatgatagaagaggatgactctgggttgcctgtggtcacttctggttgcctaggactagaaggctcagattttcagtgtcgggacactcccattcctcatcaaagaagatcaattgaatgctgcacagaaaggaacgaatgtaataaagacctacaccctacactgcctccattgaaaaacagagattttgttgatggacctatacaccacagggctttacttatatctgtgactgtctgtagtttgctcttggtccttatcatattattttgttacttccggtataaaagacaagaaaccagacctcgatacagcattgggttagaacaggatgaaacttacattcctcctggagaatccctgagagacttaattgagcagtctcagagctcaggaagtggatcaggcctccctctgctgctaaaagatggcggcaaggcagcccaggcaaatgtaagaataggcgatgtggttctcagcattgatggaataaatgcacaaggaatgactcatcttgaagcccagaataagattaagggttgtacaggctctttgaatatgactctgcaaagagcatctgctgcacccaagcctgagccggttcctgttcaaaagcccacagtcaccagcgtgtgttccgagacttctcaggagctagcagagggacagagaagaggatcccagggtgacagtaaacagcaaaatgggaaaatcccacctaaacgcccaccaagaaaacacattgtggagcgctatacagagttttatcatgtacccactcacagtgatgccagcaagaagagactgattgaggatactgaagactggcgtccaaggactggaacaactcagtctcgctctttccgaatccttgcccagatcactgggactgaacatttgaaagaatctgaagccgataatacaaagaaggcaaagtttgacagtgctctggaagacctacctaagagtggacctcaccctcctgcaactcctcaggtgttaactattggtagccaagtggccacactttctaaagtagcaactacttattctagtttaagcagctccacaggaaatgtggaagattctttcgaaggttttcgaaacttttctaccttctcttctcctgctagatatagtgctgcagttctgagcagcgcagctgctactgtgtctgctgttattgctacaaaaaccaggctctacactcctgaaagatatcactcactcctggatgcactttgcatcagccctgtctccaagcctttagctttttcctatctgcagtcctcaaggaaatcaactggctctatccatgttaagaaaacaagtaactctcaggagccttctccgcagttggcttcctcggtagcttccacacggagcatgcccgagagcctggacagcccaacctctggcagaccaggggttaccagcctcacagctgcagctgccttcaagcctgtaggatccactggcgtcatcaagtcaccaagctggcaacggccaaaccaaggagtaccttccactggaagaatctcaaacagcgctacttactcaggatcagtggcaccagccaactcagctttgggacaaacccagccaagtgaccaggacactttagtgcaaagagctgagcacattccagcagggaaacgaactccgatgtgcgcccattgtaaccaggtcatcagaggaccattcttagtggcactggggaaatcttggcacccagaagaattcaactgcgctcactgcaaaaatacaatggcctacattggatttgtagaggagaaaggagccctgtattgtgagctgtgctatgagaaattctttgcccctgaatgtggtcgatgccaaaggaagatccttggagaagtcatcagtgcgttgaaacaaacttggcatgtttcctgttttgtgtgtgtagcctgtggaaagcccattcggaacaatgtttttcacttggaggatggtgaaccctactgtgagactgattattatgccctctttggtactatatgccatggatgtgaatttcccatagaagctggtgacatgttcctggaagctctgggctacacctggcatgacacttgctttgtatgctcagtgtgttgtgaaagtttggaaggtcagacctttttctccaagaaggacaagcccctgtgtaagaaacatgctcattctgtgaatttttgaaagtcaacagttcaggagaagagaaggaatttgaagagaaaaaggaaaattaaaattactaattaatttttagattcaatatttatatggagttttgaaaaataatagtggccctgaaggaataaattccagctttaaaaaccaagtctgaggaaatatttggcttcataaagtaaagagacggtttggcatttattattactttttcctgtattttatgcccataaaataagctttataaaaaccaatttcctgatggactattaaattcatcttagaataaattagtgaagaatttaattttagaataaataatccaatctgaaataattataccttctttccttgttaggtagttatgagtaaatctgcaaaaggcaatgaaaatgccttaaattttatcaataacagaattattgtatttaaaaaaaaactaatacttatctttaaaatagtaaataggattttaaacagagaattttatcagtaataggtgtcagtttttaaaaaattgcttgtaggctgagcgcggtggctcacgcctgtaatcccagcactttgggaggccaaggtgggtggaccacatgaggtcaggagtttgagatcagcctggccaacatggtgaaaccccatctctactaaaaatacaaaaattagccggacgcagtggcacgcgcctgtaatcccagctactcaagaggctgaggcacgagaatcacttgaacccgggagggagaggttgcagtgagccaagatcgtaccactgcactccagcctgggtgacagagtgagactctgtctccaaaaaaaaactttgcttgtatattatttttgccttacagtggatcattctagtaggaaaggacaataagattttttatcaaaatgtgtcatgccagtaagagatgttatattcttttctcatttcttccccacccaaaaataagctaccatatagcttataagtctcaaatttttgccttttactaaaatgtgattgtttctattcattgtgtatgcttcatcacctatattaggcaaattccatttttttcccttgtgctaaggtaaagatttaattaaataattttggcctctcatagttttctctctctttaaagagaataaatagagggccaggtgtggtggctcacgcctgtgatcccagcactttgggaggccaagacgggcggatcatgaggtcaagagatcaagatcatcctggccaacatggtgaaaccctgtctctactaaaaatacaaaaatgagctgggcatggtggggcgtgcctgtagtcccatgtacttgggaggctgaggcaggaaaattcttgaacccaggagacggaagttgcagtgagctgagatcacaccactgcactccagcctggtgacagagcaagactccggctcttaaaaaaaaaaaaaaaaaaaaaaaaagagagagagagaataaatagaaaagaatgtggctgggaattgtgaatcagaagattataccccccaattgtttttcaatccccttttctcaaataataaattagttaaatcagtttctgagttatgccactggctgatgaagagttgagaggtctctttgcagaatgatctttttgtttcgttttgtttcttcttctgcatttaaaaattaaaagattggtttgaggatgtgatgaaattgagactttttgtggttttctctcaataataagtgaaccaatttcaaatgtgatcacaaagtttggaaagcttttattcacagaggttgggtagtgttgggaggggagtttaattactcagattggcctgttatttgatttcctcctttgggaaaagaattatgtagataccacatggagacagggaaacaattgtggtaaaactgtggatcctgttgctatttgcccagtgagaaaacagattctggtatttgatttggtttttctctttgtttccagaatggatgaaagtccatgaacctcctaagttataatttaaatttgtttggggcaaggtgattttatagtcgagacagagccctaggtccttcctgccccatcactcacttacgacatcacttccattgtgtgcatgtttgttatagaggaggttttaggctacaatatttgtttaacctccctaagaactttcaaggcatctgtcctgaaagctgttaatttatggtctagcagatttatattatatgcagataataattaactggggataaaagaatggcaaggggtgacacaaagtagcaaactgaatacttctccaatagcaaccccaagctacctcctcaccctgcatcttggagggaggcaggaaatttcttttgaaataaagtgctggagctgaattctgcattatttatcgttgctgctgaaaccacctataaaagacttgctggctaatgtgcattgtcatataatgtacactgtcacatctttacagtcttgtatgttatagaatacaaaataagttgatggttttgtttggtgtgagctttttgtttgtttgtttagttttgccttcataggttatatgccaagatagtatttgataagtcaatgacatttggatgttttcttcaaagaattttatttgacccagatttcttataaagttatcttacattaaggatgtcattttcatcagaccttctttctacatattattcatgaagcataatgttgcatttctccaaattttatgcctgaaagggtagtgttgcttcctaaggtatcatgttgtctttgtgctttgtccatctcttccgtggcgaagctttatatctgttcctaaaacagttaatcctgtgaaataaatattgaacataatccagaagaatctctctgtttcccttggggaatgccatatttaattcaccagcagtaatcctttaataactggcagagcactttattcttctggtgagctccctgaatatttatttttctgattataaattttctatattagtagcattttttaattattacttcttcactatagagcatttacttttagtctctagatgtatattttggaatgctgtacttggcataacatagattaaaatcataatgcatgactaaaaactccttggatttatttcccattttaaaatttttagcggtaagttcagatttataatctttctctagacttccatggtctgaatgttgcctgctgaagtagcaacctaaaaagtatcccctgcttatgcttgtccagttggccctccatgtccataggcttcgcatctgtgattcagcccactgtgggtcaaaaatatttggggaaaaaaatggatggttgcgcctttgctgaacatgtacaaacttttttttgtcattaaacaatatagtataacaactatttacaaagcatttacattgtattagctattataggtaatctagagatgatttaaagtgtatggtaggatgtgcataggttatatgcaaatactacaccattttctataagggacttgaacatcatggactttagtatcctagggggttcttggaacccatcacccataggggcaccataggacaactatagtaccgtgtttatttcctattaattcaggttccgtttagagtctaaaactaaaacctaatcatttagtcacagtgtaaaaacaaatggaaataacagctcaaatcttcaaaatattactatagcattatgtttaaaataatctacaacaaaaatgtaccattttcaagcagtactacattaggagcccttttatagaaaataatttcttctttacccccgttccagtgtgaatctagtattctgttaacatttgtgtggcatttggagtttgtcatccccattgaagggagagccttctcagacatgaagcaagggaaacatactgaatagttttacacaaatttgatctggcttccatttgtccccctcatttcccaaatgtttaaatgtattggatttggattctcaatgtataagttgccttatctgttaatgtctatcttctgtctctttaattttgtatatctgctgttttgcttttggatacattttctaattagaagtcacatgataaatataatcagtatagtaataataccataatgtgcacatactcaataaataaatgactgcattgttgtaaatga

SEQ ID NO: 1457 - DNA, 1454 bp, Homo sapiens
atatcacaggtgcaggattagtgctgcctacggtgctgggctttttagtggaaacccctagcaattctgtgcctcctcctcatgtctctcatcctagggagcctggcaaccatatatcaagcgtacagaaatcaaaacaaacttccttgataacatgcttttgcgaagtgcaggaaaattaaatgtgggcaccaagaaagaggatggtgagagtacagcccccaccccccgtccaaaggtcttgcgttgtaaatgccaccaccattgtccagaagactcagtcaacaatatttgcagtaactctcaggagccttctccgcagttggcttcctcggtagcttccacacggagcatgcccgagagcctggacagcccaacctctggcagaccaggggttaccagcctcacagctgcagctgccttcaagcctgtaggatccactggcgtcatcaagtcaccaagctggcaacggccaaaccaaggagtaccttccactggaagaatctcaaacagcgctacttactcaggatcagtggcaccagccaactcagctttgggacaaacccagccaagtgaccaggacactttagtgcaaagagctgagcacattccagcagggaaacgaactccgatgtgcgcccattgtaaccaggtcatcagaggaccattcttagtggcactggggaaatcttggcacccagaagaattcaactgcgctcactgcaaaaatacaatggcctacattggatttgtagaggagaaaggagccctgtattgtgagctgtgctatgagaaattctttgcccctgaatgtggtcgatgccaaaggaagatccttggagaagtcatcagtgcgttgaaacaaacttggcatgtttcctgttttgtgtgtgtagcctgtggaaagcccattcggaacaatgtttttcacttggaggatggtgaaccctactgtgagactgattattatgccctctttggtactatatgccatggatgtgaatttcccatagaagctggtgacatgttcctggaagctctgggctacacctggcatgacacttgctttgtatgctcagtgtgttgtgaaagtttggaaggtcagacctttttctccaagaaggacaagcccctgtaatggatgaaagtccatgaacctcctaagttataatttaaatttgtttggggcaaggtgattttatagtcgagacagagccctaggtccttcctgccccatcactcacttacgacatcacttccattgtgtgcatgtttgttatagaggaggttttaggctacaatatttgtttaacctccctaagaactttcaaggcatctgtcctgaaagctgttaatttatggtctagcagatttatattatatgcagataataattaactggggataaaagaatggcaaggggtgacacaaagtagcaaactgaatacttctcc

SEQ ID NO: 1458 - DNA, 2425 bp, Homo sapiens
atatcacaggtgcaggattagtgctgcctacggtgctgggctttttagtggaaacccctagcaattctgtgcctcctcctcatgtctctcatcctagggagcctggcaaccatatatcaagcgtacagaaatcaaaacaaacttccttgataacatgcttttgcgaagtgcaggaaaattaaatgtgggcaccaagaaagaggatggtgagagtacagcccccaccccccgtccaaaggtcttgcgttgtaaatgccaccaccattgtccagaagactcagtcaacaatatttgcagcacagacggatattgtttcacgatgatagaagaggatgactctgggttgcctgtggtcacttctggttgcctaggactagaaggctcagattttcagtgtcgggacactcccattcctcatcaaagaagatcaattgaatgctgcacagaaaggaacgaatgtaataaagacctacaccctacactgcctccattgaaaaacagagattttgttgatggacctatacaccacagggctttacttatatctgtgactgtctgtagtttgctcttggtccttatcatattattttgttacttccggtataaaagacaagaaaccagacctcgatacagcattgggttagaacaggatgaaacttacattcctcctggagaatccctgagagacttaattgagcagtctcagagctcaggaagtggatcaggcctccctctgctgctaaaagatggcggcaaggcagcccaggcaaatgtaagaataggcgatgtggttctcagcattgatggaataaatgcacaaggaatgactcatcttgaagcccagaataagattaagggttgtacaggctctttgaatatgactctgcaaagagcatctgctgcacccaagcctgagccggttcctgttcaaaagaaaacacaagtgacaaataaccctggcactgtgaaaatcccacctaaacgcccaccaagaaaacacattgtggagcgctatacagagttttatcatgtacccactcacagtgatgccagcaagaagagactgattgaggatactgaagactggcgtccaaggactggaacaactcagtctcgctctttccgaatccttgcccagatcactgggactgaacatttgaaagaatctgaagccgataatacaaagaaggcaaaggaaaagataccccttcacgtctttagtcccaaatacacaaaattacgtgactggcaccatgaagtttcagcacgtgctcttaacgtacagtgatttatgagccttgccccccaagcagccagcacataccttttcatttactttttttttttcaacttcatagcaaaatctgtattaaatttgccttatgaaaaaatagaactttttctatacttttctaacaatttcctattgttgtgagaaaaggaagatgaacatgttttgtgctagttggtagctcacaaatgtaaaaccaaaaaaaaaaaaaaatagaaaattaagggactagatctatttgtggatttgtatctgtttttgttgtgattagggtagtaatcttggaaaacgaattattttcataagttgaatttggttagttggttggttgaagcagaggataatgagcaaataaagtccttgtctaatttggaaaatactttctttatattattaacatctcccaagattactttttaagttcattattatgttacattcaaagttgattgtaaattattctaaataagtaaatataaggaggcaagaataaacaaagactttattaaagaagagtgcgtgcattgtagatttaggtatcttttaaagtaggtactattcaggatggctctatgaagaggaggaggtccagatttggctcctgaaaaaggaaagaagagaattttacccctatttgcaatggagaaatacagtattctttggtttggttggatttgcaaatcctatttcctatcaaaggaaatatctctagtggatatttttagaatatagacaatttctaggtattaactaataagatatggaaaagatagctttgctttttttaatcagaagaacataaaataaattacaatatgaatgattgtgagacatcagagaaatattttacttagtgacgtaaactactgtgcactgctgctattcctaggaagctgtgttttgggcaatacatggaagctaaatatatgaccagaaatgctttctgccttgtaatatagtgtattatatattagagctaaatttagtaataaatgcattttgaagtttggaaaagtattgtaataaagttgcctttaacttagctttgtacttgttctgtttccttgaggctagacacagtgccatccaggacttattacagtataactgggtaaaataaacaattctctgaca

SEQ ID NO: 1459 - DNA, 2067 bp, Homo sapiens
cgcggggcgcggagtcggcggggcctcgcgggacgccgggcagtgcggagaccgcggcgctgaggacgcgggagccgggagcgcagccgcggggtggagttcagcctactctttcttagatgtgaaaggaaaggaagatcatttcatgccttgttgataaaggttcagacttctgctgattcataaccatttggctctgagctatgacaagagaggaaacaaaaagttaaacaagcaagcctgccataagtgagaagcatatttcattttctgtcattggactttgagccattagaaccatgagcaactacagtgtgtcactggttggcccagctccttggggtttccggctgcagggcggtaaggatttcaacatgcctctgacaatctctagtctaaaagatggcggcaaggcagcccaggcaaatgtaagaataggcgatgtggttctcagcattgatggaataaatgcacaaggaatgactcatcttgaagcccagaataagattaagggttgtacaggctctttgaatatgactctgcaaagagcatctgctgcacccaagcctgagccggttcctgttcaaaagcccacagtcaccagcgtgtgttccgagacttctcaggagctagcagagggacagagaagaggatcccagggtgacagtaaacagcaaaatgggaaaatcccacctaaacgcccaccaagaaaacacattgtggagcgctatacagagttttatcatgtacccactcacagtgatgccagcaagaagagactgattgaggatactgaagactggcgtccaaggactggaacaactcagtctcgctctttccgaatccttgcccagatcactgggactgaacatttgaaagaatctgaagccgataatacaaagaaggcaaataactctcaggagccttctccgcagttggcttcctcggtagcttccacacggagcatgcccgagagcctggacagcccaacctctggcagaccaggggttaccagcctcacagctgcagctgccttcaagcctgtaggatccactggcgtcatcaagtcaccaagctggcaacggccaaaccaaggagtaccttccactggaagaatctcaaacagcgctacttactcaggatcagtggcaccagccaactcagctttgggacaaacccagccaagtgaccaggacactttagtgcaaagagctgagcacattccagcagggaaacgaactccgatgtgcgcccattgtaaccaggtcatcagaggaccattcttagtggcactggggaaatcttggcacccagaagaattcaactgcgctcactgcaaaaatacaatggcctacattggatttgtagaggagaaaggagccctgtattgtgagctgtgctatgagaaattctttgcccctgaatgtggtcgatgccaaaggaagatccttggagaagtcatcagtgcgttgaaacaaacttggcatgtttcctgttttgtgtgtgtagcctgtggaaagcccattcggaacaatgtttttcacttggaggatggtgaaccctactgtgagactgattattatgccctctttggtactatatgccatggatgtgaatttcccatagaagctggtgacatgttcctggaagctctgggctacacctggcatgacacttgctttgtatgctcagtgtgttgtgaaagtttggaaggtcagacctttttctccaagaaggacaagcccctgtaatggatgaaagtccatgaacctcctaagttataatttaaatttgtttggggcaaggtgattttatagtcgagacagagccctaggtccttcctgccccatcactcacttacgacatcacttccattgtgtgcatgtttgttatagaggaggttttaggctacaatatttgtttaacctccctaagaactttcaaggcatctgtcctgaaagctgttaatttatggtctagcagatttatattatatgcagataataattaactggggataaaagaatggcaaggggtgacacaaagtagcaaactgaatacttctcc

SEQ ID NO: 1460 - skipped

SEQ ID NO: 1461 - DNA, 7052 bp, Homo sapiens
cgcggggcgcggagtcggcggggcctcgcgggacgccgggcagtgcggagaccgcggcgctgaggacgcgggagccgggagcgcagccgcggggtggagttcagcctactctttcttagatgtgaaaggaaaggaagatcatttcatgccttgttgataaaggttcagacttctgctgattcataaccatttggctctgagctatgacaagagaggaaacaaaaagttaaacaagcaagcctgccataagtgagaagcaaacttccttgataacatgcttttgcgaagtgcaggaaaattaaatgtgggcaccaagaaagaggatggtgagagtacagcccccaccccccgtccaaaggtcttgcgttgtaaatgccaccaccattgtccagaagactcagtcaacaatatttgcagcacagacggatattgtttcacgatgatagaagaggatgactctgggttgcctgtggtcacttctggttgcctaggactagaaggctcagattttcagtgtcgggacactcccattcctcatcaaagaagatcaattgaatgctgcacagaaaggaacgaatgtaataaagacctacaccctacactgcctccattgaaaaacagagattttgttgatggacctatacaccacagggctttacttatatctgtgactgtctgtagtttgctcttggtccttatcatattattttgttacttccggtataaaagacaagaaaccagacctcgatacagcattgggttagaacaggatgaaacttacattcctcctggagaatccctgagagacttaattgagcagtctcagagctcaggaagtggatcaggcctccctctgctggtccaaaggactatagctaagcagattcagatggtgaaacagattggaaaaggtcgctatggggaagtttggatgggaaagtggcgtggcgaaaaggtagctgtgaaagtgttcttcaccacagaggaagccagctggttcagagagacagaaatatatcagacagtgttgatgaggcatgaaaacattttgggtttcattgctgcagatatcaaagggacagggtcctggacccagttgtacctaatcacagactatcatgaaaatggttccctttatgattatctgaagtccaccaccctagacgctaaatcaatgctgaagttagcctactcttctgtcagtggcttatgtcatttacacacagaaatctttagtactcaaggcaaaccagcaattgcccatcgagatctgaaaagtaaaaacattctggtgaagaaaaatggaacttgctgtattgctgacctgggcctggctgttaaatttattagagcatctgctgcacccaagcctgagccggttcctgttcaaaagggagaacctaaagaagtagttaaacctgtgcccattacatctcctgctgtgtccaaagtcacttccacaaacaacatggcctacaataaggcaccacggccttttggttctgtgtcttcaccaaaagtcacatccatcccatcaccatcgtctgccttcaccccagcccatgcgaccacctcatcacatgcttccccttcacccgtggctgccgtcactcctcccctgttcgctgcatctggactgcatgctaatgccaatcttagtgctgaccagtctccatctgcactgagcgctggtaaaactgcagttaatgtcccacggcagcccacagtcaccagcgtgtgttccgagacttctcaggagctagcagagggacagagaagaggatcccagggtgacagtaaacagcaaaatggcccaccaagaaaacacattgtggagcgctatacagagttttatcatgtacccactcacagtgatgccagcaagaagagactgattgaggatactgaagactggcgtccaaggactggaacaactcagtctcgctctttccgaatccttgcccagatcactgggactgaacatttgaaagaatctgaagccgataatacaaagaaggcaaataactctcaggagccttctccgcagttggcttcctcggtagcttccacacggagcatgcccgagagcctggacagcccaacctctggcagaccaggggttaccagcctcacagctgcagctgccttcaagcctgtaggatccactggcgtcatcaagtcaccaagctggcaacggccaaaccaaggagtaccttccactggaagaatctcaaacagcgctacttactcaggatcagtggcaccagccaactcagctttgggacaaacccagccaagtgaccaggacactttagtgcaaagagctgagcacattccagcagggaaacgaactccgatgtgcgcccattgtaaccaggtcatcagaggaccattcttagtggcactggggaaatcttggcacccagaagaattcaactgcgctcactgcaaaaatacaatggcctacattggatttgtagaggagaaaggagccctgtattgtgagctgtgctatgagaaattctttgcccctgaatgtggtcgatgccaaaggaagatccttggagaagtcatcagtgcgttgaaacaaacttggcatgtttcctgttttgtgtgtgtagcctgtggaaagcccattcggaacaatgtttttcacttggaggatggtgaaccctactgtgagactgattattatgccctctttggtactatatgccatggatgtgaatttcccatagaagctggtgacatgttcctggaagctctgggctacacctggcatgacacttgctttgtatgctcagtgtgttgtgaaagtttggaaggtcagacctttttctccaagaaggacaagcccctgtgtaagaaacatgctcattctgtgaatttttgaaagtcaacagttcaggagaagagaaggaatttgaagagaaaaaggaaaattaaaattactaattaatttttagattcaatatttatatggagttttgaaaaataatagtggccctgaaggaataaattccagctttaaaaaccaagtctgaggaaatatttggcttcataaagtaaagagacggtttggcatttattattactttttcctgtattttatgcccataaaataagctttataaaaaccaatttcctgatggactattaaattcatcttagaataaattagtgaagaatttaattttagaataaataatccaatctgaaataattataccttctttccttgttaggtagttatgagtaaatctgcaaaaggcaatgaaaatgccttaaattttatcaataacagaattattgtatttaaaaaaaaactaatacttatctttaaaatagtaaataggattttaaacagagaattttatcagtaataggtgtcagtttttaaaaaattgcttgtaggctgagcgcggtggctcacgcctgtaatcccagcactttgggaggccaaggtgggtggaccacatgaggtcaggagtttgagatcagcctggccaacatggtgaaaccccatctctactaaaaatacaaaaattagccggacgcagtggcacgcgcctgtaatcccagctactcaagaggctgaggcacgagaatcacttgaacccgggagggagaggttgcagtgagccaagatcgtaccactgcactccagcctgggtgacagagtgagactctgtctccaaaaaaaaactttgcttgtatattatttttgccttacagtggatcattctagtaggaaaggacaataagattttttatcaaaatgtgtcatgccagtaagagatgttatattcttttctcatttcttccccacccaaaaataagctaccatatagcttataagtctcaaatttttgccttttactaaaatgtgattgtttctattcattgtgtatgcttcatcacctatattaggcaaattccatttttttcccttgtgctaaggtaaagatttaattaaataattttggcctctcatagttttctctctctttaaagagaataaatagagggccaggtgtggtggctcacgcctgtgatcccagcactttgggaggccaagacgggcggatcatgaggtcaagagatcaagatcatcctggccaacatggtgaaaccctgtctctactaaaaatacaaaaatgagctgggcatggtggggcgtgcctgtagtcccatgtacttgggaggctgaggcaggaaaattcttgaacccaggagacggaagttgcagtgagctgagatcacaccactgcactccagcctggtgacagagcaagactccggctcttaaaaaaaaaaaaaaaaaaaaaaaaagagagagagagaataaatagaaaagaatgtggctgggaattgtgaatcagaagattataccccccaattgtttttcaatccccttttctcaaataataaattagttaaatcagtttctgagttatgccactggctgatgaagagttgagaggtctctttgcagaatgatctttttgtttcgttttgtttcttcttctgcatttaaaaattaaaagattggtttgaggatgtgatgaaattgagactttttgtggttttctctcaataataagtgaaccaatttcaaatgtgatcacaaagtttggaaagcttttattcacagaggttgggtagtgttgggaggggagtttaattactcagattggcctgttatttgatttcctcctttgggaaaagaattatgtagataccacatggagacagggaaacaattgtggtaaaactgtggatcctgttgctatttgcccagtgagaaaacagattctggtatttgatttggtttttctctttgtttccagaatggatgaaagtccatgaacctcctaagttataatttaaatttgtttggggcaaggtgattttatagtcgagacagagccctaggtccttcctgccccatcactcacttacgacatcacttccattgtgtgcatgtttgttatagaggaggttttaggctacaatatttgtttaacctccctaagaactttcaaggcatctgtcctgaaagctgttaatttatggtctagcagatttatattatatgcagataataattaactggggataaaagaatggcaaggggtgacacaaagtagcaaactgaatacttctccaatagcaaccccaagctacctcctcaccctgcatcttggagggaggcaggaaatttcttttgaaataaagtgctggagctgaattctgcattatttatcgttgctgctgaaaccacctataaaagacttgctggctaatgtgcattgtcatataatgtacactgtcacatctttacagtcttgtatgttatagaatacaaaataagttgatggttttgtttggtgtgagctttttgtttgtttgtttagttttgccttcataggttatatgccaagatagtatttgataagtcaatgacatttggatgttttcttcaaagaattttatttgacccagatttcttataaagttatcttacattaaggatgtcattttcatcagaccttctttctacatattattcatgaagcataatgttgcatttctccaaattttatgcctgaaagggtagtgttgcttcctaaggtatcatgttgtctttgtgctttgtccatctcttccgtggcgaagctttatatctgttcctaaaacagttaatcctgtgaaataaatattgaacataatccagaagaatctctctgtttcccttggggaatgccatatttaattcaccagcagtaatcctttaataactggcagagcactttattcttctggtgagctccctgaatatttatttttctgattataaattttctatattagtagcattttttaattattacttcttcactatagagcatttacttttagtctctagatgtatattttggaatgctgtacttggcataacatagattaaaatcataatgcatgactaaaaactccttggatttatttcccattttaaaatttttagcggtaagttcagatttataatctttctctagacttccatggtctgaatgttgcctgctgaagtagcaacctaaaaagtatcccctgcttatgcttgtccagttggccctccatgtccataggcttcgcatctgtgattcagcccactgtgggtcaaaaatatttggggaaaaaaatggatggttgcgcctttgctgaacatgtacaaacttttttttgtcattaaacaatatagtataacaactatttacaaagcatttacattgtattagctattataggtaatctagagatgatttaaagtgtatggtaggatgtgcataggttatatgcaaatactacaccattttctataagggacttgaacatcatggactttagtatcctagggggttcttggaacccatcacccataggggcaccataggacaactatagtaccgtgtttatttcctattaattcaggttccgtttagagtctaaaactaaaacctaatcatttagtcacagtgtaaaaacaaatggaaataacagctcaaatcttcaaaatattactatagcattatgtttaaaataatctacaacaaaaatgtaccattttcaagcagtactacattaggagcccttttatagaaaataatttcttctttacccccgttccagtgtgaatctagtattctgttaacatttgtgtggcatttggagtttgtcatccccattgaagggagagccttctcagacatgaagcaagggaaacatactgaatagttttacacaaatttgatctggcttccatttgtccccctcatttcccaaatgtttaaatgtattggatttggattctcaatgtataagttgccttatctgttaatgtctatcttctgtctctttaattttgtatatctgctgttttgcttttggatacattttctaattagaagtcacatgataaatataatcagtatagtaataataccataatgtgcacatactcaataaataaatgactgcattgttgtaaatga

SEQ ID NO: 1462 - DNA, 6713 bp, Homo sapiens
cgcggggcgcggagtcggcggggcctcgcgggacgccgggcagtgcggagaccgcggcgctgaggacgcgggagccgggagcgcagccgcggggtggagttcagcctactctttcttagatgtgaaaggaaaggaagatcatttcatgccttgttgataaaggttcagacttctgctgattcataaccatttggctctgagctatgacaagagaggaaacaaaaagttaaacaagcaagcctgccataagtgagaagcaaacttccttgataacatgcttttgcgaagtgcaggaaaattaaatgtgggcaccaagaaagaggatggtgagagtacagcccccaccccccgtccaaaggtcttgcgttgtaaatgccaccaccattgtccagaagactcagtcaacaatatttgcagcacagacggatattgtttcacgatgatagaagaggatgactctgggttgcctgtggtcacttctggttgcctaggactagaaggctcagattttcagtgtcgggacactcccattcctcatcaaagaagatcaattgaatgctgcacagaaaggaacgaatgtaataaagacctacaccctacactgcctccattgaaaaacagagattttgttgatggacctatacaccacagggctttacttatatctgtgactgtctgtagtttgctcttggtccttatcatattattttgttacttccggtataaaagacaagaaaccagacctcgatacagcattgggttagaacaggatgaaacttacattcctcctggagaatccctgagagacttaattgagcagtctcagagctcaggaagtggatcaggcctccctctgctgctaaaagatggcggcaaggcagcccaggcaaatgtaagaataggcgatgtggttctcagcattgatggaataaatgcacaaggaatgactcatcttgaagcccagaataagattaagggttgtacaggctctttgaatatgactctgcaaagagcatctgctgcacccaagcctgagccggttcctgttcaaaagggagaacctaaagaagtagttaaacctgtgcccattacatctcctgctgtgtccaaagtcacttccacaaacaacatggcctacaataaggcaccacggccttttggttctgtgtcttcaccaaaagtcacatccatcccatcaccatcgtctgccttcaccccagcccatgcgaccacctcatcacatgcttccccttcacccgtggctgccgtcactcctcccctgttcgctgcatctggactgcatgctaatgccaatcttagtgctgaccagtctccatctgcactgagcgctggtaaaactgcagttaatgtcccacggcagcccacagtcaccagcgtgtgttccgagacttctcaggagctagcagagggacagagaagaggatcccagggtgacagtaaacagcaaaatggcccaccaagaaaacacattgtggagcgctatacagagttttatcatgtacccactcacagtgatgccagcaagaagagactgattgaggatactgaagactggcgtccaaggactggaacaactcagtctcgctctttccgaatccttgcccagatcactgggactgaacatttgaaagaatctgaagccgataatacaaagaaggcaaataactctcaggagccttctccgcagttggcttcctcggtagcttccacacggagcatgcccgagagcctggacagcccaacctctggcagaccaggggttaccagcctcacagctgcagctgccttcaagcctgtaggatccactggcgtcatcaagtcaccaagctggcaacggccaaaccaaggagtaccttccactggaagaatctcaaacagcgctacttactcaggatcagtggcaccagccaactcagctttgggacaaacccagccaagtgaccaggacactttagtgcaaagagctgagcacattccagcagggaaacgaactccgatgtgcgcccattgtaaccaggtcatcagaggaccattcttagtggcactggggaaatcttggcacccagaagaattcaactgcgctcactgcaaaaatacaatggcctacattggatttgtagaggagaaaggagccctgtattgtgagctgtgctatgagaaattctttgcccctgaatgtggtcgatgccaaaggaagatccttggagaagtcatcagtgcgttgaaacaaacttggcatgtttcctgttttgtgtgtgtagcctgtggaaagcccattcggaacaatgtttttcacttggaggatggtgaaccctactgtgagactgattattatgccctctttggtactatatgccatggatgtgaatttcccatagaagctggtgacatgttcctggaagctctgggctacacctggcatgacacttgctttgtatgctcagtgtgttgtgaaagtttggaaggtcagacctttttctccaagaaggacaagcccctgtgtaagaaacatgctcattctgtgaatttttgaaagtcaacagttcaggagaagagaaggaatttgaagagaaaaaggaaaattaaaattactaattaatttttagattcaatatttatatggagttttgaaaaataatagtggccctgaaggaataaattccagctttaaaaaccaagtctgaggaaatatttggcttcataaagtaaagagacggtttggcatttattattactttttcctgtattttatgcccataaaataagctttataaaaaccaatttcctgatggactattaaattcatcttagaataaattagtgaagaatttaattttagaataaataatccaatctgaaataattataccttctttccttgttaggtagttatgagtaaatctgcaaaaggcaatgaaaatgccttaaattttatcaataacagaattattgtatttaaaaaaaaactaatacttatctttaaaatagtaaataggattttaaacagagaattttatcagtaataggtgtcagtttttaaaaaattgcttgtaggctgagcgcggtggctcacgcctgtaatcccagcactttgggaggccaaggtgggtggaccacatgaggtcaggagtttgagatcagcctggccaacatggtgaaaccccatctctactaaaaatacaaaaattagccggacgcagtggcacgcgcctgtaatcccagctactcaagaggctgaggcacgagaatcacttgaacccgggagggagaggttgcagtgagccaagatcgtaccactgcactccagcctgggtgacagagtgagactctgtctccaaaaaaaaactttgcttgtatattatttttgccttacagtggatcattctagtaggaaaggacaataagattttttatcaaaatgtgtcatgccagtaagagatgttatattcttttctcatttcttccccacccaaaaataagctaccatatagcttataagtctcaaatttttgccttttactaaaatgtgattgtttctattcattgtgtatgcttcatcacctatattaggcaaattccatttttttcccttgtgctaaggtaaagatttaattaaataattttggcctctcatagttttctctctctttaaagagaataaatagagggccaggtgtggtggctcacgcctgtgatcccagcactttgggaggccaagacgggcggatcatgaggtcaagagatcaagatcatcctggccaacatggtgaaaccctgtctctactaaaaatacaaaaatgagctgggcatggtggggcgtgcctgtagtcccatgtacttgggaggctgaggcaggaaaattcttgaacccaggagacggaagttgcagtgagctgagatcacaccactgcactccagcctggtgacagagcaagactccggctcttaaaaaaaaaaaaaaaaaaaaaaaaagagagagagagaataaatagaaaagaatgtggctgggaattgtgaatcagaagattataccccccaattgtttttcaatccccttttctcaaataataaattagttaaatcagtttctgagttatgccactggctgatgaagagttgagaggtctctttgcagaatgatctttttgtttcgttttgtttcttcttctgcatttaaaaattaaaagattggtttgaggatgtgatgaaattgagactttttgtggttttctctcaataataagtgaaccaatttcaaatgtgatcacaaagtttggaaagcttttattcacagaggttgggtagtgttgggaggggagtttaattactcagattggcctgttatttgatttcctcctttgggaaaagaattatgtagataccacatggagacagggaaacaattgtggtaaaactgtggatcctgttgctatttgcccagtgagaaaacagattctggtatttgatttggtttttctctttgtttccagaatggatgaaagtccatgaacctcctaagttataatttaaatttgtttggggcaaggtgattttatagtcgagacagagccctaggtccttcctgccccatcactcacttacgacatcacttccattgtgtgcatgtttgttatagaggaggttttaggctacaatatttgtttaacctccctaagaactttcaaggcatctgtcctgaaagctgttaatttatggtctagcagatttatattatatgcagataataattaactggggataaaagaatggcaaggggtgacacaaagtagcaaactgaatacttctccaatagcaaccccaagctacctcctcaccctgcatcttggagggaggcaggaaatttcttttgaaataaagtgctggagctgaattctgcattatttatcgttgctgctgaaaccacctataaaagacttgctggctaatgtgcattgtcatataatgtacactgtcacatctttacagtcttgtatgttatagaatacaaaataagttgatggttttgtttggtgtgagctttttgtttgtttgtttagttttgccttcataggttatatgccaagatagtatttgataagtcaatgacatttggatgttttcttcaaagaattttatttgacccagatttcttataaagttatcttacattaaggatgtcattttcatcagaccttctttctacatattattcatgaagcataatgttgcatttctccaaattttatgcctgaaagggtagtgttgcttcctaaggtatcatgttgtctttgtgctttgtccatctcttccgtggcgaagctttatatctgttcctaaaacagttaatcctgtgaaataaatattgaacataatccagaagaatctctctgtttcccttggggaatgccatatttaattcaccagcagtaatcctttaataactggcagagcactttattcttctggtgagctccctgaatatttatttttctgattataaattttctatattagtagcattttttaattattacttcttcactatagagcatttacttttagtctctagatgtatattttggaatgctgtacttggcataacatagattaaaatcataatgcatgactaaaaactccttggatttatttcccattttaaaatttttagcggtaagttcagatttataatctttctctagacttccatggtctgaatgttgcctgctgaagtagcaacctaaaaagtatcccctgcttatgcttgtccagttggccctccatgtccataggcttcgcatctgtgattcagcccactgtgggtcaaaaatatttggggaaaaaaatggatggttgcgcctttgctgaacatgtacaaacttttttttgtcattaaacaatatagtataacaactatttacaaagcatttacattgtattagctattataggtaatctagagatgatttaaagtgtatggtaggatgtgcataggttatatgcaaatactacaccattttctataagggacttgaacatcatggactttagtatcctagggggttcttggaacccatcacccataggggcaccataggacaactatagtaccgtgtttatttcctattaattcaggttccgtttagagtctaaaactaaaacctaatcatttagtcacagtgtaaaaacaaatggaaataacagctcaaatcttcaaaatattactatagcattatgtttaaaataatctacaacaaaaatgtaccattttcaagcagtactacattaggagcccttttatagaaaataatttcttctttacccccgttccagtgtgaatctagtattctgttaacatttgtgtggcatttggagtttgtcatccccattgaagggagagccttctcagacatgaagcaagggaaacatactgaatagttttacacaaatttgatctggcttccatttgtccccctcatttcccaaatgtttaaatgtattggatttggattctcaatgtataagttgccttatctgttaatgtctatcttctgtctctttaattttgtatatctgctgttttgcttttggatacattttctaattagaagtcacatgataaatataatcagtatagtaataataccataatgtgcacatactcaataaataaatgactgcattgttgtaaatga

SEQ ID NO: 1463 - DNA, 5864 bp, Homo sapiens
cgcggggcgcggagtcggcggggcctcgcgggacgccgggcagtgcggagaccgcggcgctgaggacgcgggagccgggagcgcagccgcggggtggagttcagcctactctttcttagatgtgaaaggaaaggaagatcatttcatgccttgttgataaagagcatctgctgcacccaagcctgagccggttcctgttcaaaagggagaacctaaagaagtagttaaacctgtgcccattacatctcctgctgtgtccaaagtcacttccacaaacaacatggcctacaataaggcaccacggccttttggttctgtgtcttcaccaaaagtcacatccatcccatcaccatcgtctgccttcaccccagcccatgcgaccacctcatcacatgcttccccttcacccgtggctgccgtcactcctcccctgttcgctgcatctggactgcatgctaatgccaatcttagtgctgaccagtctccatctgcactgagcgctggtaaaactgcagttaatgtcccacggcagcccacagtcaccagcgtgtgttccgagacttctcaggagctagcagagggacagagaagaggatcccagggtgacagtaaacagcaaaatggcccaccaagaaaacacattgtggagcgctatacagagttttatcatgtacccactcacagtgatgccagcaagaagagactgattgaggatactgaagactggcgtccaaggactggaacaactcagtctcgctctttccgaatccttgcccagatcactgggactgaacatttgaaagaatctgaagccgataatacaaagaaggcaaataactctcaggagccttctccgcagttggcttcctcggtagcttccacacggagcatgcccgagagcctggacagcccaacctctggcagaccaggggttaccagcctcacagctgcagctgccttcaagcctgtaggatccactggcgtcatcaagtcaccaagctggcaacggccaaaccaaggagtaccttccactggaagaatctcaaacagcgctacttactcaggatcagtggcaccagccaactcagctttgggacaaacccagccaagtgaccaggacactttagtgcaaagagctgagcacattccagcagggaaacgaactccgatgtgcgcccattgtaaccaggtcatcagaggaccattcttagtggcactggggaaatcttggcacccagaagaattcaactgcgctcactgcaaaaatacaatggcctacattggatttgtagaggagaaaggagccctgtattgtgagctgtgctatgagaaattctttgcccctgaatgtggtcgatgccaaaggaagatccttggagaagtcatcagtgcgttgaaacaaacttggcatgtttcctgttttgtgtgtgtagcctgtggaaagcccattcggaacaatgtttttcacttggaggatggtgaaccctactgtgagactgattattatgccctctttggtactatatgccatggatgtgaatttcccatagaagctggtgacatgttcctggaagctctgggctacacctggcatgacacttgctttgtatgctcagtgtgttgtgaaagtttggaaggtcagacctttttctccaagaaggacaagcccctgtgtaagaaacatgctcattctgtgaatttttgaaagtcaacagttcaggagaagagaaggaatttgaagagaaaaaggaaaattaaaattactaattaatttttagattcaatatttatatggagttttgaaaaataatagtggccctgaaggaataaattccagctttaaaaaccaagtctgaggaaatatttggcttcataaagtaaagagacggtttggcatttattattactttttcctgtattttatgcccataaaataagctttataaaaaccaatttcctgatggactattaaattcatcttagaataaattagtgaagaatttaattttagaataaataatccaatctgaaataattataccttctttccttgttaggtagttatgagtaaatctgcaaaaggcaatgaaaatgccttaaattttatcaataacagaattattgtatttaaaaaaaaactaatacttatctttaaaatagtaaataggattttaaacagagaattttatcagtaataggtgtcagtttttaaaaaattgcttgtaggctgagcgcggtggctcacgcctgtaatcccagcactttgggaggccaaggtgggtggaccacatgaggtcaggagtttgagatcagcctggccaacatggtgaaaccccatctctactaaaaatacaaaaattagccggacgcagtggcacgcgcctgtaatcccagctactcaagaggctgaggcacgagaatcacttgaacccgggagggagaggttgcagtgagccaagatcgtaccactgcactccagcctgggtgacagagtgagactctgtctccaaaaaaaaactttgcttgtatattatttttgccttacagtggatcattctagtaggaaaggacaataagattttttatcaaaatgtgtcatgccagtaagagatgttatattcttttctcatttcttccccacccaaaaataagctaccatatagcttataagtctcaaatttttgccttttactaaaatgtgattgtttctattcattgtgtatgcttcatcacctatattaggcaaattccatttttttcccttgtgctaaggtaaagatttaattaaataattttggcctctcatagttttctctctctttaaagagaataaatagagggccaggtgtggtggctcacgcctgtgatcccagcactttgggaggccaagacgggcggatcatgaggtcaagagatcaagatcatcctggccaacatggtgaaaccctgtctctactaaaaatacaaaaatgagctgggcatggtggggcgtgcctgtagtcccatgtacttgggaggctgaggcaggaaaattcttgaacccaggagacggaagttgcagtgagctgagatcacaccactgcactccagcctggtgacagagcaagactccggctcttaaaaaaaaaaaaaaaaaaaaaaaaagagagagagagaataaatagaaaagaatgtggctgggaattgtgaatcagaagattataccccccaattgtttttcaatccccttttctcaaataataaattagttaaatcagtttctgagttatgccactggctgatgaagagttgagaggtctctttgcagaatgatctttttgtttcgttttgtttcttcttctgcatttaaaaattaaaagattggtttgaggatgtgatgaaattgagactttttgtggttttctctcaataataagtgaaccaatttcaaatgtgatcacaaagtttggaaagcttttattcacagaggttgggtagtgttgggaggggagtttaattactcagattggcctgttatttgatttcctcctttgggaaaagaattatgtagataccacatggagacagggaaacaattgtggtaaaactgtggatcctgttgctatttgcccagtgagaaaacagattctggtatttgatttggtttttctctttgtttccagaatggatgaaagtccatgaacctcctaagttataatttaaatttgtttggggcaaggtgattttatagtcgagacagagccctaggtccttcctgccccatcactcacttacgacatcacttccattgtgtgcatgtttgttatagaggaggttttaggctacaatatttgtttaacctccctaagaactttcaaggcatctgtcctgaaagctgttaatttatggtctagcagatttatattatatgcagataataattaactggggataaaagaatggcaaggggtgacacaaagtagcaaactgaatacttctccaatagcaaccccaagctacctcctcaccctgcatcttggagggaggcaggaaatttcttttgaaataaagtgctggagctgaattctgcattatttatcgttgctgctgaaaccacctataaaagacttgctggctaatgtgcattgtcatataatgtacactgtcacatctttacagtcttgtatgttatagaatacaaaataagttgatggttttgtttggtgtgagctttttgtttgtttgtttagttttgccttcataggttatatgccaagatagtatttgataagtcaatgacatttggatgttttcttcaaagaattttatttgacccagatttcttataaagttatcttacattaaggatgtcattttcatcagaccttctttctacatattattcatgaagcataatgttgcatttctccaaattttatgcctgaaagggtagtgttgcttcctaaggtatcatgttgtctttgtgctttgtccatctcttccgtggcgaagctttatatctgttcctaaaacagttaatcctgtgaaataaatattgaacataatccagaagaatctctctgtttcccttggggaatgccatatttaattcaccagcagtaatcctttaataactggcagagcactttattcttctggtgagctccctgaatatttatttttctgattataaattttctatattagtagcattttttaattattacttcttcactatagagcatttacttttagtctctagatgtatattttggaatgctgtacttggcataacatagattaaaatcataatgcatgactaaaaactccttggatttatttcccattttaaaatttttagcggtaagttcagatttataatctttctctagacttccatggtctgaatgttgcctgctgaagtagcaacctaaaaagtatcccctgcttatgcttgtccagttggccctccatgtccataggcttcgcatctgtgattcagcccactgtgggtcaaaaatatttggggaaaaaaatggatggttgcgcctttgctgaacatgtacaaacttttttttgtcattaaacaatatagtataacaactatttacaaagcatttacattgtattagctattataggtaatctagagatgatttaaagtgtatggtaggatgtgcataggttatatgcaaatactacaccattttctataagggacttgaacatcatggactttagtatcctagggggttcttggaacccatcacccataggggcaccataggacaactatagtaccgtgtttatttcctattaattcaggttccgtttagagtctaaaactaaaacctaatcatttagtcacagtgtaaaaacaaatggaaataacagctcaaatcttcaaaatattactatagcattatgtttaaaataatctacaacaaaaatgtaccattttcaagcagtactacattaggagcccttttatagaaaataatttcttctttacccccgttccagtgtgaatctagtattctgttaacatttgtgtggcatttggagtttgtcatccccattgaagggagagccttctcagacatgaagcaagggaaacatactgaatagttttacacaaatttgatctggcttccatttgtccccctcatttcccaaatgtttaaatgtattggatttggattctcaatgtataagttgccttatctgttaatgtctatcttctgtctctttaattttgtatatctgctgttttgcttttggatacattttctaattagaagtcacatgataaatataatcagtatagtaataataccataatgtgcacatactcaataaataaatgactgcattgttgtaaatga

SEQ ID NO: 1464 - DNA, 2605 bp, Homo sapiens
cgcggggcgcggagtcggcggggcctcgcgggacgccgggcagtgcggagaccgcggcgctgaggacgcgggagccgggagcgcagccgcggggtggagttcagcctactctttcttagatgtgaaaggaaaggaagatcatttcatgccttgttgataaaggttcagacttctgctgattcataaccatttggctctgagctatgacaagagaggaaacaaaaagttaaacaagcaagcctgccataagtgagaagcaaacttccttgataacatgcttttgcgaagtgcaggaaaattaaatgtgggcaccaagaaagaggatggtgagagtacagcccccaccccccgtccaaaggtcttgcgttgtaaatgccaccaccattgtccagaagactcagtcaacaatatttgcagcacagacggatattgtttcacgatgatagaagaggatgactctgggttgcctgtggtcacttctggttgcctaggactagaaggctcagattttcagtgtcgggacactcccattcctcatcaaagaagatcaattgaatgctgcacagaaaggaacgaatgtaataaagacctacaccctacactgcctccattgaaaaacagagattttgttgatggacctatacaccacagggctttacttatatctgtgactgtctgtagtttgctcttggtccttatcatattattttgttacttccggtataaaagacaagaaaccagacctcgatacagcattgggttagaacaggatgaaacttacattcctcctggagaatccctgagagacttaattgagcagtctcagagctcaggaagtggatcaggcctccctctgctgctaaaagatggcggcaaggcagcccaggcaaatgtaagaataggcgatgtggttctcagcattgatggaataaatgcacaaggaatgactcatcttgaagcccagaataagattaagggttgtacaggctctttgaatatgactctgcaaagagcatctgctgcacccaagcctgagccggttcctgttcaaaagcccacagtcaccagcgtgtgttccgagacttctcaggagctagcagagggacagagaagaggatcccagggtgacagtaaacagcaaaatgggaaaatcccacctaaacgcccaccaagaaaacacattgtggagcgctatacagagttttatcatgtacccactcacagtgatgccagcaagaagagactgattgaggatactgaagactggcgtccaaggactggaacaactcagtctcgctctttccgaatccttgcccagatcactgggactgaacatttgaaagaatctgaagccgataatacaaagaaggcaaaggaaaagataccccttcacgtctttagtcccaaatacacaaaattacgtgactggcaccatgaagtttcagcacgtgctcttaacgtacagtgatttatgagccttgccccccaagcagccagcacataccttttcatttactttttttttttcaacttcatagcaaaatctgtattaaatttgccttatgaaaaaatagaactttttctatacttttctaacaatttcctattgttgtgagaaaaggaagatgaacatgttttgtgctagttggtagctcacaaatgtaaaaccaaaaaaaaaaaaaaatagaaaattaagggactagatctatttgtggatttgtatctgtttttgttgtgattagggtagtaatcttggaaaacgaattattttcataagttgaatttggttagttggttggttgaagcagaggataatgagcaaataaagtccttgtctaatttggaaaatactttctttatattattaacatctcccaagattactttttaagttcattattatgttacattcaaagttgattgtaaattattctaaataagtaaatataaggaggcaagaataaacaaagactttattaaagaagagtgcgtgcattgtagatttaggtatcttttaaagtaggtactattcaggatggctctatgaagaggaggaggtccagatttggctcctgaaaaaggaaagaagagaattttacccctatttgcaatggagaaatacagtattctttggtttggttggatttgcaaatcctatttcctatcaaaggaaatatctctagtggatatttttagaatatagacaatttctaggtattaactaataagatatggaaaagatagctttgctttttttaatcagaagaacataaaataaattacaatatgaatgattgtgagacatcagagaaatattttacttagtgacgtaaactactgtgcactgctgctattcctaggaagctgtgttttgggcaatacatggaagctaaatatatgaccagaaatgctttctgccttgtaatatagtgtattatatattagagctaaatttagtaataaatgcattttgaagtttggaaaagtattgtaataaagttgcctttaacttagctttgtacttgttctgtttccttgaggctagacacagtgccatccaggacttattacagtataactgggtaaaataaacaattctctgaca

SEQ ID NO: 1465 - DNA, 6521 bp, Homo sapiens
gactggggtagtctaccccacagatgcctaactctcactatttcttctttcagcaaacttccttgataacatgcttttgcgaagtgcaggaaaattaaatgtgggcaccaagaaagaggatggtgagagtacagcccccaccccccgtccaaaggtcttgcgttgtaaatgccaccaccattgtccagaagactcagtcaacaatatttgcagcacagacggatattgtttcacgatgatagaagaggatgactctgggttgcctgtggtcacttctggttgcctaggactagaaggctcagattttcagtgtcgggacactcccattcctcatcaaagaagatcaattgaatgctgcacagaaaggaacgaatgtaataaagacctacaccctacactgcctccattgaaaaacagagattttgttgatggacctatacaccacagggctttacttatatctgtgactgtctgtagtttgctcttggtccttatcatattattttgttacttccggtataaaagacaagaaaccagacctcgatacagcattgggttagaacaggatgaaacttacattcctcctggagaatccctgagagacttaattgagcagtctcagagctcaggaagtggatcaggcctccctctgctggtccaaaggactatagctaagcagattcagatggtgaaacagattggaaaaggtcgctatggggaagtttggatgggaaagtggcgtggcgaaaaggtagctgtgaaagtgttcttcaccacagaggaagccagctggttcagagagacagaaatatatcagacagtgttgatgaggcatgaaaacattttgggtttcattgctgcagatatcaaagggacagggtcctggacccagttgtacctaatcacagactatcatgaaaatggttccctttatgattatctgaagtccaccaccctagacgctaaatcaatgctgaagttagcctactcttctgtcagtggcttatgtcatttacacacagaaatctttagtactcaaggcaaaccagcaattgcccatcgagatctgaaaagtaaaaacattctggtgaagaaaaatggaacttgctgtattgctgacctgggcctggctgttaaatttattagagcatctgctgcacccaagcctgagccggttcctgttcaaaagcccacagtcaccagcgtgtgttccgagacttctcaggagctagcagagggacagagaagaggatcccagggtgacagtaaacagcaaaatggcccaccaagaaaacacattgtggagcgctatacagagttttatcatgtacccactcacagtgatgccagcaagaagagactgattgaggatactgaagactggcgtccaaggactggaacaactcagtctcgctctttccgaatccttgcccagatcactgggactgaacatttgaaagaatctgaagccgataatacaaagaaggcaaataactctcaggagccttctccgcagttggcttcctcggtagcttccacacggagcatgcccgagagcctggacagcccaacctctggcagaccaggggttaccagcctcacagctgcagctgccttcaagcctgtaggatccactggcgtcatcaagtcaccaagctggcaacggccaaaccaaggagtaccttccactggaagaatctcaaacagcgctacttactcaggatcagtggcaccagccaactcagctttgggacaaacccagccaagtgaccaggacactttagtgcaaagagctgagcacattccagcagggaaacgaactccgatgtgcgcccattgtaaccaggtcatcagaggaccattcttagtggcactggggaaatcttggcacccagaagaattcaactgcgctcactgcaaaaatacaatggcctacattggatttgtagaggagaaaggagccctgtattgtgagctgtgctatgagaaattctttgcccctgaatgtggtcgatgccaaaggaagatccttggagaagtcatcagtgcgttgaaacaaacttggcatgtttcctgttttgtgtgtgtagcctgtggaaagcccattcggaacaatgtttttcacttggaggatggtgaaccctactgtgagactgattattatgccctctttggtactatatgccatggatgtgaatttcccatagaagctggtgacatgttcctggaagctctgggctacacctggcatgacacttgctttgtatgctcagtgtgttgtgaaagtttggaaggtcagacctttttctccaagaaggacaagcccctgtgtaagaaacatgctcattctgtgaatttttgaaagtcaacagttcaggagaagagaaggaatttgaagagaaaaaggaaaattaaaattactaattaatttttagattcaatatttatatggagttttgaaaaataatagtggccctgaaggaataaattccagctttaaaaaccaagtctgaggaaatatttggcttcataaagtaaagagacggtttggcatttattattactttttcctgtattttatgcccataaaataagctttataaaaaccaatttcctgatggactattaaattcatcttagaataaattagtgaagaatttaattttagaataaataatccaatctgaaataattataccttctttccttgttaggtagttatgagtaaatctgcaaaaggcaatgaaaatgccttaaattttatcaataacagaattattgtatttaaaaaaaaactaatacttatctttaaaatagtaaataggattttaaacagagaattttatcagtaataggtgtcagtttttaaaaaattgcttgtaggctgagcgcggtggctcacgcctgtaatcccagcactttgggaggccaaggtgggtggaccacatgaggtcaggagtttgagatcagcctggccaacatggtgaaaccccatctctactaaaaatacaaaaattagccggacgcagtggcacgcgcctgtaatcccagctactcaagaggctgaggcacgagaatcacttgaacccgggagggagaggttgcagtgagccaagatcgtaccactgcactccagcctgggtgacagagtgagactctgtctccaaaaaaaaactttgcttgtatattatttttgccttacagtggatcattctagtaggaaaggacaataagattttttatcaaaatgtgtcatgccagtaagagatgttatattcttttctcatttcttccccacccaaaaataagctaccatatagcttataagtctcaaatttttgccttttactaaaatgtgattgtttctattcattgtgtatgcttcatcacctatattaggcaaattccatttttttcccttgtgctaaggtaaagatttaattaaataattttggcctctcatagttttctctctctttaaagagaataaatagagggccaggtgtggtggctcacgcctgtgatcccagcactttgggaggccaagacgggcggatcatgaggtcaagagatcaagatcatcctggccaacatggtgaaaccctgtctctactaaaaatacaaaaatgagctgggcatggtggggcgtgcctgtagtcccatgtacttgggaggctgaggcaggaaaattcttgaacccaggagacggaagttgcagtgagctgagatcacaccactgcactccagcctggtgacagagcaagactccggctcttaaaaaaaaaaaaaaaaaaaaaaaaagagagagagagaataaatagaaaagaatgtggctgggaattgtgaatcagaagattataccccccaattgtttttcaatccccttttctcaaataataaattagttaaatcagtttctgagttatgccactggctgatgaagagttgagaggtctctttgcagaatgatctttttgtttcgttttgtttcttcttctgcatttaaaaattaaaagattggtttgaggatgtgatgaaattgagactttttgtggttttctctcaataataagtgaaccaatttcaaatgtgatcacaaagtttggaaagcttttattcacagaggttgggtagtgttgggaggggagtttaattactcagattggcctgttatttgatttcctcctttgggaaaagaattatgtagataccacatggagacagggaaacaattgtggtaaaactgtggatcctgttgctatttgcccagtgagaaaacagattctggtatttgatttggtttttctctttgtttccagaatggatgaaagtccatgaacctcctaagttataatttaaatttgtttggggcaaggtgattttatagtcgagacagagccctaggtccttcctgccccatcactcacttacgacatcacttccattgtgtgcatgtttgttatagaggaggttttaggctacaatatttgtttaacctccctaagaactttcaaggcatctgtcctgaaagctgttaatttatggtctagcagatttatattatatgcagataataattaactggggataaaagaatggcaaggggtgacacaaagtagcaaactgaatacttctccaatagcaaccccaagctacctcctcaccctgcatcttggagggaggcaggaaatttcttttgaaataaagtgctggagctgaattctgcattatttatcgttgctgctgaaaccacctataaaagacttgctggctaatgtgcattgtcatataatgtacactgtcacatctttacagtcttgtatgttatagaatacaaaataagttgatggttttgtttggtgtgagctttttgtttgtttgtttagttttgccttcataggttatatgccaagatagtatttgataagtcaatgacatttggatgttttcttcaaagaattttatttgacccagatttcttataaagttatcttacattaaggatgtcattttcatcagaccttctttctacatattattcatgaagcataatgttgcatttctccaaattttatgcctgaaagggtagtgttgcttcctaaggtatcatgttgtctttgtgctttgtccatctcttccgtggcgaagctttatatctgttcctaaaacagttaatcctgtgaaataaatattgaacataatccagaagaatctctctgtttcccttggggaatgccatatttaattcaccagcagtaatcctttaataactggcagagcactttattcttctggtgagctccctgaatatttatttttctgattataaattttctatattagtagcattttttaattattacttcttcactatagagcatttacttttagtctctagatgtatattttggaatgctgtacttggcataacatagattaaaatcataatgcatgactaaaaactccttggatttatttcccattttaaaatttttagcggtaagttcagatttataatctttctctagacttccatggtctgaatgttgcctgctgaagtagcaacctaaaaagtatcccctgcttatgcttgtccagttggccctccatgtccataggcttcgcatctgtgattcagcccactgtgggtcaaaaatatttggggaaaaaaatggatggttgcgcctttgctgaacatgtacaaacttttttttgtcattaaacaatatagtataacaactatttacaaagcatttacattgtattagctattataggtaatctagagatgatttaaagtgtatggtaggatgtgcataggttatatgcaaatactacaccattttctataagggacttgaacatcatggactttagtatcctagggggttcttggaacccatcacccataggggcaccataggacaactatagtaccgtgtttatttcctattaattcaggttccgtttagagtctaaaactaaaacctaatcatttagtcacagtgtaaaaacaaatggaaataacagctcaaatcttcaaaatattactatagcattatgtttaaaataatctacaacaaaaatgtaccattttcaagcagtactacattaggagcccttttatagaaaataatttcttctttacccccgttccagtgtgaatctagtattctgttaacatttgtgtggcatttggagtttgtcatccccattgaagggagagccttctcagacatgaagcaagggaaacatactgaatagttttacacaaatttgatctggcttccatttgtccccctcatttcccaaatgtttaaatgtattggatttggattctcaatgtataagttgccttatctgttaatgtctatcttctgtctctttaattttgtatatctgctgttttgcttttggatacattttctaattagaagtcacatgataaatataatcagtatagtaataataccataatgtgcacatactcaataaataaatgactgcattgttgtaaatga

SEQ ID NO: 1466 - DNA, 2944 bp, Homo sapiens
cgcggggcgcggagtcggcggggcctcgcgggacgccgggcagtgcggagaccgcggcgctgaggacgcgggagccgggagcgcagccgcggggtggagttcagcctactctttcttagatgtgaaaggaaaggaagatcatttcatgccttgttgataaaggttcagacttctgctgattcataaccatttggctctgagctatgacaagagaggaaacaaaaagttaaacaagcaagcctgccataagtgagaagcaaacttccttgataacatgcttttgcgaagtgcaggaaaattaaatgtgggcaccaagaaagaggatggtgagagtacagcccccaccccccgtccaaaggtcttgcgttgtaaatgccaccaccattgtccagaagactcagtcaacaatatttgcagcacagacggatattgtttcacgatgatagaagaggatgactctgggttgcctgtggtcacttctggttgcctaggactagaaggctcagattttcagtgtcgggacactcccattcctcatcaaagaagatcaattgaatgctgcacagaaaggaacgaatgtaataaagacctacaccctacactgcctccattgaaaaacagagattttgttgatggacctatacaccacagggctttacttatatctgtgactgtctgtagtttgctcttggtccttatcatattattttgttacttccggtataaaagacaagaaaccagacctcgatacagcattgggttagaacaggatgaaacttacattcctcctggagaatccctgagagacttaattgagcagtctcagagctcaggaagtggatcaggcctccctctgctggtccaaaggactatagctaagcagattcagatggtgaaacagattggaaaaggtcgctatggggaagtttggatgggaaagtggcgtggcgaaaaggtagctgtgaaagtgttcttcaccacagaggaagccagctggttcagagagacagaaatatatcagacagtgttgatgaggcatgaaaacattttgggtttcattgctgcagatatcaaagggacagggtcctggacccagttgtacctaatcacagactatcatgaaaatggttccctttatgattatctgaagtccaccaccctagacgctaaatcaatgctgaagttagcctactcttctgtcagtggcttatgtcatttacacacagaaatctttagtactcaaggcaaaccagcaattgcccatcgagatctgaaaagtaaaaacattctggtgaagaaaaatggaacttgctgtattgctgacctgggcctggctgttaaatttattagagcatctgctgcacccaagcctgagccggttcctgttcaaaagcccacagtcaccagcgtgtgttccgagacttctcaggagctagcagagggacagagaagaggatcccagggtgacagtaaacagcaaaatgggaaaatcccacctaaacgcccaccaagaaaacacattgtggagcgctatacagagttttatcatgtacccactcacagtgatgccagcaagaagagactgattgaggatactgaagactggcgtccaaggactggaacaactcagtctcgctctttccgaatccttgcccagatcactgggactgaacatttgaaagaatctgaagccgataatacaaagaaggcaaaggaaaagataccccttcacgtctttagtcccaaatacacaaaattacgtgactggcaccatgaagtttcagcacgtgctcttaacgtacagtgatttatgagccttgccccccaagcagccagcacataccttttcatttactttttttttttcaacttcatagcaaaatctgtattaaatttgccttatgaaaaaatagaactttttctatacttttctaacaatttcctattgttgtgagaaaaggaagatgaacatgttttgtgctagttggtagctcacaaatgtaaaaccaaaaaaaaaaaaaaatagaaaattaagggactagatctatttgtggatttgtatctgtttttgttgtgattagggtagtaatcttggaaaacgaattattttcataagttgaatttggttagttggttggttgaagcagaggataatgagcaaataaagtccttgtctaatttggaaaatactttctttatattattaacatctcccaagattactttttaagttcattattatgttacattcaaagttgattgtaaattattctaaataagtaaatataaggaggcaagaataaacaaagactttattaaagaagagtgcgtgcattgtagatttaggtatcttttaaagtaggtactattcaggatggctctatgaagaggaggaggtccagatttggctcctgaaaaaggaaagaagagaattttacccctatttgcaatggagaaatacagtattctttggtttggttggatttgcaaatcctatttcctatcaaaggaaatatctctagtggatatttttagaatatagacaatttctaggtattaactaataagatatggaaaagatagctttgctttttttaatcagaagaacataaaataaattacaatatgaatgattgtgagacatcagagaaatattttacttagtgacgtaaactactgtgcactgctgctattcctaggaagctgtgttttgggcaatacatggaagctaaatatatgaccagaaatgctttctgccttgtaatatagtgtattatatattagagctaaatttagtaataaatgcattttgaagtttggaaaagtattgtaataaagttgcctttaacttagctttgtacttgttctgtttccttgaggctagacacagtgccatccaggacttattacagtataactgggtaaaataaacaattctctgaca

SEQ ID NO: 1467 - DNA, 5402 bp, Homo sapiens
cgcggggcgcggagtcggcggggcctcgcgggacgccgggcagtgcggagaccgcggcgctgaggacgcgggagccgggagcgcagccgcggggtggagttcagcctactctttcttagatgtgaaaggaaaggaagatcatttcatgccttgttgataaagcccaccaagaaaacacattgtggagcgctatacagagttttatcatgtacccactcacagtgatgccagcaagaagagactgattgaggatactgaagactggcgtccaaggactggaacaactcagtctcgctctttccgaatccttgcccagatcactgggactgaacatttgaaagaatctgaagccgataatacaaagaaggcaaataactctcaggagccttctccgcagttggcttcctcggtagcttccacacggagcatgcccgagagcctggacagcccaacctctggcagaccaggggttaccagcctcacagctgcagctgccttcaagcctgtaggatccactggcgtcatcaagtcaccaagctggcaacggccaaaccaaggagtaccttccactggaagaatctcaaacagcgctacttactcaggatcagtggcaccagccaactcagctttgggacaaacccagccaagtgaccaggacactttagtgcaaagagctgagcacattccagcagggaaacgaactccgatgtgcgcccattgtaaccaggtcatcagaggaccattcttagtggcactggggaaatcttggcacccagaagaattcaactgcgctcactgcaaaaatacaatggcctacattggatttgtagaggagaaaggagccctgtattgtgagctgtgctatgagaaattctttgcccctgaatgtggtcgatgccaaaggaagatccttggagaagtcatcagtgcgttgaaacaaacttggcatgtttcctgttttgtgtgtgtagcctgtggaaagcccattcggaacaatgtttttcacttggaggatggtgaaccctactgtgagactgattattatgccctctttggtactatatgccatggatgtgaatttcccatagaagctggtgacatgttcctggaagctctgggctacacctggcatgacacttgctttgtatgctcagtgtgttgtgaaagtttggaaggtcagacctttttctccaagaaggacaagcccctgtgtaagaaacatgctcattctgtgaatttttgaaagtcaacagttcaggagaagagaaggaatttgaagagaaaaaggaaaattaaaattactaattaatttttagattcaatatttatatggagttttgaaaaataatagtggccctgaaggaataaattccagctttaaaaaccaagtctgaggaaatatttggcttcataaagtaaagagacggtttggcatttattattactttttcctgtattttatgcccataaaataagctttataaaaaccaatttcctgatggactattaaattcatcttagaataaattagtgaagaatttaattttagaataaataatccaatctgaaataattataccttctttccttgttaggtagttatgagtaaatctgcaaaaggcaatgaaaatgccttaaattttatcaataacagaattattgtatttaaaaaaaaactaatacttatctttaaaatagtaaataggattttaaacagagaattttatcagtaataggtgtcagtttttaaaaaattgcttgtaggctgagcgcggtggctcacgcctgtaatcccagcactttgggaggccaaggtgggtggaccacatgaggtcaggagtttgagatcagcctggccaacatggtgaaaccccatctctactaaaaatacaaaaattagccggacgcagtggcacgcgcctgtaatcccagctactcaagaggctgaggcacgagaatcacttgaacccgggagggagaggttgcagtgagccaagatcgtaccactgcactccagcctgggtgacagagtgagactctgtctccaaaaaaaaactttgcttgtatattatttttgccttacagtggatcattctagtaggaaaggacaataagattttttatcaaaatgtgtcatgccagtaagagatgttatattcttttctcatttcttccccacccaaaaataagctaccatatagcttataagtctcaaatttttgccttttactaaaatgtgattgtttctattcattgtgtatgcttcatcacctatattaggcaaattccatttttttcccttgtgctaaggtaaagatttaattaaataattttggcctctcatagttttctctctctttaaagagaataaatagagggccaggtgtggtggctcacgcctgtgatcccagcactttgggaggccaagacgggcggatcatgaggtcaagagatcaagatcatcctggccaacatggtgaaaccctgtctctactaaaaatacaaaaatgagctgggcatggtggggcgtgcctgtagtcccatgtacttgggaggctgaggcaggaaaattcttgaacccaggagacggaagttgcagtgagctgagatcacaccactgcactccagcctggtgacagagcaagactccggctcttaaaaaaaaaaaaaaaaaaaaaaaaagagagagagagaataaatagaaaagaatgtggctgggaattgtgaatcagaagattataccccccaattgtttttcaatccccttttctcaaataataaattagttaaatcagtttctgagttatgccactggctgatgaagagttgagaggtctctttgcagaatgatctttttgtttcgttttgtttcttcttctgcatttaaaaattaaaagattggtttgaggatgtgatgaaattgagactttttgtggttttctctcaataataagtgaaccaatttcaaatgtgatcacaaagtttggaaagcttttattcacagaggttgggtagtgttgggaggggagtttaattactcagattggcctgttatttgatttcctcctttgggaaaagaattatgtagataccacatggagacagggaaacaattgtggtaaaactgtggatcctgttgctatttgcccagtgagaaaacagattctggtatttgatttggtttttctctttgtttccagaatggatgaaagtccatgaacctcctaagttataatttaaatttgtttggggcaaggtgattttatagtcgagacagagccctaggtccttcctgccccatcactcacttacgacatcacttccattgtgtgcatgtttgttatagaggaggttttaggctacaatatttgtttaacctccctaagaactttcaaggcatctgtcctgaaagctgttaatttatggtctagcagatttatattatatgcagataataattaactggggataaaagaatggcaaggggtgacacaaagtagcaaactgaatacttctccaatagcaaccccaagctacctcctcaccctgcatcttggagggaggcaggaaatttcttttgaaataaagtgctggagctgaattctgcattatttatcgttgctgctgaaaccacctataaaagacttgctggctaatgtgcattgtcatataatgtacactgtcacatctttacagtcttgtatgttatagaatacaaaataagttgatggttttgtttggtgtgagctttttgtttgtttgtttagttttgccttcataggttatatgccaagatagtatttgataagtcaatgacatttggatgttttcttcaaagaattttatttgacccagatttcttataaagttatcttacattaaggatgtcattttcatcagaccttctttctacatattattcatgaagcataatgttgcatttctccaaattttatgcctgaaagggtagtgttgcttcctaaggtatcatgttgtctttgtgctttgtccatctcttccgtggcgaagctttatatctgttcctaaaacagttaatcctgtgaaataaatattgaacataatccagaagaatctctctgtttcccttggggaatgccatatttaattcaccagcagtaatcctttaataactggcagagcactttattcttctggtgagctccctgaatatttatttttctgattataaattttctatattagtagcattttttaattattacttcttcactatagagcatttacttttagtctctagatgtatattttggaatgctgtacttggcataacatagattaaaatcataatgcatgactaaaaactccttggatttatttcccattttaaaatttttagcggtaagttcagatttataatctttctctagacttccatggtctgaatgttgcctgctgaagtagcaacctaaaaagtatcccctgcttatgcttgtccagttggccctccatgtccataggcttcgcatctgtgattcagcccactgtgggtcaaaaatatttggggaaaaaaatggatggttgcgcctttgctgaacatgtacaaacttttttttgtcattaaacaatatagtataacaactatttacaaagcatttacattgtattagctattataggtaatctagagatgatttaaagtgtatggtaggatgtgcataggttatatgcaaatactacaccattttctataagggacttgaacatcatggactttagtatcctagggggttcttggaacccatcacccataggggcaccataggacaactatagtaccgtgtttatttcctattaattcaggttccgtttagagtctaaaactaaaacctaatcatttagtcacagtgtaaaaacaaatggaaataacagctcaaatcttcaaaatattactatagcattatgtttaaaataatctacaacaaaaatgtaccattttcaagcagtactacattaggagcccttttatagaaaataatttcttctttacccccgttccagtgtgaatctagtattctgttaacatttgtgtggcatttggagtttgtcatccccattgaagggagagccttctcagacatgaagcaagggaaacatactgaatagttttacacaaatttgatctggcttccatttgtccccctcatttcccaaatgtttaaatgtattggatttggattctcaatgtataagttgccttatctgttaatgtctatcttctgtctctttaattttgtatatctgctgttttgcttttggatacattttctaattagaagtcacatgataaatataatcagtatagtaataataccataatgtgcacatactcaataaataaatgactgcattgttgtaaatga

SEQ ID NO: 1468 - skipped

SEQ ID NO: 1469 - DNA, 2764 bp, Homo sapiens
atatcacaggtgcaggattagtgctgcctacggtgctgggctttttagtggaaacccctagcaattctgtgcctcctcctcatgtctctcatcctagggagcctggcaaccatatatcaagcgtacagaaatcaaaacaaacttccttgataacatgcttttgcgaagtgcaggaaaattaaatgtgggcaccaagaaagaggatggtgagagtacagcccccaccccccgtccaaaggtcttgcgttgtaaatgccaccaccattgtccagaagactcagtcaacaatatttgcagcacagacggatattgtttcacgatgatagaagaggatgactctgggttgcctgtggtcacttctggttgcctaggactagaaggctcagattttcagtgtcgggacactcccattcctcatcaaagaagatcaattgaatgctgcacagaaaggaacgaatgtaataaagacctacaccctacactgcctccattgaaaaacagagattttgttgatggacctatacaccacagggctttacttatatctgtgactgtctgtagtttgctcttggtccttatcatattattttgttacttccggtataaaagacaagaaaccagacctcgatacagcattgggttagaacaggatgaaacttacattcctcctggagaatccctgagagacttaattgagcagtctcagagctcaggaagtggatcaggcctccctctgctggtccaaaggactatagctaagcagattcagatggtgaaacagattggaaaaggtcgctatggggaagtttggatgggaaagtggcgtggcgaaaaggtagctgtgaaagtgttcttcaccacagaggaagccagctggttcagagagacagaaatatatcagacagtgttgatgaggcatgaaaacattttgggtttcattgctgcagatatcaaagggacagggtcctggacccagttgtacctaatcacagactatcatgaaaatggttccctttatgattatctgaagtccaccaccctagacgctaaatcaatgctgaagttagcctactcttctgtcagtggcttatgtcatttacacacagaaatctttagtactcaaggcaaaccagcaattgcccatcgagatctgaaaagtaaaaacattctggtgaagaaaaatggaacttgctgtattgctgacctgggcctggctgttaaatttattagagcatctgctgcacccaagcctgagccggttcctgttcaaaagaaaacacaagtgacaaataaccctggcactgtgaaaatcccacctaaacgcccaccaagaaaacacattgtggagcgctatacagagttttatcatgtacccactcacagtgatgccagcaagaagagactgattgaggatactgaagactggcgtccaaggactggaacaactcagtctcgctctttccgaatccttgcccagatcactgggactgaacatttgaaagaatctgaagccgataatacaaagaaggcaaaggaaaagataccccttcacgtctttagtcccaaatacacaaaattacgtgactggcaccatgaagtttcagcacgtgctcttaacgtacagtgatttatgagccttgccccccaagcagccagcacataccttttcatttactttttttttttcaacttcatagcaaaatctgtattaaatttgccttatgaaaaaatagaactttttctatacttttctaacaatttcctattgttgtgagaaaaggaagatgaacatgttttgtgctagttggtagctcacaaatgtaaaaccaaaaaaaaaaaaaaatagaaaattaagggactagatctatttgtggatttgtatctgtttttgttgtgattagggtagtaatcttggaaaacgaattattttcataagttgaatttggttagttggttggttgaagcagaggataatgagcaaataaagtccttgtctaatttggaaaatactttctttatattattaacatctcccaagattactttttaagttcattattatgttacattcaaagttgattgtaaattattctaaataagtaaatataaggaggcaagaataaacaaagactttattaaagaagagtgcgtgcattgtagatttaggtatcttttaaagtaggtactattcaggatggctctatgaagaggaggaggtccagatttggctcctgaaaaaggaaagaagagaattttacccctatttgcaatggagaaatacagtattctttggtttggttggatttgcaaatcctatttcctatcaaaggaaatatctctagtggatatttttagaatatagacaatttctaggtattaactaataagatatggaaaagatagctttgctttttttaatcagaagaacataaaataaattacaatatgaatgattgtgagacatcagagaaatattttacttagtgacgtaaactactgtgcactgctgctattcctaggaagctgtgttttgggcaatacatggaagctaaatatatgaccagaaatgctttctgccttgtaatatagtgtattatatattagagctaaatttagtaataaatgcattttgaagtttggaaaagtattgtaataaagttgcctttaacttagctttgtacttgttctgtttccttgaggctagacacagtgccatccaggacttattacagtataactgggtaaaataaacaattctctgaca

SEQ ID NO: 1470 - DNA, 6336 bp, Homo sapiens
cgcggggcgcggagtcggcggggcctcgcgggacgccgggcagtgcggagaccgcggcgctgaggacgcgggagccgggagcgcagccgcggggtggagttcagcctactctttcttagatgtgaaaggaaaggaagatcatttcatgccttgttgataaaggttcagacttctgctgattcataaccatttggctctgagctatgacaagagaggaaacaaaaagttaaacaagcaagcctgccataagtgagaagcatatttcattttctgtcattggactttgagccattagaaccatgagcaactacagtgtgtcactggttggcccagctccttggggtttccggctgcagggcggtaaggatttcaacatgcctctgacaatctctagtctaaaagatggcggcaaggcagcccaggcaaatgtaagaataggcgatgtggttctcagcattgatggaataaatgcacaaggaatgactcatcttgaagcccagaataagattaagggttgtacaggctctttgaatatgactctgcaaagagcatctgctgcacccaagcctgagccggttcctgttcaaaagcccacagtcaccagcgtgtgttccgagacttctcaggagctagcagagggacagagaagaggatcccagggtgacagtaaacagcaaaatgggaaaatcccacctaaacgcccaccaagaaaacacattgtggagcgctatacagagttttatcatgtacccactcacagtgatgccagcaagaagagactgattgaggatactgaagactggcgtccaaggactggaacaactcagtctcgctctttccgaatccttgcccagatcactgggactgaacatttgaaagaatctgaagccgataatacaaagaaggcaaagtttgacagtgctctggaagacctacctaagagtggacctcaccctcctgcaactcctcaggtgttaactattggtagccaagtggccacactttctaaagtagcaactacttattctagtttaagcagctccacaggaaatgtggaagattctttcgaaggttttcgaaacttttctaccttctcttctcctgctagatatagtgctgcagttctgagcagcgcagctgctactgtgtctgctgttattgctacaaaaaccaggctctacactcctgaaagatatcactcactcctggatgcactttgcatcagccctgtctccaagcctttagctttttcctatctgcagtcctcaaggaaatcaactggctctatccatgttaagaaaacaagtaactctcaggagccttctccgcagttggcttcctcggtagcttccacacggagcatgcccgagagcctggacagcccaacctctggcagaccaggggttaccagcctcacagctgcagctgccttcaagcctgtaggatccactggcgtcatcaagtcaccaagctggcaacggccaaaccaaggagtaccttccactggaagaatctcaaacagcgctacttactcaggatcagtggcaccagccaactcagctttgggacaaacccagccaagtgaccaggacactttagtgcaaagagctgagcacattccagcagggaaacgaactccgatgtgcgcccattgtaaccaggtcatcagaggaccattcttagtggcactggggaaatcttggcacccagaagaattcaactgcgctcactgcaaaaatacaatggcctacattggatttgtagaggagaaaggagccctgtattgtgagctgtgctatgagaaattctttgcccctgaatgtggtcgatgccaaaggaagatccttggagaagtcatcagtgcgttgaaacaaacttggcatgtttcctgttttgtgtgtgtagcctgtggaaagcccattcggaacaatgtttttcacttggaggatggtgaaccctactgtgagactgattattatgccctctttggtactatatgccatggatgtgaatttcccatagaagctggtgacatgttcctggaagctctgggctacacctggcatgacacttgctttgtatgctcagtgtgttgtgaaagtttggaaggtcagacctttttctccaagaaggacaagcccctgtgtaagaaacatgctcattctgtgaatttttgaaagtcaacagttcaggagaagagaaggaatttgaagagaaaaaggaaaattaaaattactaattaatttttagattcaatatttatatggagttttgaaaaataatagtggccctgaaggaataaattccagctttaaaaaccaagtctgaggaaatatttggcttcataaagtaaagagacggtttggcatttattattactttttcctgtattttatgcccataaaataagctttataaaaaccaatttcctgatggactattaaattcatcttagaataaattagtgaagaatttaattttagaataaataatccaatctgaaataattataccttctttccttgttaggtagttatgagtaaatctgcaaaaggcaatgaaaatgccttaaattttatcaataacagaattattgtatttaaaaaaaaactaatacttatctttaaaatagtaaataggattttaaacagagaattttatcagtaataggtgtcagtttttaaaaaattgcttgtaggctgagcgcggtggctcacgcctgtaatcccagcactttgggaggccaaggtgggtggaccacatgaggtcaggagtttgagatcagcctggccaacatggtgaaaccccatctctactaaaaatacaaaaattagccggacgcagtggcacgcgcctgtaatcccagctactcaagaggctgaggcacgagaatcacttgaacccgggagggagaggttgcagtgagccaagatcgtaccactgcactccagcctgggtgacagagtgagactctgtctccaaaaaaaaactttgcttgtatattatttttgccttacagtggatcattctagtaggaaaggacaataagattttttatcaaaatgtgtcatgccagtaagagatgttatattcttttctcatttcttccccacccaaaaataagctaccatatagcttataagtctcaaatttttgccttttactaaaatgtgattgtttctattcattgtgtatgcttcatcacctatattaggcaaattccatttttttcccttgtgctaaggtaaagatttaattaaataattttggcctctcatagttttctctctctttaaagagaataaatagagggccaggtgtggtggctcacgcctgtgatcccagcactttgggaggccaagacgggcggatcatgaggtcaagagatcaagatcatcctggccaacatggtgaaaccctgtctctactaaaaatacaaaaatgagctgggcatggtggggcgtgcctgtagtcccatgtacttgggaggctgaggcaggaaaattcttgaacccaggagacggaagttgcagtgagctgagatcacaccactgcactccagcctggtgacagagcaagactccggctcttaaaaaaaaaaaaaaaaaaaaaaaaagagagagagagaataaatagaaaagaatgtggctgggaattgtgaatcagaagattataccccccaattgtttttcaatccccttttctcaaataataaattagttaaatcagtttctgagttatgccactggctgatgaagagttgagaggtctctttgcagaatgatctttttgtttcgttttgtttcttcttctgcatttaaaaattaaaagattggtttgaggatgtgatgaaattgagactttttgtggttttctctcaataataagtgaaccaatttcaaatgtgatcacaaagtttggaaagcttttattcacagaggttgggtagtgttgggaggggagtttaattactcagattggcctgttatttgatttcctcctttgggaaaagaattatgtagataccacatggagacagggaaacaattgtggtaaaactgtggatcctgttgctatttgcccagtgagaaaacagattctggtatttgatttggtttttctctttgtttccagaatggatgaaagtccatgaacctcctaagttataatttaaatttgtttggggcaaggtgattttatagtcgagacagagccctaggtccttcctgccccatcactcacttacgacatcacttccattgtgtgcatgtttgttatagaggaggttttaggctacaatatttgtttaacctccctaagaactttcaaggcatctgtcctgaaagctgttaatttatggtctagcagatttatattatatgcagataataattaactggggataaaagaatggcaaggggtgacacaaagtagcaaactgaatacttctccaatagcaaccccaagctacctcctcaccctgcatcttggagggaggcaggaaatttcttttgaaataaagtgctggagctgaattctgcattatttatcgttgctgctgaaaccacctataaaagacttgctggctaatgtgcattgtcatataatgtacactgtcacatctttacagtcttgtatgttatagaatacaaaataagttgatggttttgtttggtgtgagctttttgtttgtttgtttagttttgccttcataggttatatgccaagatagtatttgataagtcaatgacatttggatgttttcttcaaagaattttatttgacccagatttcttataaagttatcttacattaaggatgtcattttcatcagaccttctttctacatattattcatgaagcataatgttgcatttctccaaattttatgcctgaaagggtagtgttgcttcctaaggtatcatgttgtctttgtgctttgtccatctcttccgtggcgaagctttatatctgttcctaaaacagttaatcctgtgaaataaatattgaacataatccagaagaatctctctgtttcccttggggaatgccatatttaattcaccagcagtaatcctttaataactggcagagcactttattcttctggtgagctccctgaatatttatttttctgattataaattttctatattagtagcattttttaattattacttcttcactatagagcatttacttttagtctctagatgtatattttggaatgctgtacttggcataacatagattaaaatcataatgcatgactaaaaactccttggatttatttcccattttaaaatttttagcggtaagttcagatttataatctttctctagacttccatggtctgaatgttgcctgctgaagtagcaacctaaaaagtatcccctgcttatgcttgtccagttggccctccatgtccataggcttcgcatctgtgattcagcccactgtgggtcaaaaatatttggggaaaaaaatggatggttgcgcctttgctgaacatgtacaaacttttttttgtcattaaacaatatagtataacaactatttacaaagcatttacattgtattagctattataggtaatctagagatgatttaaagtgtatggtaggatgtgcataggttatatgcaaatactacaccattttctataagggacttgaacatcatggactttagtatcctagggggttcttggaacccatcacccataggggcaccataggacaactatagtaccgtgtttatttcctattaattcaggttccgtttagagtctaaaactaaaacctaatcatttagtcacagtgtaaaaacaaatggaaataacagctcaaatcttcaaaatattactatagcattatgtttaaaataatctacaacaaaaatgtaccattttcaagcagtactacattaggagcccttttatagaaaataatttcttctttacccccgttccagtgtgaatctagtattctgttaacatttgtgtggcatttggagtttgtcatccccattgaagggagagccttctcagacatgaagcaagggaaacatactgaatagttttacacaaatttgatctggcttccatttgtccccctcatttcccaaatgtttaaatgtattggatttggattctcaatgtataagttgccttatctgttaatgtctatcttctgtctctttaattttgtatatctgctgttttgcttttggatacattttctaattagaagtcacatgataaatataatcagtatagtaataataccataatgtgcacatactcaataaataaatgactgcattgttgtaaatga

SEQ ID NO: 1471 - DNA, 5243 bp, Homo sapiens
gactggggtagtctaccccacagatgcctaactctcactatttcttctttcagcaaacttccttgataacatgcttttgcgaagtgcaggaaaattaaatgtgggcaccaagaaagaggatggtgagagtacagcccccaccccccgtccaaaggtcttgcgttgtaaatgccaccaccattgtccagaagactcagtcaacaatatttgcagtaactctcaggagccttctccgcagttggcttcctcggtagcttccacacggagcatgcccgagagcctggacagcccaacctctggcagaccaggggttaccagcctcacagctgcagctgccttcaagcctgtaggatccactggcgtcatcaagtcaccaagctggcaacggccaaaccaaggagtaccttccactggaagaatctcaaacagcgctacttactcaggatcagtggcaccagccaactcagctttgggacaaacccagccaagtgaccaggacactttagtgcaaagagctgagcacattccagcagggaaacgaactccgatgtgcgcccattgtaaccaggtcatcagaggaccattcttagtggcactggggaaatcttggcacccagaagaattcaactgcgctcactgcaaaaatacaatggcctacattggatttgtagaggagaaaggagccctgtattgtgagctgtgctatgagaaattctttgcccctgaatgtggtcgatgccaaaggaagatccttggagaagtcatcagtgcgttgaaacaaacttggcatgtttcctgttttgtgtgtgtagcctgtggaaagcccattcggaacaatgtttttcacttggaggatggtgaaccctactgtgagactgattattatgccctctttggtactatatgccatggatgtgaatttcccatagaagctggtgacatgttcctggaagctctgggctacacctggcatgacacttgctttgtatgctcagtgtgttgtgaaagtttggaaggtcagacctttttctccaagaaggacaagcccctgtgtaagaaacatgctcattctgtgaatttttgaaagtcaacagttcaggagaagagaaggaatttgaagagaaaaaggaaaattaaaattactaattaatttttagattcaatatttatatggagttttgaaaaataatagtggccctgaaggaataaattccagctttaaaaaccaagtctgaggaaatatttggcttcataaagtaaagagacggtttggcatttattattactttttcctgtattttatgcccataaaataagctttataaaaaccaatttcctgatggactattaaattcatcttagaataaattagtgaagaatttaattttagaataaataatccaatctgaaataattataccttctttccttgttaggtagttatgagtaaatctgcaaaaggcaatgaaaatgccttaaattttatcaataacagaattattgtatttaaaaaaaaactaatacttatctttaaaatagtaaataggattttaaacagagaattttatcagtaataggtgtcagtttttaaaaaattgcttgtaggctgagcgcggtggctcacgcctgtaatcccagcactttgggaggccaaggtgggtggaccacatgaggtcaggagtttgagatcagcctggccaacatggtgaaaccccatctctactaaaaatacaaaaattagccggacgcagtggcacgcgcctgtaatcccagctactcaagaggctgaggcacgagaatcacttgaacccgggagggagaggttgcagtgagccaagatcgtaccactgcactccagcctgggtgacagagtgagactctgtctccaaaaaaaaactttgcttgtatattatttttgccttacagtggatcattctagtaggaaaggacaataagattttttatcaaaatgtgtcatgccagtaagagatgttatattcttttctcatttcttccccacccaaaaataagctaccatatagcttataagtctcaaatttttgccttttactaaaatgtgattgtttctattcattgtgtatgcttcatcacctatattaggcaaattccatttttttcccttgtgctaaggtaaagatttaattaaataattttggcctctcatagttttctctctctttaaagagaataaatagagggccaggtgtggtggctcacgcctgtgatcccagcactttgggaggccaagacgggcggatcatgaggtcaagagatcaagatcatcctggccaacatggtgaaaccctgtctctactaaaaatacaaaaatgagctgggcatggtggggcgtgcctgtagtcccatgtacttgggaggctgaggcaggaaaattcttgaacccaggagacggaagttgcagtgagctgagatcacaccactgcactccagcctggtgacagagcaagactccggctcttaaaaaaaaaaaaaaaaaaaaaaaaagagagagagagaataaatagaaaagaatgtggctgggaattgtgaatcagaagattataccccccaattgtttttcaatccccttttctcaaataataaattagttaaatcagtttctgagttatgccactggctgatgaagagttgagaggtctctttgcagaatgatctttttgtttcgttttgtttcttcttctgcatttaaaaattaaaagattggtttgaggatgtgatgaaattgagactttttgtggttttctctcaataataagtgaaccaatttcaaatgtgatcacaaagtttggaaagcttttattcacagaggttgggtagtgttgggaggggagtttaattactcagattggcctgttatttgatttcctcctttgggaaaagaattatgtagataccacatggagacagggaaacaattgtggtaaaactgtggatcctgttgctatttgcccagtgagaaaacagattctggtatttgatttggtttttctctttgtttccagaatggatgaaagtccatgaacctcctaagttataatttaaatttgtttggggcaaggtgattttatagtcgagacagagccctaggtccttcctgccccatcactcacttacgacatcacttccattgtgtgcatgtttgttatagaggaggttttaggctacaatatttgtttaacctccctaagaactttcaaggcatctgtcctgaaagctgttaatttatggtctagcagatttatattatatgcagataataattaactggggataaaagaatggcaaggggtgacacaaagtagcaaactgaatacttctccaatagcaaccccaagctacctcctcaccctgcatcttggagggaggcaggaaatttcttttgaaataaagtgctggagctgaattctgcattatttatcgttgctgctgaaaccacctataaaagacttgctggctaatgtgcattgtcatataatgtacactgtcacatctttacagtcttgtatgttatagaatacaaaataagttgatggttttgtttggtgtgagctttttgtttgtttgtttagttttgccttcataggttatatgccaagatagtatttgataagtcaatgacatttggatgttttcttcaaagaattttatttgacccagatttcttataaagttatcttacattaaggatgtcattttcatcagaccttctttctacatattattcatgaagcataatgttgcatttctccaaattttatgcctgaaagggtagtgttgcttcctaaggtatcatgttgtctttgtgctttgtccatctcttccgtggcgaagctttatatctgttcctaaaacagttaatcctgtgaaataaatattgaacataatccagaagaatctctctgtttcccttggggaatgccatatttaattcaccagcagtaatcctttaataactggcagagcactttattcttctggtgagctccctgaatatttatttttctgattataaattttctatattagtagcattttttaattattacttcttcactatagagcatttacttttagtctctagatgtatattttggaatgctgtacttggcataacatagattaaaatcataatgcatgactaaaaactccttggatttatttcccattttaaaatttttagcggtaagttcagatttataatctttctctagacttccatggtctgaatgttgcctgctgaagtagcaacctaaaaagtatcccctgcttatgcttgtccagttggccctccatgtccataggcttcgcatctgtgattcagcccactgtgggtcaaaaatatttggggaaaaaaatggatggttgcgcctttgctgaacatgtacaaacttttttttgtcattaaacaatatagtataacaactatttacaaagcatttacattgtattagctattataggtaatctagagatgatttaaagtgtatggtaggatgtgcataggttatatgcaaatactacaccattttctataagggacttgaacatcatggactttagtatcctagggggttcttggaacccatcacccataggggcaccataggacaactatagtaccgtgtttatttcctattaattcaggttccgtttagagtctaaaactaaaacctaatcatttagtcacagtgtaaaaacaaatggaaataacagctcaaatcttcaaaatattactatagcattatgtttaaaataatctacaacaaaaatgtaccattttcaagcagtactacattaggagcccttttatagaaaataatttcttctttacccccgttccagtgtgaatctagtattctgttaacatttgtgtggcatttggagtttgtcatccccattgaagggagagccttctcagacatgaagcaagggaaacatactgaatagttttacacaaatttgatctggcttccatttgtccccctcatttcccaaatgtttaaatgtattggatttggattctcaatgtataagttgccttatctgttaatgtctatcttctgtctctttaattttgtatatctgctgttttgcttttggatacattttctaattagaagtcacatgataaatataatcagtatagtaataataccataatgtgcacatactcaataaataaatgactgcattgttgtaaatga

SEQ ID NO: 1472 - DNA, 6249 bp, Homo sapiens
cgcggggcgcggagtcggcggggcctcgcgggacgccgggcagtgcggagaccgcggcgctgaggacgcgggagccgggagcgcagccgcggggtggagttcagcctactctttcttagatgtgaaaggaaaggaagatcatttcatgccttgttgataaaggttcagacttctgctgattcataaccatttggctctgagctatgacaagagaggaaacaaaaagttaaacaagcaagcctgccataagtgagaagcatatttcattttctgtcattggactttgagccattagaaccatgagcaactacagtgtgtcactggttggcccagctccttggggtttccggctgcagggcggtaaggatttcaacatgcctctgacaatctctagtctaaaagatggcggcaaggcagcccaggcaaatgtaagaataggcgatgtggttctcagcattgatggaataaatgcacaaggaatgactcatcttgaagcccagaataagattaagggttgtacaggctctttgaatatgactctgcaaagagcatctgctgcacccaagcctgagccggttcctgttcaaaagggagaacctaaagaagtagttaaacctgtgcccattacatctcctgctgtgtccaaagtcacttccacaaacaacatggcctacaataaggcaccacggccttttggttctgtgtcttcaccaaaagtcacatccatcccatcaccatcgtctgccttcaccccagcccatgcgaccacctcatcacatgcttccccttcacccgtggctgccgtcactcctcccctgttcgctgcatctggactgcatgctaatgccaatcttagtgctgaccagtctccatctgcactgagcgctggtaaaactgcagttaatgtcccacggcagcccacagtcaccagcgtgtgttccgagacttctcaggagctagcagagggacagagaagaggatcccagggtgacagtaaacagcaaaatggcccaccaagaaaacacattgtggagcgctatacagagttttatcatgtacccactcacagtgatgccagcaagaagagactgattgaggatactgaagactggcgtccaaggactggaacaactcagtctcgctctttccgaatccttgcccagatcactgggactgaacatttgaaagaatctgaagccgataatacaaagaaggcaaataactctcaggagccttctccgcagttggcttcctcggtagcttccacacggagcatgcccgagagcctggacagcccaacctctggcagaccaggggttaccagcctcacagctgcagctgccttcaagcctgtaggatccactggcgtcatcaagtcaccaagctggcaacggccaaaccaaggagtaccttccactggaagaatctcaaacagcgctacttactcaggatcagtggcaccagccaactcagctttgggacaaacccagccaagtgaccaggacactttagtgcaaagagctgagcacattccagcagggaaacgaactccgatgtgcgcccattgtaaccaggtcatcagaggaccattcttagtggcactggggaaatcttggcacccagaagaattcaactgcgctcactgcaaaaatacaatggcctacattggatttgtagaggagaaaggagccctgtattgtgagctgtgctatgagaaattctttgcccctgaatgtggtcgatgccaaaggaagatccttggagaagtcatcagtgcgttgaaacaaacttggcatgtttcctgttttgtgtgtgtagcctgtggaaagcccattcggaacaatgtttttcacttggaggatggtgaaccctactgtgagactgattattatgccctctttggtactatatgccatggatgtgaatttcccatagaagctggtgacatgttcctggaagctctgggctacacctggcatgacacttgctttgtatgctcagtgtgttgtgaaagtttggaaggtcagacctttttctccaagaaggacaagcccctgtgtaagaaacatgctcattctgtgaatttttgaaagtcaacagttcaggagaagagaaggaatttgaagagaaaaaggaaaattaaaattactaattaatttttagattcaatatttatatggagttttgaaaaataatagtggccctgaaggaataaattccagctttaaaaaccaagtctgaggaaatatttggcttcataaagtaaagagacggtttggcatttattattactttttcctgtattttatgcccataaaataagctttataaaaaccaatttcctgatggactattaaattcatcttagaataaattagtgaagaatttaattttagaataaataatccaatctgaaataattataccttctttccttgttaggtagttatgagtaaatctgcaaaaggcaatgaaaatgccttaaattttatcaataacagaattattgtatttaaaaaaaaactaatacttatctttaaaatagtaaataggattttaaacagagaattttatcagtaataggtgtcagtttttaaaaaattgcttgtaggctgagcgcggtggctcacgcctgtaatcccagcactttgggaggccaaggtgggtggaccacatgaggtcaggagtttgagatcagcctggccaacatggtgaaaccccatctctactaaaaatacaaaaattagccggacgcagtggcacgcgcctgtaatcccagctactcaagaggctgaggcacgagaatcacttgaacccgggagggagaggttgcagtgagccaagatcgtaccactgcactccagcctgggtgacagagtgagactctgtctccaaaaaaaaactttgcttgtatattatttttgccttacagtggatcattctagtaggaaaggacaataagattttttatcaaaatgtgtcatgccagtaagagatgttatattcttttctcatttcttccccacccaaaaataagctaccatatagcttataagtctcaaatttttgccttttactaaaatgtgattgtttctattcattgtgtatgcttcatcacctatattaggcaaattccatttttttcccttgtgctaaggtaaagatttaattaaataattttggcctctcatagttttctctctctttaaagagaataaatagagggccaggtgtggtggctcacgcctgtgatcccagcactttgggaggccaagacgggcggatcatgaggtcaagagatcaagatcatcctggccaacatggtgaaaccctgtctctactaaaaatacaaaaatgagctgggcatggtggggcgtgcctgtagtcccatgtacttgggaggctgaggcaggaaaattcttgaacccaggagacggaagttgcagtgagctgagatcacaccactgcactccagcctggtgacagagcaagactccggctcttaaaaaaaaaaaaaaaaaaaaaaaaagagagagagagaataaatagaaaagaatgtggctgggaattgtgaatcagaagattataccccccaattgtttttcaatccccttttctcaaataataaattagttaaatcagtttctgagttatgccactggctgatgaagagttgagaggtctctttgcagaatgatctttttgtttcgttttgtttcttcttctgcatttaaaaattaaaagattggtttgaggatgtgatgaaattgagactttttgtggttttctctcaataataagtgaaccaatttcaaatgtgatcacaaagtttggaaagcttttattcacagaggttgggtagtgttgggaggggagtttaattactcagattggcctgttatttgatttcctcctttgggaaaagaattatgtagataccacatggagacagggaaacaattgtggtaaaactgtggatcctgttgctatttgcccagtgagaaaacagattctggtatttgatttggtttttctctttgtttccagaatggatgaaagtccatgaacctcctaagttataatttaaatttgtttggggcaaggtgattttatagtcgagacagagccctaggtccttcctgccccatcactcacttacgacatcacttccattgtgtgcatgtttgttatagaggaggttttaggctacaatatttgtttaacctccctaagaactttcaaggcatctgtcctgaaagctgttaatttatggtctagcagatttatattatatgcagataataattaactggggataaaagaatggcaaggggtgacacaaagtagcaaactgaatacttctccaatagcaaccccaagctacctcctcaccctgcatcttggagggaggcaggaaatttcttttgaaataaagtgctggagctgaattctgcattatttatcgttgctgctgaaaccacctataaaagacttgctggctaatgtgcattgtcatataatgtacactgtcacatctttacagtcttgtatgttatagaatacaaaataagttgatggttttgtttggtgtgagctttttgtttgtttgtttagttttgccttcataggttatatgccaagatagtatttgataagtcaatgacatttggatgttttcttcaaagaattttatttgacccagatttcttataaagttatcttacattaaggatgtcattttcatcagaccttctttctacatattattcatgaagcataatgttgcatttctccaaattttatgcctgaaagggtagtgttgcttcctaaggtatcatgttgtctttgtgctttgtccatctcttccgtggcgaagctttatatctgttcctaaaacagttaatcctgtgaaataaatattgaacataatccagaagaatctctctgtttcccttggggaatgccatatttaattcaccagcagtaatcctttaataactggcagagcactttattcttctggtgagctccctgaatatttatttttctgattataaattttctatattagtagcattttttaattattacttcttcactatagagcatttacttttagtctctagatgtatattttggaatgctgtacttggcataacatagattaaaatcataatgcatgactaaaaactccttggatttatttcccattttaaaatttttagcggtaagttcagatttataatctttctctagacttccatggtctgaatgttgcctgctgaagtagcaacctaaaaagtatcccctgcttatgcttgtccagttggccctccatgtccataggcttcgcatctgtgattcagcccactgtgggtcaaaaatatttggggaaaaaaatggatggttgcgcctttgctgaacatgtacaaacttttttttgtcattaaacaatatagtataacaactatttacaaagcatttacattgtattagctattataggtaatctagagatgatttaaagtgtatggtaggatgtgcataggttatatgcaaatactacaccattttctataagggacttgaacatcatggactttagtatcctagggggttcttggaacccatcacccataggggcaccataggacaactatagtaccgtgtttatttcctattaattcaggttccgtttagagtctaaaactaaaacctaatcatttagtcacagtgtaaaaacaaatggaaataacagctcaaatcttcaaaatattactatagcattatgtttaaaataatctacaacaaaaatgtaccattttcaagcagtactacattaggagcccttttatagaaaataatttcttctttacccccgttccagtgtgaatctagtattctgttaacatttgtgtggcatttggagtttgtcatccccattgaagggagagccttctcagacatgaagcaagggaaacatactgaatagttttacacaaatttgatctggcttccatttgtccccctcatttcccaaatgtttaaatgtattggatttggattctcaatgtataagttgccttatctgttaatgtctatcttctgtctctttaattttgtatatctgctgttttgcttttggatacattttctaattagaagtcacatgataaatataatcagtatagtaataataccataatgtgcacatactcaataaataaatgactgcattgttgtaaatga

SEQ ID NO: 1473 - DNA, 2141 bp, Homo sapiens
cgcggggcgcggagtcggcggggcctcgcgggacgccgggcagtgcggagaccgcggcgctgaggacgcgggagccgggagcgcagccgcggggtggagttcagcctactctttcttagatgtgaaaggaaaggaagatcatttcatgccttgttgataaaggttcagacttctgctgattcataaccatttggctctgagctatgacaagagaggaaacaaaaagttaaacaagcaagcctgccataagtgagaagcatatttcattttctgtcattggactttgagccattagaaccatgagcaactacagtgtgtcactggttggcccagctccttggggtttccggctgcagggcggtaaggatttcaacatgcctctgacaatctctagtctaaaagatggcggcaaggcagcccaggcaaatgtaagaataggcgatgtggttctcagcattgatggaataaatgcacaaggaatgactcatcttgaagcccagaataagattaagggttgtacaggctctttgaatatgactctgcaaagagcatctgctgcacccaagcctgagccggttcctgttcaaaagcccacagtcaccagcgtgtgttccgagacttctcaggagctagcagagggacagagaagaggatcccagggtgacagtaaacagcaaaatgggaaaatcccacctaaacgcccaccaagaaaacacattgtggagcgctatacagagttttatcatgtacccactcacagtgatgccagcaagaagagactgattgaggatactgaagactggcgtccaaggactggaacaactcagtctcgctctttccgaatccttgcccagatcactgggactgaacatttgaaagaatctgaagccgataatacaaagaaggcaaaggaaaagataccccttcacgtctttagtcccaaatacacaaaattacgtgactggcaccatgaagtttcagcacgtgctcttaacgtacagtgatttatgagccttgccccccaagcagccagcacataccttttcatttactttttttttttcaacttcatagcaaaatctgtattaaatttgccttatgaaaaaatagaactttttctatacttttctaacaatttcctattgttgtgagaaaaggaagatgaacatgttttgtgctagttggtagctcacaaatgtaaaaccaaaaaaaaaaaaaaatagaaaattaagggactagatctatttgtggatttgtatctgtttttgttgtgattagggtagtaatcttggaaaacgaattattttcataagttgaatttggttagttggttggttgaagcagaggataatgagcaaataaagtccttgtctaatttggaaaatactttctttatattattaacatctcccaagattactttttaagttcattattatgttacattcaaagttgattgtaaattattctaaataagtaaatataaggaggcaagaataaacaaagactttattaaagaagagtgcgtgcattgtagatttaggtatcttttaaagtaggtactattcaggatggctctatgaagaggaggaggtccagatttggctcctgaaaaaggaaagaagagaattttacccctatttgcaatggagaaatacagtattctttggtttggttggatttgcaaatcctatttcctatcaaaggaaatatctctagtggatatttttagaatatagacaatttctaggtattaactaataagatatggaaaagatagctttgctttttttaatcagaagaacataaaataaattacaatatgaatgattgtgagacatcagagaaatattttacttagtgacgtaaactactgtgcactgctgctattcctaggaagctgtgttttgggcaatacatggaagctaaatatatgaccagaaatgctttctgccttgtaatatagtgtattatatattagagctaaatttagtaataaatgcattttgaagtttggaaaagtattgtaataaagttgcctttaacttagctttgtacttgttctgtttccttgaggctagacacagtgccatccaggacttattacagtataactgggtaaaataaacaattctctgaca

SEQ ID NO: 1474 - DNA, 5922 bp, Homo sapiens
cgcggggcgcggagtcggcggggcctcgcgggacgccgggcagtgcggagaccgcggcgctgaggacgcgggagccgggagcgcagccgcggggtggagttcagcctactctttcttagatgtgaaaggaaaggaagatcatttcatgccttgttgataaaggttcagacttctgctgattcataaccatttggctctgagctatgacaagagaggaaacaaaaagttaaacaagcaagcctgccataagtgagaagcatatttcattttctgtcattggactttgagccattagaaccatgagcaactacagtgtgtcactggttggcccagctccttggggtttccggctgcagggcggtaaggatttcaacatgcctctgacaatctctagtctaaaagatggcggcaaggcagcccaggcaaatgtaagaataggcgatgtggttctcagcattgatggaataaatgcacaaggaatgactcatcttgaagcccagaataagattaagggttgtacaggctctttgaatatgactctgcaaagagcatctgctgcacccaagcctgagccggttcctgttcaaaagcccacagtcaccagcgtgtgttccgagacttctcaggagctagcagagggacagagaagaggatcccagggtgacagtaaacagcaaaatggcccaccaagaaaacacattgtggagcgctatacagagttttatcatgtacccactcacagtgatgccagcaagaagagactgattgaggatactgaagactggcgtccaaggactggaacaactcagtctcgctctttccgaatccttgcccagatcactgggactgaacatttgaaagaatctgaagccgataatacaaagaaggcaaataactctcaggagccttctccgcagttggcttcctcggtagcttccacacggagcatgcccgagagcctggacagcccaacctctggcagaccaggggttaccagcctcacagctgcagctgccttcaagcctgtaggatccactggcgtcatcaagtcaccaagctggcaacggccaaaccaaggagtaccttccactggaagaatctcaaacagcgctacttactcaggatcagtggcaccagccaactcagctttgggacaaacccagccaagtgaccaggacactttagtgcaaagagctgagcacattccagcagggaaacgaactccgatgtgcgcccattgtaaccaggtcatcagaggaccattcttagtggcactggggaaatcttggcacccagaagaattcaactgcgctcactgcaaaaatacaatggcctacattggatttgtagaggagaaaggagccctgtattgtgagctgtgctatgagaaattctttgcccctgaatgtggtcgatgccaaaggaagatccttggagaagtcatcagtgcgttgaaacaaacttggcatgtttcctgttttgtgtgtgtagcctgtggaaagcccattcggaacaatgtttttcacttggaggatggtgaaccctactgtgagactgattattatgccctctttggtactatatgccatggatgtgaatttcccatagaagctggtgacatgttcctggaagctctgggctacacctggcatgacacttgctttgtatgctcagtgtgttgtgaaagtttggaaggtcagacctttttctccaagaaggacaagcccctgtgtaagaaacatgctcattctgtgaatttttgaaagtcaacagttcaggagaagagaaggaatttgaagagaaaaaggaaaattaaaattactaattaatttttagattcaatatttatatggagttttgaaaaataatagtggccctgaaggaataaattccagctttaaaaaccaagtctgaggaaatatttggcttcataaagtaaagagacggtttggcatttattattactttttcctgtattttatgcccataaaataagctttataaaaaccaatttcctgatggactattaaattcatcttagaataaattagtgaagaatttaattttagaataaataatccaatctgaaataattataccttctttccttgttaggtagttatgagtaaatctgcaaaaggcaatgaaaatgccttaaattttatcaataacagaattattgtatttaaaaaaaaactaatacttatctttaaaatagtaaataggattttaaacagagaattttatcagtaataggtgtcagtttttaaaaaattgcttgtaggctgagcgcggtggctcacgcctgtaatcccagcactttgggaggccaaggtgggtggaccacatgaggtcaggagtttgagatcagcctggccaacatggtgaaaccccatctctactaaaaatacaaaaattagccggacgcagtggcacgcgcctgtaatcccagctactcaagaggctgaggcacgagaatcacttgaacccgggagggagaggttgcagtgagccaagatcgtaccactgcactccagcctgggtgacagagtgagactctgtctccaaaaaaaaactttgcttgtatattatttttgccttacagtggatcattctagtaggaaaggacaataagattttttatcaaaatgtgtcatgccagtaagagatgttatattcttttctcatttcttccccacccaaaaataagctaccatatagcttataagtctcaaatttttgccttttactaaaatgtgattgtttctattcattgtgtatgcttcatcacctatattaggcaaattccatttttttcccttgtgctaaggtaaagatttaattaaataattttggcctctcatagttttctctctctttaaagagaataaatagagggccaggtgtggtggctcacgcctgtgatcccagcactttgggaggccaagacgggcggatcatgaggtcaagagatcaagatcatcctggccaacatggtgaaaccctgtctctactaaaaatacaaaaatgagctgggcatggtggggcgtgcctgtagtcccatgtacttgggaggctgaggcaggaaaattcttgaacccaggagacggaagttgcagtgagctgagatcacaccactgcactccagcctggtgacagagcaagactccggctcttaaaaaaaaaaaaaaaaaaaaaaaaagagagagagagaataaatagaaaagaatgtggctgggaattgtgaatcagaagattataccccccaattgtttttcaatccccttttctcaaataataaattagttaaatcagtttctgagttatgccactggctgatgaagagttgagaggtctctttgcagaatgatctttttgtttcgttttgtttcttcttctgcatttaaaaattaaaagattggtttgaggatgtgatgaaattgagactttttgtggttttctctcaataataagtgaaccaatttcaaatgtgatcacaaagtttggaaagcttttattcacagaggttgggtagtgttgggaggggagtttaattactcagattggcctgttatttgatttcctcctttgggaaaagaattatgtagataccacatggagacagggaaacaattgtggtaaaactgtggatcctgttgctatttgcccagtgagaaaacagattctggtatttgatttggtttttctctttgtttccagaatggatgaaagtccatgaacctcctaagttataatttaaatttgtttggggcaaggtgattttatagtcgagacagagccctaggtccttcctgccccatcactcacttacgacatcacttccattgtgtgcatgtttgttatagaggaggttttaggctacaatatttgtttaacctccctaagaactttcaaggcatctgtcctgaaagctgttaatttatggtctagcagatttatattatatgcagataataattaactggggataaaagaatggcaaggggtgacacaaagtagcaaactgaatacttctccaatagcaaccccaagctacctcctcaccctgcatcttggagggaggcaggaaatttcttttgaaataaagtgctggagctgaattctgcattatttatcgttgctgctgaaaccacctataaaagacttgctggctaatgtgcattgtcatataatgtacactgtcacatctttacagtcttgtatgttatagaatacaaaataagttgatggttttgtttggtgtgagctttttgtttgtttgtttagttttgccttcataggttatatgccaagatagtatttgataagtcaatgacatttggatgttttcttcaaagaattttatttgacccagatttcttataaagttatcttacattaaggatgtcattttcatcagaccttctttctacatattattcatgaagcataatgttgcatttctccaaattttatgcctgaaagggtagtgttgcttcctaaggtatcatgttgtctttgtgctttgtccatctcttccgtggcgaagctttatatctgttcctaaaacagttaatcctgtgaaataaatattgaacataatccagaagaatctctctgtttcccttggggaatgccatatttaattcaccagcagtaatcctttaataactggcagagcactttattcttctggtgagctccctgaatatttatttttctgattataaattttctatattagtagcattttttaattattacttcttcactatagagcatttacttttagtctctagatgtatattttggaatgctgtacttggcataacatagattaaaatcataatgcatgactaaaaactccttggatttatttcccattttaaaatttttagcggtaagttcagatttataatctttctctagacttccatggtctgaatgttgcctgctgaagtagcaacctaaaaagtatcccctgcttatgcttgtccagttggccctccatgtccataggcttcgcatctgtgattcagcccactgtgggtcaaaaatatttggggaaaaaaatggatggttgcgcctttgctgaacatgtacaaacttttttttgtcattaaacaatatagtataacaactatttacaaagcatttacattgtattagctattataggtaatctagagatgatttaaagtgtatggtaggatgtgcataggttatatgcaaatactacaccattttctataagggacttgaacatcatggactttagtatcctagggggttcttggaacccatcacccataggggcaccataggacaactatagtaccgtgtttatttcctattaattcaggttccgtttagagtctaaaactaaaacctaatcatttagtcacagtgtaaaaacaaatggaaataacagctcaaatcttcaaaatattactatagcattatgtttaaaataatctacaacaaaaatgtaccattttcaagcagtactacattaggagcccttttatagaaaataatttcttctttacccccgttccagtgtgaatctagtattctgttaacatttgtgtggcatttggagtttgtcatccccattgaagggagagccttctcagacatgaagcaagggaaacatactgaatagttttacacaaatttgatctggcttccatttgtccccctcatttcccaaatgtttaaatgtattggatttggattctcaatgtataagttgccttatctgttaatgtctatcttctgtctctttaattttgtatatctgctgttttgcttttggatacattttctaattagaagtcacatgataaatataatcagtatagtaataataccataatgtgcacatactcaataaataaatgactgcattgttgtaaatga

SEQ ID NO: 1475 - DNA, 6182 bp, Homo sapiens
gactggggtagtctaccccacagatgcctaactctcactatttcttctttcagcaaacttccttgataacatgcttttgcgaagtgcaggaaaattaaatgtgggcaccaagaaagaggatggtgagagtacagcccccaccccccgtccaaaggtcttgcgttgtaaatgccaccaccattgtccagaagactcagtcaacaatatttgcagcacagacggatattgtttcacgatgatagaagaggatgactctgggttgcctgtggtcacttctggttgcctaggactagaaggctcagattttcagtgtcgggacactcccattcctcatcaaagaagatcaattgaatgctgcacagaaaggaacgaatgtaataaagacctacaccctacactgcctccattgaaaaacagagattttgttgatggacctatacaccacagggctttacttatatctgtgactgtctgtagtttgctcttggtccttatcatattattttgttacttccggtataaaagacaagaaaccagacctcgatacagcattgggttagaacaggatgaaacttacattcctcctggagaatccctgagagacttaattgagcagtctcagagctcaggaagtggatcaggcctccctctgctgctaaaagatggcggcaaggcagcccaggcaaatgtaagaataggcgatgtggttctcagcattgatggaataaatgcacaaggaatgactcatcttgaagcccagaataagattaagggttgtacaggctctttgaatatgactctgcaaagagcatctgctgcacccaagcctgagccggttcctgttcaaaagcccacagtcaccagcgtgtgttccgagacttctcaggagctagcagagggacagagaagaggatcccagggtgacagtaaacagcaaaatggcccaccaagaaaacacattgtggagcgctatacagagttttatcatgtacccactcacagtgatgccagcaagaagagactgattgaggatactgaagactggcgtccaaggactggaacaactcagtctcgctctttccgaatccttgcccagatcactgggactgaacatttgaaagaatctgaagccgataatacaaagaaggcaaataactctcaggagccttctccgcagttggcttcctcggtagcttccacacggagcatgcccgagagcctggacagcccaacctctggcagaccaggggttaccagcctcacagctgcagctgccttcaagcctgtaggatccactggcgtcatcaagtcaccaagctggcaacggccaaaccaaggagtaccttccactggaagaatctcaaacagcgctacttactcaggatcagtggcaccagccaactcagctttgggacaaacccagccaagtgaccaggacactttagtgcaaagagctgagcacattccagcagggaaacgaactccgatgtgcgcccattgtaaccaggtcatcagaggaccattcttagtggcactggggaaatcttggcacccagaagaattcaactgcgctcactgcaaaaatacaatggcctacattggatttgtagaggagaaaggagccctgtattgtgagctgtgctatgagaaattctttgcccctgaatgtggtcgatgccaaaggaagatccttggagaagtcatcagtgcgttgaaacaaacttggcatgtttcctgttttgtgtgtgtagcctgtggaaagcccattcggaacaatgtttttcacttggaggatggtgaaccctactgtgagactgattattatgccctctttggtactatatgccatggatgtgaatttcccatagaagctggtgacatgttcctggaagctctgggctacacctggcatgacacttgctttgtatgctcagtgtgttgtgaaagtttggaaggtcagacctttttctccaagaaggacaagcccctgtgtaagaaacatgctcattctgtgaatttttgaaagtcaacagttcaggagaagagaaggaatttgaagagaaaaaggaaaattaaaattactaattaatttttagattcaatatttatatggagttttgaaaaataatagtggccctgaaggaataaattccagctttaaaaaccaagtctgaggaaatatttggcttcataaagtaaagagacggtttggcatttattattactttttcctgtattttatgcccataaaataagctttataaaaaccaatttcctgatggactattaaattcatcttagaataaattagtgaagaatttaattttagaataaataatccaatctgaaataattataccttctttccttgttaggtagttatgagtaaatctgcaaaaggcaatgaaaatgccttaaattttatcaataacagaattattgtatttaaaaaaaaactaatacttatctttaaaatagtaaataggattttaaacagagaattttatcagtaataggtgtcagtttttaaaaaattgcttgtaggctgagcgcggtggctcacgcctgtaatcccagcactttgggaggccaaggtgggtggaccacatgaggtcaggagtttgagatcagcctggccaacatggtgaaaccccatctctactaaaaatacaaaaattagccggacgcagtggcacgcgcctgtaatcccagctactcaagaggctgaggcacgagaatcacttgaacccgggagggagaggttgcagtgagccaagatcgtaccactgcactccagcctgggtgacagagtgagactctgtctccaaaaaaaaactttgcttgtatattatttttgccttacagtggatcattctagtaggaaaggacaataagattttttatcaaaatgtgtcatgccagtaagagatgttatattcttttctcatttcttccccacccaaaaataagctaccatatagcttataagtctcaaatttttgccttttactaaaatgtgattgtttctattcattgtgtatgcttcatcacctatattaggcaaattccatttttttcccttgtgctaaggtaaagatttaattaaataattttggcctctcatagttttctctctctttaaagagaataaatagagggccaggtgtggtggctcacgcctgtgatcccagcactttgggaggccaagacgggcggatcatgaggtcaagagatcaagatcatcctggccaacatggtgaaaccctgtctctactaaaaatacaaaaatgagctgggcatggtggggcgtgcctgtagtcccatgtacttgggaggctgaggcaggaaaattcttgaacccaggagacggaagttgcagtgagctgagatcacaccactgcactccagcctggtgacagagcaagactccggctcttaaaaaaaaaaaaaaaaaaaaaaaaagagagagagagaataaatagaaaagaatgtggctgggaattgtgaatcagaagattataccccccaattgtttttcaatccccttttctcaaataataaattagttaaatcagtttctgagttatgccactggctgatgaagagttgagaggtctctttgcagaatgatctttttgtttcgttttgtttcttcttctgcatttaaaaattaaaagattggtttgaggatgtgatgaaattgagactttttgtggttttctctcaataataagtgaaccaatttcaaatgtgatcacaaagtttggaaagcttttattcacagaggttgggtagtgttgggaggggagtttaattactcagattggcctgttatttgatttcctcctttgggaaaagaattatgtagataccacatggagacagggaaacaattgtggtaaaactgtggatcctgttgctatttgcccagtgagaaaacagattctggtatttgatttggtttttctctttgtttccagaatggatgaaagtccatgaacctcctaagttataatttaaatttgtttggggcaaggtgattttatagtcgagacagagccctaggtccttcctgccccatcactcacttacgacatcacttccattgtgtgcatgtttgttatagaggaggttttaggctacaatatttgtttaacctccctaagaactttcaaggcatctgtcctgaaagctgttaatttatggtctagcagatttatattatatgcagataataattaactggggataaaagaatggcaaggggtgacacaaagtagcaaactgaatacttctccaatagcaaccccaagctacctcctcaccctgcatcttggagggaggcaggaaatttcttttgaaataaagtgctggagctgaattctgcattatttatcgttgctgctgaaaccacctataaaagacttgctggctaatgtgcattgtcatataatgtacactgtcacatctttacagtcttgtatgttatagaatacaaaataagttgatggttttgtttggtgtgagctttttgtttgtttgtttagttttgccttcataggttatatgccaagatagtatttgataagtcaatgacatttggatgttttcttcaaagaattttatttgacccagatttcttataaagttatcttacattaaggatgtcattttcatcagaccttctttctacatattattcatgaagcataatgttgcatttctccaaattttatgcctgaaagggtagtgttgcttcctaaggtatcatgttgtctttgtgctttgtccatctcttccgtggcgaagctttatatctgttcctaaaacagttaatcctgtgaaataaatattgaacataatccagaagaatctctctgtttcccttggggaatgccatatttaattcaccagcagtaatcctttaataactggcagagcactttattcttctggtgagctccctgaatatttatttttctgattataaattttctatattagtagcattttttaattattacttcttcactatagagcatttacttttagtctctagatgtatattttggaatgctgtacttggcataacatagattaaaatcataatgcatgactaaaaactccttggatttatttcccattttaaaatttttagcggtaagttcagatttataatctttctctagacttccatggtctgaatgttgcctgctgaagtagcaacctaaaaagtatcccctgcttatgcttgtccagttggccctccatgtccataggcttcgcatctgtgattcagcccactgtgggtcaaaaatatttggggaaaaaaatggatggttgcgcctttgctgaacatgtacaaacttttttttgtcattaaacaatatagtataacaactatttacaaagcatttacattgtattagctattataggtaatctagagatgatttaaagtgtatggtaggatgtgcataggttatatgcaaatactacaccattttctataagggacttgaacatcatggactttagtatcctagggggttcttggaacccatcacccataggggcaccataggacaactatagtaccgtgtttatttcctattaattcaggttccgtttagagtctaaaactaaaacctaatcatttagtcacagtgtaaaaacaaatggaaataacagctcaaatcttcaaaatattactatagcattatgtttaaaataatctacaacaaaaatgtaccattttcaagcagtactacattaggagcccttttatagaaaataatttcttctttacccccgttccagtgtgaatctagtattctgttaacatttgtgtggcatttggagtttgtcatccccattgaagggagagccttctcagacatgaagcaagggaaacatactgaatagttttacacaaatttgatctggcttccatttgtccccctcatttcccaaatgtttaaatgtattggatttggattctcaatgtataagttgccttatctgttaatgtctatcttctgtctctttaattttgtatatctgctgttttgcttttggatacattttctaattagaagtcacatgataaatataatcagtatagtaataataccataatgtgcacatactcaataaataaatgactgcattgttgtaaatga

SEQ ID NO: 1476-1501 - skipped (26 entries)

SEQ ID NO: 1502 - DNA, 1713 bp, Homo sapiens
gcggccgcccctcggccccggagcccctcggcggcgccaccatgtactcgggagccggccccgatcctgcagctccaccaaagaaaccgcctcgccctggagctcccggtcatctgggaagccttgccagcctcagcagccctgctgacagctacaacgagggtgtcaagccatggaggcttcagccccaggaaatcagcccccctcctactgccaacctggaccggtcgaatgataaggtgtacgagaatgtgacgggcctggtgaaagctgtcatcgagatgtccagtaaaatccagccagccccaccagaggagtatgtccctatggtgaaggaagtcggcttggccctgaggacattattggccactgtggatgagaccattcccctcctaccagccagcacccaccgagagattgagatggcacagaagctattgaactctgacctgggtgagctcatcaacaagatgaaactggcccagcagtatgtcatgaccagcctccagcaagagtacaaaaagcaaatgctgactgctgctcacgccctggctgtggatgccaaaaacttactcgatgtcattgaccaagcaagactgaaaatgcttgggcagacgagaccacactgagcctcccctaggagcacgtcttgctaccctcttttgaagatgttctctagccttccaccagcagcgaggaattaaccctgtgtcctcagtcgccagcacttacagctccaacttttttgaatgaccatctggttgaaaaatctttctcatataagtttaaccacactttgatttgggttcattttttgttttgtttttttcaatcatgatattcagaaaaatccaggatccaaaatgtggcgtttttctaagaatgaaaattatatgtaagcttttaagcatcatgaagaacaatttatgttcacattaagatacgttctaaagggggatggccaaggggtgacatcttaattcctaaactaccttagctgcatagtggaagaggagagcatgaagcaaagaattccaggaaacccaagaggctgagaattcttttgtctaccatagaattattatccagactggaatttttgtttgttagaacacccttcagttgcaatatgctaatcccactttacaaagaatataaaagctatattttgaagacttgagttatttcagaaaaaactacagccctttttgtcttacctgccttttactttcgtgtggatatgtgaagcattgggtcgggaactagctgtagaacacaactaaaaactcatgtcttttttcacagaataatgtgccagttttttgtagcaatgttatttctcttggaagcagaaatgctttgtaccagagcacctccaaactgcattgaggagaagttccagaaccatcccctttttccatttttatataatttataaagaaagattaaagccatgttgactattttacagccactggagttaactaacccttccttgtatctgtcttcccaggagagaatgaagcaaaacaggaatttggttttcttttgatgtccagttacaccatccattctgttaattttgaaaaaatataccctccctttagtttgttgggggatataaattattctcaggaagaatataatgaactgtacagttactttgacctattaaaaaggtgttaccagtaaagttcttgttgtaatatcctt

SEQ ID NO: 1503 - DNA, 2889 bp, Homo sapiens
gcggccgcccctcggccccggagcccctcggcggcgccaccatgtactcgggagccggccccgtaacaatgcgtcagtttgaccatcctcatattgtgaagctgattggagtcatcacagagaatcctgtctggataatcatggagctgtgcacacttggagagctgaggtcatttttgcaagtaaggaaatacagtttggatctagcatctttgatcctgtatgcctatcagcttagtacagctcttgcatatctagagagcaaaagatttgtacacagggacattgctgctcggaatgttctggtgtcctcaaatgattgtgtaaaattaggagactttggattatcccgatatatggaagatagtacttactacaaagcttccaaaggaaaattgcctattaaatggatggctccagagtcaatcaattttcgacgttttacctcagctagtgacgtatggatgtttggtgtgtgtatgtgggagatactgatgcatggtgtgaagccttttcaaggagtgaagaacaatgatgtaatcggtcgaattgaaaatggggaaagattaccaatgcctccaaattgtcctcctaccctctacagccttatgacgaaatgctgggcctatgaccccagcaggcggcccaggtttactgaacttaaagctcagctcagcacaatcctggaggaagagaaggctcagcaagaagagcgcatgaggatggagtccagaagacaggccacagtgtcctgggactccggagggtctgatgaagcaccgcccaagcccagcagaccgggttatcccagtccgaggtccagcgaaggattttatcccagcccacagcacatggtacaaaccaatcattaccaggtttctggctaccctggttcacatggaatcacagccatggctggcagcatctatccaggtcaggcatctcttttggaccaaacagattcatggaatcatagacctcaggagatagcaatgtggcagcccaatgtggaggactctacagtattggacctgcgagggattgggcaagtgttgccaacccatctgatggaagagcgtctaatccgacagcaacaggaaatggaagaagatcagcgctggctggaaaaagaggaaagatttctgaaacctgatgtgagactctctcgaggcagtattgacagggaggatggaagtcttcagggtccgattggaaaccaacatatatatcagcctgtgggtaaaccagatcctgcagctccaccaaagaaaccgcctcgccctggagctcccggtcatctgggaagccttgccagcctcagcagccctgctgacagctacaacgagggtgtcaagcttcagccccaggaaatcagcccccctcctactgccaacctggaccggtcgaatgataaggtgtacgagaatgtgacgggcctggtgaaagctgtcatcgagatgtccagtaaaatccagccagccccaccagaggagtatgtccctatggtgaaggaagtcggcttggccctgaggacattattggccactgtggatgagaccattcccctcctaccagccagcacccaccgagagattgagatggcacagaagctattgaactctgacctgggtgagctcatcaacaagatgaaactggcccagcagtatgtcatgaccagcctccagcaagagtacaaaaagcaaatgctgactgctgctcacgccctggctgtggatgccaaaaacttactcgatgtcattgaccaagcaagactgaaaatgcttgggcagacgagaccacactgagcctcccctaggagcacgtcttgctaccctcttttgaagatgttctctagccttccaccagcagcgaggaattaaccctgtgtcctcagtcgccagcacttacagctccaacttttttgaatgaccatctggttgaaaaatctttctcatataagtttaaccacactttgatttgggttcattttttgttttgtttttttcaatcatgatattcagaaaaatccaggatccaaaatgtggcgtttttctaagaatgaaaattatatgtaagcttttaagcatcatgaagaacaatttatgttcacattaagatacgttctaaagggggatggccaaggggtgacatcttaattcctaaactaccttagctgcatagtggaagaggagagcatgaagcaaagaattccaggaaacccaagaggctgagaattcttttgtctaccatagaattattatccagactggaatttttgtttgttagaacacccttcagttgcaatatgctaatcccactttacaaagaatataaaagctatattttgaagacttgagttatttcagaaaaaactacagccctttttgtcttacctgccttttactttcgtgtggatatgtgaagcattgggtcgggaactagctgtagaacacaactaaaaactcatgtcttttttcacagaataatgtgccagttttttgtagcaatgttatttctcttggaagcagaaatgctttgtaccagagcacctccaaactgcattgaggagaagttccagaaccatcccctttttccatttttatataatttataaagaaagattaaagccatgttgactattttacagccactggagttaactaacccttccttgtatctgtcttcccaggagagaatgaagcaaaacaggaatttggttttcttttgatgtccagttacaccatccattctgttaattttgaaaaaatataccctccctttagtttgttgggggatataaattattctcaggaagaatataatgaactgtacagttactttgacctattaaaaaggtgttaccagtaaagttcttgttgtaatatcctt

SEQ ID NO: 1504 - DNA, 2898 bp, Homo sapiens
gcggccgcccctcggccccggagcccctcggcggcgccaccatgtactcgggagccggccccgtaacaatgcgtcagtttgaccatcctcatattgtgaagctgattggagtcatcacagagaatcctgtctggataatcatggagctgtgcacacttggagagctgaggtcatttttgcaagtaaggaaatacagtttggatctagcatctttgatcctgtatgcctatcagcttagtacagctcttgcatatctagagagcaaaagatttgtacacagggacattgctgctcggaatgttctggtgtcctcaaatgattgtgtaaaattaggagactttggattatcccgatatatggaagatagtacttactacaaagcttccaaaggaaaattgcctattaaatggatggctccagagtcaatcaattttcgacgttttacctcagctagtgacgtatggatgtttggtgtgtgtatgtgggagatactgatgcatggtgtgaagccttttcaaggagtgaagaacaatgatgtaatcggtcgaattgaaaatggggaaagattaccaatgcctccaaattgtcctcctaccctctacagccttatgacgaaatgctgggcctatgaccccagcaggcggcccaggtttactgaacttaaagctcagctcagcacaatcctggaggaagagaaggctcagcaagaagagcgcatgaggatggagtccagaagacaggccacagtgtcctgggactccggagggtctgatgaagcaccgcccaagcccagcagaccgggttatcccagtccgaggtccagcgaaggattttatcccagcccacagcacatggtacaaaccaatcattaccaggtttctggctaccctggttcacatggaatcacagccatggctggcagcatctatccaggtcaggcatctcttttggaccaaacagattcatggaatcatagacctcaggagatagcaatgtggcagcccaatgtggaggactctacagtattggacctgcgagggattgggcaagtgttgccaacccatctgatggaagagcgtctaatccgacagcaacaggaaatggaagaagatcagcgctggctggaaaaagaggaaagatttctgaaacctgatgtgagactctctcgaggcagtattgacagggaggatggaagtcttcagggtccgattggaaaccaacatatatatcagcctgtgggtaaaccagatcctgcagctccaccaaagaaaccgcctcgccctggagctcccggtcatctgggaagccttgccagcctcagcagccctgctgacagctacaacgagggtgtcaagccatggaggcttcagccccaggaaatcagcccccctcctactgccaacctggaccggtcgaatgataaggtgtacgagaatgtgacgggcctggtgaaagctgtcatcgagatgtccagtaaaatccagccagccccaccagaggagtatgtccctatggtgaaggaagtcggcttggccctgaggacattattggccactgtggatgagaccattcccctcctaccagccagcacccaccgagagattgagatggcacagaagctattgaactctgacctgggtgagctcatcaacaagatgaaactggcccagcagtatgtcatgaccagcctccagcaagagtacaaaaagcaaatgctgactgctgctcacgccctggctgtggatgccaaaaacttactcgatgtcattgaccaagcaagactgaaaatgcttgggcagacgagaccacactgagcctcccctaggagcacgtcttgctaccctcttttgaagatgttctctagccttccaccagcagcgaggaattaaccctgtgtcctcagtcgccagcacttacagctccaacttttttgaatgaccatctggttgaaaaatctttctcatataagtttaaccacactttgatttgggttcattttttgttttgtttttttcaatcatgatattcagaaaaatccaggatccaaaatgtggcgtttttctaagaatgaaaattatatgtaagcttttaagcatcatgaagaacaatttatgttcacattaagatacgttctaaagggggatggccaaggggtgacatcttaattcctaaactaccttagctgcatagtggaagaggagagcatgaagcaaagaattccaggaaacccaagaggctgagaattcttttgtctaccatagaattattatccagactggaatttttgtttgttagaacacccttcagttgcaatatgctaatcccactttacaaagaatataaaagctatattttgaagacttgagttatttcagaaaaaactacagccctttttgtcttacctgccttttactttcgtgtggatatgtgaagcattgggtcgggaactagctgtagaacacaactaaaaactcatgtcttttttcacagaataatgtgccagttttttgtagcaatgttatttctcttggaagcagaaatgctttgtaccagagcacctccaaactgcattgaggagaagttccagaaccatcccctttttccatttttatataatttataaagaaagattaaagccatgttgactattttacagccactggagttaactaacccttccttgtatctgtcttcccaggagagaatgaagcaaaacaggaatttggttttcttttgatgtccagttacaccatccattctgttaattttgaaaaaatataccctccctttagtttgttgggggatataaattattctcaggaagaatataatgaactgtacagttactttgacctattaaaaaggtgttaccagtaaagttcttgttgtaatatcctt

SEQ ID NO: 1505 - DNA, 2826 bp, Homo sapiens
gcggccgcccctcggccccggagcccctcggcggcgccaccatgtactcgggagccggccccgtaacaatgcgtcagtttgaccatcctcatattgtgaagctgattggagtcatcacagagaatcctgtctggataatcatggagctgtgcacacttggagagctgaggtcatttttgcaagtaaggaaatacagtttggatctagcatctttgatcctgtatgcctatcagcttagtacagctcttgcatatctagagagcaaaagatttgtacacagggacattgctgctcggaatgttctggtgtcctcaaatgattgtgtaaaattaggagactttggattatcccgatatatggaagatagtacttactacaaagcttccaaaggaaaattgcctattaaatggatggctccagagtcaatcaattttcgacgttttacctcagctagtgacgtatggatgtttggtgtgtgtatgtgggagatactgatgcatggtgtgaagccttttcaaggagtgaagaacaatgatgtaatcggtcgaattgaaaatggggaaagattaccaatgcctccaaattgtcctcctaccctctacagccttatgacgaaatgctgggcctatgaccccagcaggcggcccaggtttactgaacttaaagctcagctcagcacaatcctggaggaagagaaggctcagcaagaagagcgcatgaggatggagtccagaagacaggccacagtgtcctgggactccggagggtctgatgaagcaccgcccaagcccagcagaccgggttatcccagtccgaggtccagcgaaggattttatcccagcccacagcacatggtacaaaccaatcattaccaggtttctggctaccctggttcacatggaatcacagccatggctggcagcatctatccaggtcaggcatctcttttggaccaaacagattcatggaatcatagacctcaggagatagcaatgtggcagcccaatgtggaggactctacagtattggacctgcgagggattgggcaagtgttgccaacccatctgatggaagagcgtctaatccgacagcaacaggaaatggaagaagatcagcgctggctggaaaaagaggaaagatttctgattggaaaccaacatatatatcagcctgtgggtaaaccagatcctgcagctccaccaaagaaaccgcctcgccctggagctcccggtcatctgggaagccttgccagcctcagcagccctgctgacagctacaacgagggtgtcaagcttcagccccaggaaatcagcccccctcctactgccaacctggaccggtcgaatgataaggtgtacgagaatgtgacgggcctggtgaaagctgtcatcgagatgtccagtaaaatccagccagccccaccagaggagtatgtccctatggtgaaggaagtcggcttggccctgaggacattattggccactgtggatgagaccattcccctcctaccagccagcacccaccgagagattgagatggcacagaagctattgaactctgacctgggtgagctcatcaacaagatgaaactggcccagcagtatgtcatgaccagcctccagcaagagtacaaaaagcaaatgctgactgctgctcacgccctggctgtggatgccaaaaacttactcgatgtcattgaccaagcaagactgaaaatgcttgggcagacgagaccacactgagcctcccctaggagcacgtcttgctaccctcttttgaagatgttctctagccttccaccagcagcgaggaattaaccctgtgtcctcagtcgccagcacttacagctccaacttttttgaatgaccatctggttgaaaaatctttctcatataagtttaaccacactttgatttgggttcattttttgttttgtttttttcaatcatgatattcagaaaaatccaggatccaaaatgtggcgtttttctaagaatgaaaattatatgtaagcttttaagcatcatgaagaacaatttatgttcacattaagatacgttctaaagggggatggccaaggggtgacatcttaattcctaaactaccttagctgcatagtggaagaggagagcatgaagcaaagaattccaggaaacccaagaggctgagaattcttttgtctaccatagaattattatccagactggaatttttgtttgttagaacacccttcagttgcaatatgctaatcccactttacaaagaatataaaagctatattttgaagacttgagttatttcagaaaaaactacagccctttttgtcttacctgccttttactttcgtgtggatatgtgaagcattgggtcgggaactagctgtagaacacaactaaaaactcatgtcttttttcacagaataatgtgccagttttttgtagcaatgttatttctcttggaagcagaaatgctttgtaccagagcacctccaaactgcattgaggagaagttccagaaccatcccctttttccatttttatataatttataaagaaagattaaagccatgttgactattttacagccactggagttaactaacccttccttgtatctgtcttcccaggagagaatgaagcaaaacaggaatttggttttcttttgatgtccagttacaccatccattctgttaattttgaaaaaatataccctccctttagtttgttgggggatataaattattctcaggaagaatataatgaactgtacagttactttgacctattaaaaaggtgttaccagtaaagttcttgttgtaatatcctt

SEQ ID NO: 1506 - DNA, 1704 bp, Homo sapiens
gcggccgcccctcggccccggagcccctcggcggcgccaccatgtactcgggagccggccccgatcctgcagctccaccaaagaaaccgcctcgccctggagctcccggtcatctgggaagccttgccagcctcagcagccctgctgacagctacaacgagggtgtcaagcttcagccccaggaaatcagcccccctcctactgccaacctggaccggtcgaatgataaggtgtacgagaatgtgacgggcctggtgaaagctgtcatcgagatgtccagtaaaatccagccagccccaccagaggagtatgtccctatggtgaaggaagtcggcttggccctgaggacattattggccactgtggatgagaccattcccctcctaccagccagcacccaccgagagattgagatggcacagaagctattgaactctgacctgggtgagctcatcaacaagatgaaactggcccagcagtatgtcatgaccagcctccagcaagagtacaaaaagcaaatgctgactgctgctcacgccctggctgtggatgccaaaaacttactcgatgtcattgaccaagcaagactgaaaatgcttgggcagacgagaccacactgagcctcccctaggagcacgtcttgctaccctcttttgaagatgttctctagccttccaccagcagcgaggaattaaccctgtgtcctcagtcgccagcacttacagctccaacttttttgaatgaccatctggttgaaaaatctttctcatataagtttaaccacactttgatttgggttcattttttgttttgtttttttcaatcatgatattcagaaaaatccaggatccaaaatgtggcgtttttctaagaatgaaaattatatgtaagcttttaagcatcatgaagaacaatttatgttcacattaagatacgttctaaagggggatggccaaggggtgacatcttaattcctaaactaccttagctgcatagtggaagaggagagcatgaagcaaagaattccaggaaacccaagaggctgagaattcttttgtctaccatagaattattatccagactggaatttttgtttgttagaacacccttcagttgcaatatgctaatcccactttacaaagaatataaaagctatattttgaagacttgagttatttcagaaaaaactacagccctttttgtcttacctgccttttactttcgtgtggatatgtgaagcattgggtcgggaactagctgtagaacacaactaaaaactcatgtcttttttcacagaataatgtgccagttttttgtagcaatgttatttctcttggaagcagaaatgctttgtaccagagcacctccaaactgcattgaggagaagttccagaaccatcccctttttccatttttatataatttataaagaaagattaaagccatgttgactattttacagccactggagttaactaacccttccttgtatctgtcttcccaggagagaatgaagcaaaacaggaatttggttttcttttgatgtccagttacaccatccattctgttaattttgaaaaaatataccctccctttagtttgttgggggatataaattattctcaggaagaatataatgaactgtacagttactttgacctattaaaaaggtgttaccagtaaagttcttgttgtaatatcctt

SEQ ID NO: 1507 - DNA, 2751 bp, Homo sapiens
gcggccgcccctcggccccggagcccctcggcggcgccaccatgtactcgggagccggccccgtaacaatgcgtcagtttgaccatcctcatattgtgaagctgattggagtcatcacagagaatcctgtctggataatcatggagctgtgcacacttggagagctgaggtcatttttgcaagtaaggaaatacagtttggatctagcatctttgatcctgtatgcctatcagcttagtacagctcttgcatatctagagagcaaaagatttgtacacagggacattgctgctcggaatgttctggtgtcctcaaatgattgtgtaaaattaggagactttggattatcccgatatatggaagatagtacttactacaaagcttccaaaggaaaattgcctattaaatggatggctccagagtcaatcaattttcgacgttttacctcagctagtgacgtatggatgtttggtgtgtgtatgtgggagatactgatgcatggtgtgaagccttttcaaggagtgaagaacaatgatgtaatcggtcgaattgaaaatggggaaagattaccaatgcctccaaattgtcctcctaccctctacagccttatgacgaaatgctgggcctatgaccccagcaggcggcccaggtttactgaacttaaagctcagctcagcacaatcctggaggaagagaaggctcagcaagaagagcgcatgaggatggagtccagaagacaggccacagtgtcctgggactccggagggtctgatgaagcaccgcccaagcccagcagaccgggttatcccagtccgaggtccagcgaaggattttatcccagcccacagcacatggtacaaaccaatcattaccaggactctacagtattggacctgcgagggattgggcaagtgttgccaacccatctgatggaagagcgtctaatccgacagcaacaggaaatggaagaagatcagcgctggctggaaaaagaggaaagatttctgaaacctgatgtgagactctctcgaggcagtattgacagggaggatggaagtcttcagggtccgattggaaaccaacatatatatcagcctgtgggtaaaccagatcctgcagctccaccaaagaaaccgcctcgccctggagctcccggtcatctgggaagccttgccagcctcagcagccctgctgacagctacaacgagggtgtcaagcttcagccccaggaaatcagcccccctcctactgccaacctggaccggtcgaatgataaggtgtacgagaatgtgacgggcctggtgaaagctgtcatcgagatgtccagtaaaatccagccagccccaccagaggagtatgtccctatggtgaaggaagtcggcttggccctgaggacattattggccactgtggatgagaccattcccctcctaccagccagcacccaccgagagattgagatggcacagaagctattgaactctgacctgggtgagctcatcaacaagatgaaactggcccagcagtatgtcatgaccagcctccagcaagagtacaaaaagcaaatgctgactgctgctcacgccctggctgtggatgccaaaaacttactcgatgtcattgaccaagcaagactgaaaatgcttgggcagacgagaccacactgagcctcccctaggagcacgtcttgctaccctcttttgaagatgttctctagccttccaccagcagcgaggaattaaccctgtgtcctcagtcgccagcacttacagctccaacttttttgaatgaccatctggttgaaaaatctttctcatataagtttaaccacactttgatttgggttcattttttgttttgtttttttcaatcatgatattcagaaaaatccaggatccaaaatgtggcgtttttctaagaatgaaaattatatgtaagcttttaagcatcatgaagaacaatttatgttcacattaagatacgttctaaagggggatggccaaggggtgacatcttaattcctaaactaccttagctgcatagtggaagaggagagcatgaagcaaagaattccaggaaacccaagaggctgagaattcttttgtctaccatagaattattatccagactggaatttttgtttgttagaacacccttcagttgcaatatgctaatcccactttacaaagaatataaaagctatattttgaagacttgagttatttcagaaaaaactacagccctttttgtcttacctgccttttactttcgtgtggatatgtgaagcattgggtcgggaactagctgtagaacacaactaaaaactcatgtcttttttcacagaataatgtgccagttttttgtagcaatgttatttctcttggaagcagaaatgctttgtaccagagcacctccaaactgcattgaggagaagttccagaaccatcccctttttccatttttatataatttataaagaaagattaaagccatgttgactattttacagccactggagttaactaacccttccttgtatctgtcttcccaggagagaatgaagcaaaacaggaatttggttttcttttgatgtccagttacaccatccattctgttaattttgaaaaaatataccctccctttagtttgttgggggatataaattattctcaggaagaatataatgaactgtacagttactttgacctattaaaaaggtgttaccagtaaagttcttgttgtaatatcctt

SEQ ID NO: 1508 - DNA, 2928 bp, Homo sapiens
gcggccgcccctcggccccggagcccctcggcggcgccaccatgtactcgggagccggccccgtaacaatgcgtcagtttgaccatcctcatattgtgaagctgattggagtcatcacagagaatcctgtctggataatcatggagctgtgcacacttggagagctgaggtcatttttgcaagtaaggaaatacagtttggatctagcatctttgatcctgtatgcctatcagcttagtacagctcttgcatatctagagagcaaaagatttgtacacagggacattgctgctcggaatgttctggtgtcctcaaatgattgtgtaaaattaggagactttggattatcccgatatatggaagatagtacttactacaaagcttccaaaggaaaattgcctattaaatggatggctccagagtcaatcaattttcgacgttttacctcagctagtgacgtatggatgtttggtgtgtgtatgtgggagatactgatgcatggtgtgaagccttttcaaggagtgaagaacaatgatgtaatcggtcgaattgaaaatggggaaagattaccaatgcctccaaattgtcctcctaccctctacagccttatgacgaaatgctgggcctatgaccccagcaggcggcccaggtttactgaacttaaagctcagctcagcacaatcctggaggaagagaaggctcagcaagaagagcgcatgaggatggagtccagaagacaggccacagtgtcctgggactccggagggtctgatgaagcaccgcccaagcccagcagaccgggttatcccagtccgaggtccagcgaaggattttatcccagcccacagcacatggtacaaaccaatcattaccaggtttctggctaccctggttcacatggaatcacagccatggctggcagcatctatccaggtcaggcatctcttttggaccaaacagattcatggaatcatagacctcaggagatagcaatgtggcagcccaatgtggaggactctacagtattggacctgcgagggattgggcaagtgttgccaacccatctgatggaagagcgtctaatccgacagcaacaggaaatggaagaagatcagcgctggctggaaaaagaggaaagatttctgaaacctgatgtgagactctctcgaggcagtattgacagggaggatggaagtcttcagggtccgattggaaaccaacatatatatcagcctgtgggtaaaccaggtaaagaagaaaagaattgggcggaaagaaatcctgcagctccaccaaagaaaccgcctcgccctggagctcccggtcatctgggaagccttgccagcctcagcagccctgctgacagctacaacgagggtgtcaagccatggaggcttcagccccaggaaatcagcccccctcctactgccaacctggaccggtcgaatgataaggtgtacgagaatgtgacgggcctggtgaaagctgtcatcgagatgtccagtaaaatccagccagccccaccagaggagtatgtccctatggtgaaggaagtcggcttggccctgaggacattattggccactgtggatgagaccattcccctcctaccagccagcacccaccgagagattgagatggcacagaagctattgaactctgacctgggtgagctcatcaacaagatgaaactggcccagcagtatgtcatgaccagcctccagcaagagtacaaaaagcaaatgctgactgctgctcacgccctggctgtggatgccaaaaacttactcgatgtcattgaccaagcaagactgaaaatgcttgggcagacgagaccacactgagcctcccctaggagcacgtcttgctaccctcttttgaagatgttctctagccttccaccagcagcgaggaattaaccctgtgtcctcagtcgccagcacttacagctccaacttttttgaatgaccatctggttgaaaaatctttctcatataagtttaaccacactttgatttgggttcattttttgttttgtttttttcaatcatgatattcagaaaaatccaggatccaaaatgtggcgtttttctaagaatgaaaattatatgtaagcttttaagcatcatgaagaacaatttatgttcacattaagatacgttctaaagggggatggccaaggggtgacatcttaattcctaaactaccttagctgcatagtggaagaggagagcatgaagcaaagaattccaggaaacccaagaggctgagaattcttttgtctaccatagaattattatccagactggaatttttgtttgttagaacacccttcagttgcaatatgctaatcccactttacaaagaatataaaagctatattttgaagacttgagttatttcagaaaaaactacagccctttttgtcttacctgccttttactttcgtgtggatatgtgaagcattgggtcgggaactagctgtagaacacaactaaaaactcatgtcttttttcacagaataatgtgccagttttttgtagcaatgttatttctcttggaagcagaaatgctttgtaccagagcacctccaaactgcattgaggagaagttccagaaccatcccctttttccatttttatataatttataaagaaagattaaagccatgttgactattttacagccactggagttaactaacccttccttgtatctgtcttcccaggagagaatgaagcaaaacaggaatttggttttcttttgatgtccagttacaccatccattctgttaattttgaaaaaatataccctccctttagtttgttgggggatataaattattctcaggaagaatataatgaactgtacagttactttgacctattaaaaaggtgttaccagtaaagttcttgttgtaatatcctt

SEQ ID NO: 1509 - DNA, 2276 bp, Homo sapiens
gcggccgcccctcggccccggagcccctcggcggcgccaccatgtactcgggagccggccccgcacaatcctggaggaagagaaggctcagcaagaagagcgcatgaggatggagtccagaagacaggccacagtgtcctgggactccggagggtctgatgaagcaccgcccaagcccagcagaccgggttatcccagtccgaggtccagcgaaggattttatcccagcccacagcacatggtacaaaccaatcattaccaggtttctggctaccctggttcacatggaatcacagccatggctggcagcatctatccaggtcaggcatctcttttggaccaaacagattcatggaatcatagacctcaggagatagcaatgtggcagcccaatgtggaggactctacagtattggacctgcgagggattgggcaagtgttgccaacccatctgatggaagagcgtctaatccgacagcaacaggaaatggaagaagatcagcgctggctggaaaaagaggaaagatttctgaaacctgatgtgagactctctcgaggcagtattgacagggaggatggaagtcttcagggtccgattggaaaccaacatatatatcagcctgtgggtaaaccagatcctgcagctccaccaaagaaaccgcctcgccctggagctcccggtcatctgggaagccttgccagcctcagcagccctgctgacagctacaacgagggtgtcaagcttcagccccaggaaatcagcccccctcctactgccaacctggaccggtcgaatgataaggtgtacgagaatgtgacgggcctggtgaaagctgtcatcgagatgtccagtaaaatccagccagccccaccagaggagtatgtccctatggtgaaggaagtcggcttggccctgaggacattattggccactgtggatgagaccattcccctcctaccagccagcacccaccgagagattgagatggcacagaagctattgaactctgacctgggtgagctcatcaacaagatgaaactggcccagcagtatgtcatgaccagcctccagcaagagtacaaaaagcaaatgctgactgctgctcacgccctggctgtggatgccaaaaacttactcgatgtcattgaccaagcaagactgaaaatgcttgggcagacgagaccacactgagcctcccctaggagcacgtcttgctaccctcttttgaagatgttctctagccttccaccagcagcgaggaattaaccctgtgtcctcagtcgccagcacttacagctccaacttttttgaatgaccatctggttgaaaaatctttctcatataagtttaaccacactttgatttgggttcattttttgttttgtttttttcaatcatgatattcagaaaaatccaggatccaaaatgtggcgtttttctaagaatgaaaattatatgtaagcttttaagcatcatgaagaacaatttatgttcacattaagatacgttctaaagggggatggccaaggggtgacatcttaattcctaaactaccttagctgcatagtggaagaggagagcatgaagcaaagaattccaggaaacccaagaggctgagaattcttttgtctaccatagaattattatccagactggaatttttgtttgttagaacacccttcagttgcaatatgctaatcccactttacaaagaatataaaagctatattttgaagacttgagttatttcagaaaaaactacagccctttttgtcttacctgccttttactttcgtgtggatatgtgaagcattgggtcgggaactagctgtagaacacaactaaaaactcatgtcttttttcacagaataatgtgccagttttttgtagcaatgttatttctcttggaagcagaaatgctttgtaccagagcacctccaaactgcattgaggagaagttccagaaccatcccctttttccatttttatataatttataaagaaagattaaagccatgttgactattttacagccactggagttaactaacccttccttgtatctgtcttcccaggagagaatgaagcaaaacaggaatttggttttcttttgatgtccagttacaccatccattctgttaattttgaaaaaatataccctccctttagtttgttgggggatataaattattctcaggaagaatataatgaactgtacagttactttgacctattaaaaaggtgttaccagtaaagttcttgttgtaatatcctt

SEQ ID NO: 1510-1520 - skipped (11 entries)

SEQ ID NO: 1521 - DNA, 1436 bp, Homo sapiens
gagggcggggcgggaaggcggcgaggagccgagctgggtgcggtgaggcgcgcagatcaccgcggttcctgggcagggcacggaaggctaagcaaggctgacctgctgcagctcccgcctcgtgcgctcgccccacccggccgccgcccgagcgctcgagaaagtcctctcgggagaagcagcgcctgttcccggggcagatccaggttcaggtcctggctataagtcaccatggcacagcaagctgccgataagtatctctatgtggataaaaacttcatcaacaatccgctggcccaggccgactgggctgccaagaagctggtatgggtgccttccgacaagagtggctttgagccagccagcctcaaggaggaggtgggcgaagaggccatcgtggagctggtggagaatgggaagaaggtgaaggtgaacaaggatgacatccagaagatgaacccgcccaagttctccaaggtggaggacatggcagagctcacgtgcctcaacgaagcctcggtgctgcacaacctcaaggagcgttactactcagggctcatctacgtgtcagcggtgcccactgtgctggccatgaagaatggggacgtggtggacaagtttgtgggcatcaaggatgaggatcagttggaggccttcctgaagaagctgattggctgacaagcagggatgagtcctggttcccttgcccgcgtgggaccccaatagaactcagcccttccatgccagcccttcctgctgcctccctcctgtctggctcctggggcccatgcttagagcccaggctccagccctgagtgcttccgagctggcggactgcccaggggccatcagaggatggtggtgctgctgctgatccggggaccgctgtcttccctcccatacgcctttcatccctccttctagggcctatggcagttctcccaggatgtgtggcgagagcctgggccagcccacagcgttcctagtcaggcagccacaccttggtcctcatcttggtcccttccaatctgaaacctcgtgcctggctcgtctgccacctacatttctctttccagctgctgttttgtaaaaagaaaaagaaaaaagaagcccaaactagtgagagtaatatctaattatctcattttttgtaggtctgtgataaagaacttagtcatcccttccacctcctactgtgaagaacagaccctgggtcccacactgaaatcccctctagtcacccattcccaccccccagggagctgcctcccaggcagggggtgcagaaaatgattgatgggctggggaaccctggagagcctcgactccggaagtctcaaggtgcctcctcctctccttagctggcccgttggttttctgagcagggggctgaactgtgaacaagtcagacaaataaagcaagggtctgcaccatc

SEQ ID NO: 1522 - DNA, 1980 bp, Homo sapiens
gagggcggggcgggaaggcggcgaggagccgagctgggtgcggtgaggcgcgcagatcaccgcggttcctgggcagggcacggaaggctaagcaaggctgacctgctgcagctcccgcctcgtgcgctcgccccacccggccgccgcccgagcgctcgagaaagtcctctcgggagaagcagcgcctgttcccggggcagatccaggttcaggtcctggctataagtcaccatggcacagcaagctgccgataagtatctctatgtggataaaaacttcatcaacaatccgctggcccaggccgactgggctgccaagaagctggtatgggtgccttccgacaagagtggctttgagccagccagcctcaaggaggaggtgggcgaagaggccatcgtggagctggtggagaatgggaagaaggtgaaggtgaacaaggatgacatccagaagatgaacccgcccaagttctccaaggtggaggacatggcagagctcacgtgcctcaacgaagcctcggtgctgcacaacctcaaggagcgttactactcagggctcatctacacctattcaggcctgttctgtgtggtcatcaatccttacaagaacctgcccatctactctgaagagattgtggaaatgtacaagggcaagaagaggcacgagatgccccctcacatctatgccatcacagacaccgcctacaggagtatgatgcaagatggctcagcgacttcttctgaggaggttcctggcctctgtcatctccaggaagccctctcagggtcagtggccacccctcacttccagagccctgcagaccccacaatgcagtcctggtggcctgactgtaacacccaacccagcccggacaatatacaccacgaggatctccttgacaacctttaatatccaggatggacctgactttcaagaccgagtggtcaacagtgagacaccagtggttgtggatttccacgcacagtggtgtggaccctgcaagatcctggggccgaggttagagaagatggtggccaagcagcacgggaaggtggtgatggccaaggtggatattgatgaccacacagacctcgccattgagtatgaggtgtcagcggtgcccactgtgctggccatgaagaatggggacgtggtggacaagtttgtgggcatcaaggatgaggatcagttggaggccttcctgaagaagctgattggctgacaagcagggatgagtcctggttcccttgcccgcgtgggaccccaatagaactcagcccttccatgccagcccttcctgctgcctccctcctgtctggctcctggggcccatgcttagagcccaggctccagccctgagtgcttccgagctggcggactgcccaggggccatcagaggatggtggtgctgctgctgatccggggaccgctgtcttccctcccatacgcctttcatccctccttctagggcctatggcagttctcccaggatgtgtggcgagagcctgggccagcccacagcgttcctagtcaggcagccacaccttggtcctcatcttggtcccttccaatctgaaacctcgtgcctggctcgtctgccacctacatttctctttccagctgctgttttgtaaaaagaaaaagaaaaaagaagcccaaactagtgagagtaatatctaattatctcattttttgtaggtctgtgataaagaacttagtcatcccttccacctcctactgtgaagaacagaccctgggtcccacactgaaatcccctctagtcacccattcccaccccccagggagctgcctcccaggcagggggtgcagaaaatgattgatgggctggggaaccctggagagcctcgactccggaagtctcaaggtgcctcctcctctccttagctggcccgttggttttctgagcagggggctgaactgtgaacaagtcagacaaataaagcaagggtctgcaccatc

SEQ ID NO: 1523-1524 - skipped (2 entries)

SEQ ID NO: 1525 - DNA, 1104 bp, Homo sapiens
actgggggtggggttacgtgtaggtgacgtggccgcttccagtctttggtcgggtttcggcggcttcagtgctcggggaggaggcagtgacggccggtgagattggaagtggcggcggcggcaggcggcagaggggagtccgaggttatgcgtctcaatgatcccgcggaaacgctacgggtctaagaacacggatcagggtgtctacctgggtctctcaaagacacaggtcctgtcccctgcaactgctggcagtagcagcagcgacatcgcccctctgccccccccagtgaccctcgtccctccccctcccgacaccatgtcctgccgggatcggacccaggagtttctgtctgcctgcaagtcgctgcagacccgtcagaatggaatccagacaaataagccagctttgcgtgctgtccgacaacgcagtgaattcaccctcatggccaagcgcattgggaaagaccttagcaacacatttgccaagctggagaagctgacaatcttggcaaagcgcaagtccctctttgatgataaagcagtggaaattgaagagctaacatatatcatcaaacaggtccgtgtttatgatccagcatccccccagcgccggccagtcctagagaccacctatggagagtacccactaacagccatgaccctcactccgggaggcaactcagtgattgtgggaaacactcatgggcagctggcagaaattgaccttcggcaagggcgtctactgggctgtctgaaggggctggcaggcagtgtgcgtgggttgcagtgccacccttcaaagcctctactagcctcctgtggcttggacagagtcttgaggatacacaggatccagaatccacggggtctggagcataaggatgagccccaagagcctcaagaacccaacaaggtgcccctagaagacacagagacagatgaactttgggcatccttggaggcagctgccaagcggaagctctcgggtttggagcagccccaaggagctctccaaacgagacggagaaagaagaagcggcctgggtccaccagcccctgacgcccctgtgcccactttgtaaataaactgctgaacaccca

SEQ ID NO: 1526 - DNA, 1823 bp, Homo sapiens
actgggggtggggttacgtgtaggtgacgtggccgcttccagtctttggtcgggtttcggcggcttcagtgctcggggaggaggcagtgacggccggtgagattggaagtggcggcggcggcaggcggcagaggggagaatggaatccagacaaataagccagctttgcgtgctgtccgacaacgcagtgaattcaccctcatggccaagcgcattgggaaagaccttagcaacacatttgccaagctggagaagctgacaatcttggcaaagcgcaagtccctctttgatgataaagcagtggaaattgaagagctaacatatatcatcaaacaggacatcaatagcctcaacaaacaaattgctcagctccaggatttcgtgagagccaagggcagccagagtggccggcacctgcagacccactccaacaccattgtggtctccttgcagtcgaaactggcttctatgtccaatgacttcaaatcggttttagaagtgaggacagagaacctgaagcagcagaggagccggagagagcagttctcccgggcacctgtgtcagccctgccccttgcccctaaccacctggcaactacactgcgctgcatcggactcgacgcccgctggtgacgcacacgctgcgccggaagtgtgaactgtctgcctccaggctttgtcatggcggctgctgctgcacgctggaaccatgtgtgggtcggcaccgagactgggatcttgaaaggggtaaatcttcagcgaaaacaggcggcgaacttcacggccggaggacagccgcggcgcgaggaggcagtgagcgccctgtgttggggcaccggcggcgagacccagatgctggtgggctgcgcggacaggacggtgaagcacttcagcaccgaggatggcatattccagggtcagagacactgcccgggcggggagggcatgttccgtggcctcgcccaggccgacggcaccctcatcacatgtgtggattctgggattctcagagtctggcatgacaaggacaaggacacatcctctgacccactcctggaactgagagtgggccctggggtgtgtaggatgcgccaagacccagcacacccccatgtggttgccacaggtgggaaagagaatgctttgaagatatgggacctgcagggctctgaggaacctgtgttcagggccaagaacgtgcggaatgactggctggacttgcgggttcccatctgggaccaggacatacagtttctcccaggatcacagaagcttgtcacctgcacagggtaccaccaggtccgtgtttatgatccagcatccccccagcgccggccagtcctagagaccacctatggagagtacccactaacagccatgaccctcactccgggaggcaactcagtgattgtgggaaacactcatgggcagctggcagaaattgaccttcggcaagggcgtctactgggctgtctgaaggggctggcaggcagtgtgcgtgggttgcagtgccacccttcaaagcctctactagcctcctgtggcttggacagagtcttgaggatacacaggatccagaatccacggggtctggagcataaggatgagccccaagagcctcaagaacccaacaaggtgcccctagaagacacagagacagatgaactttgggcatccttggaggcagctgccaagcggaagctctcgggtttggagcagccccaaggagctctccaaacgagacggagaaagaagaagcggcctgggtccaccagcccctgacgcccctgtgcccactttgtaaataaactgctgaacaccca

SEQ ID NO: 1527 - DNA, 917 bp, Homo sapiens
actgggggtggggttacgtgtaggtgacgtggccgcttccagtctttggtcgggtttcggcggcttcagtgctcggggaggaggcagtgacggccggtgagattggaagtggcggcggcggcaggcggcagaggggagaatggaatccagacaaataagccagctttgcgtgctgtccgacaacgcagtgaattcaccctcatggccaagcgcattgggaaagaccttagcaacacatttgccaagctggagaagctgacaatcttggcaaagcgcaagtccctctttgatgataaagcagtggaaattgaagagctaacatatatcatcaaacaggtccgtgtttatgatccagcatccccccagcgccggccagtcctagagaccacctatggagagtacccactaacagccatgaccctcactccgggaggcaactcagtgattgtgggaaacactcatgggcagctggcagaaattgaccttcggcaagggcgtctactgggctgtctgaaggggctggcaggcagtgtgcgtgggttgcagtgccacccttcaaagcctctactagcctcctgtggcttggacagagtcttgaggatacacaggatccagaatccacggggtctggagcataaggtttatctcaagtctcaattgaactgcctcctcttgtcaggcagggacaactgggaggatgagccccaagagcctcaagaacccaacaaggtgcccctagaagacacagagacagatgaactttgggcatccttggaggcagctgccaagcggaagctctcgggtttggagcagccccaaggagctctccaaacgagacggagaaagaagaagcggcctgggtccaccagcccctgacgcccctgtgcccactttgtaaataaactgctgaacaccca

SEQ ID NO: 1528 - DNA, 860 bp, Homo sapiens
actgggggtggggttacgtgtaggtgacgtggccgcttccagtctttggtcgggtttcggcggcttcagtgctcggggaggaggcagtgacggccggtgagattggaagtggcggcggcggcaggcggcagaggggagaatggaatccagacaaataagccagctttgcgtgctgtccgacaacgcagtgaattcaccctcatggccaagcgcattgggaaagaccttagcaacacatttgccaagctggagaagctgacaatcttggcaaagcgcaagtccctctttgatgataaagcagtggaaattgaagagctaacatatatcatcaaacaggtccgtgtttatgatccagcatccccccagcgccggccagtcctagagaccacctatggagagtacccactaacagccatgaccctcactccgggaggcaactcagtgattgtgggaaacactcatgggcagctggcagaaattgaccttcggcaagggcgtctactgggctgtctgaaggggctggcaggcagtgtgcgtgggttgcagtgccacccttcaaagcctctactagcctcctgtggcttggacagagtcttgaggatacacaggatccagaatccacggggtctggagcataaggatgagccccaagagcctcaagaacccaacaaggtgcccctagaagacacagagacagatgaactttgggcatccttggaggcagctgccaagcggaagctctcgggtttggagcagccccaaggagctctccaaacgagacggagaaagaagaagcggcctgggtccaccagcccctgacgcccctgtgcccactttgtaaataaactgctgaacaccca

SEQ ID NO: 1529 - DNA, 1181 bp, Homo sapiens
actgggggtggggttacgtgtaggtgacgtggccgcttccagtctttggtcgggtttcggcggcttcagtgctcggggaggaggcagtgacggccggtgagattggaagtggcggcggcggcaggcggcagaggggagcaactacactgcgctgcatcggactcgacgcccgctggtgacgcacacgctgcgccggaagtgtgaactgtctgcctccaggctttgtcatggcggctgctgctgcacgctggaaccatgtgtgggtcggcaccgagactgggatcttgaaaggggtaaatcttcagcgaaaacaggcggcgaacttcacggccggaggacagccgcggcgcgaggaggcagtgagcgccctgtgttggggcaccggcggcgagacccagatgctggtgggctgcgcggacaggacggtgaagcacttcagcaccgaggatggcatattccagggtcagagacactgcccgggcggggagggcatgttccgtggcctcgcccaggccgacggcaccctcatcacatgtgtggattctgggattctcagagtctggcatgacaaggacaaggacacatcctctgacccactcctggaactgagagtgggccctggggtgtgtaggatgcgccaagacccagcacacccccatgtggttgccacaggtgggaaagagaatgctttgaagatatgggacctgcagggctctgaggaacctgtgttcagggccaagaacgtgagtgacaagagtgtgaaggagctgttcctgaagtcgagggaggctgaggccactgacgatgcattagagactagatggacttagggggcgaaggagggctgaaaacaggggcacatcgagccccccatagccctgtcctccatctgcccaccccaccaggtgcggaatgactggctggacttgcgggttcccatctgggaccaggacatacagtttctcccaggatcacagaagcttgtcacctgcacagggtaccaccaggtaaggtgtcacctcacacctgccttctcctgggataaagcagcctcctggagaaatggcccccacggtttgacacaactgctcttctcaccattctgagttcagaggagcaagcgcttccccgtctgttccaaccctgtccctgagcccatgaccttcctctactgtattcta

SEQ ID NO: 1530 - DNA, 1161 bp, Homo sapiens
actgggggtggggttacgtgtaggtgacgtggccgcttccagtctttggtcgggtttcggcggcttcagtgctcggggaggaggcagtgacggccggtgagattggaagtggcggcggcggcaggcggcagaggggagtccgaggttatgcgtctcaatgatcccgcggaaacgctacgggtctaagaacacggatcagggtgtctacctgggtctctcaaagacacaggtcctgtcccctgcaactgctggcagtagcagcagcgacatcgcccctctgccccccccagtgaccctcgtccctccccctcccgacaccatgtcctgccgggatcggacccaggagtttctgtctgcctgcaagtcgctgcagacccgtcagaatggaatccagacaaataagccagctttgcgtgctgtccgacaacgcagtgaattcaccctcatggccaagcgcattgggaaagaccttagcaacacatttgccaagctggagaagctgacaatcttggcaaagcgcaagtccctctttgatgataaagcagtggaaattgaagagctaacatatatcatcaaacaggtccgtgtttatgatccagcatccccccagcgccggccagtcctagagaccacctatggagagtacccactaacagccatgaccctcactccgggaggcaactcagtgattgtgggaaacactcatgggcagctggcagaaattgaccttcggcaagggcgtctactgggctgtctgaaggggctggcaggcagtgtgcgtgggttgcagtgccacccttcaaagcctctactagcctcctgtggcttggacagagtcttgaggatacacaggatccagaatccacggggtctggagcataaggtttatctcaagtctcaattgaactgcctcctcttgtcaggcagggacaactgggaggatgagccccaagagcctcaagaacccaacaaggtgcccctagaagacacagagacagatgaactttgggcatccttggaggcagctgccaagcggaagctctcgggtttggagcagccccaaggagctctccaaacgagacggagaaagaagaagcggcctgggtccaccagcccctgacgcccctgtgcccactttgtaaataaactgctgaacaccca

SEQ ID NO: 1531 - DNA, 2353 bp, Homo sapiens
actgggggtggggttacgtgtaggtgacgtggccgcttccagtctttggtcgggtttcggcggcttcagtgctcggggaggaggcagtgacggccggtgagattggaagtggcggcggcggcaggcggcagaggggagtccgaggttatgcgtctcaatgatcccgcggaaacgctacgggtctaagaacacggatcagggtgtctacctgggtctctcaaagacacaggtcctgtcccctgcaactgctggcagtagcagcagcgacatcgcccctctgccccccccagtgaccctcgtccctccccctcccgacaccatgtcctgccgggatcggacccaggagtttctgtctgcctgcaagtcgctgcagacccgtcagaatggaatccagacaaataagccagctttgcgtgctgtccgacaacgcagtgaattcaccctcatggccaagcgcattgggaaagaccttagcaacacatttgccaagctggagaagctgacaatcttggcaaagcgcaagtccctctttgatgataaagcagtggaaattgaagagctaacatatatcatcaaacaggacatcaatagcctcaacaaacaaattgctcagctccaggatttcgtgagagccaagggcagccagagtggccggcacctgcagacccactccaacaccattgtggtctccttgcagtcgaaactggcttctatgtccaatgacttcaaatcggttttagaagtgaggacagagaacctgaagcagcagaggagccggagagagcagttctcccgggcacctgtgtcagccctgccccttgcccctaaccacctgggcggtggtgctgtggttctgggggcagagtcccatgcctccaaggatgtcgccatcgacatgatggactctcggaccagccagcagctgcagctcattgacgagcaggattcctacatccagagtcgggcagacaccatgcagaacattgagtcgacaattgttgagttgggctccatctttcagcagttggcacacatggttaaggaacaggaggaaaccattcagagcaactacactgcgctgcatcggactcgacgcccgctggtgacgcacacgctgcgccggaagtgtgaactgtctgcctccaggctttgtcatggcggctgctgctgcacgctggaaccatgtgtgggtcggcaccgagactgggatcttgaaaggggtaaatcttcagcgaaaacaggcggcgaacttcacggccggaggacagccgcggcgcgaggaggcagtgagcgccctgtgttggggcaccggcggcgagacccagatgctggtgggctgcgcggacaggacggtgaagcacttcagcaccgaggatggcatattccagggtcagagacactgcccgggcggggagggcatgttccgtggcctcgcccaggccgacggcaccctcatcacatgtgtggattctgggattctcagagtctggcatgacaaggacaaggacacatcctctgacccactcctggaactgagagtgggccctggggtgtgtaggatgcgccaagacccagcacacccccatgtggttgccacaggtgggaaagagaatgctttgaagatatgggacctgcagggctctgaggaacctgtgttcagggccaagaacgtgcggaatgactggctggacttgcgggttcccatctgggaccaggacatacagtttctcccaggatcacagaagcttgtcacctgcacagggtaccaccaggtccgtgtttatgatccagcatccccccagcgccggccagtcctagagaccacctatggagagtacccactaacagccatgaccctcactccgggaggcaactcagtgattgtgggaaacactcatgggcagctggcagaaattgaccttcggcaagggcgtctactgggctgtctgaaggggctggcaggcagtgtgcgtgggttgcagtgccacccttcaaagcctctactagcctcctgtggcttggacagagtcttgaggatacacaggatccagaatccacggggtctggagcataaggtttatctcaagtctcaattgaactgcctcctcttgtcaggcagggacaactgggaggatgagccccaagagcctcaagaacccaacaaggtgcccctagaagacacagagacagatgaactttgggcatccttggaggcagctgccaagcggaagctctcgggtttggagcagccccaaggagctctccaaacgagacggagaaagaagaagcggcctgggtccaccagcccctgacgcccctgtgcccactttgtaaataaactgctgaacaccca

SEQ ID NO: 1532 - DNA, 731 bp, Homo sapiens
cagagtcactcctgccttcaccatgaagtccagcggcctcttccccttcctggtgctgcttgccctgggaactctggcaccttgggctgtggaaggctctggaaagtccttcaaagctggagtctgtcctcctaagaaatctgcccagtgccttagatacaagaaacctgagtgccagagtgactggcagtgtccagggaagaagagatgttgtcctgacacttgtggcatcaaatgcctggatcctgttgacaccccaaacccaacaaggaggaagcctgggaagtgcccagtgacttatggccaatgtttgatgcttaacccccccaatttctgtgagatggatggccagtgcaagcgtgacttgaagtgttgcatgggcatgtgtgggaaatcctgcgtttcccctgtgaaagataaggagggttcctgcccccaggtgaacattaactttccccagctcggcctctgtcgggaccagtgccaggtggacagccagtgtcctggccagatgaaatgctgccgcaatggctgtgggaaggtgtcctgtgtcactcccaatttctgagctccagccaccaccaggctgagcagtgaggagagaaagtttctgcctggccctgcatctggttccagcccacctgccctcccctttttcgggactctgtattccctcttgggctgaccacagcttctccctttcccaaccaataaagtaaccactttcagca

SEQ ID NO: 1533 - DNA, 581 bp, Homo sapiens
cagagtcactcctgccttcaccatgaagtccagcggcctcttccccttcctggtgctgcttgccctgggaactctggcaccttgggctgtggaaggctctggaaagtccttcaaagctggagtctgtcctcctaagaaatctgcccagtgccttagatacaagaaacctgagtgccagagtgactggcagtgtccagggaagaagagatgttgtcctgacacttgtggcatcaaatgcctggatcctgttgacaccccaaacccaaataaggagggttcctgcccccaggtgaacattaactttccccagctcggcctctgtcgggaccagtgccaggtggacagccagtgtcctggccagatgaaatgctgccgcaatggctgtgggaaggtgtcctgtgtcactcccaatttctgagctccagccaccaccaggctgagcagtgaggagagaaagtttctgcctggccctgcatctggttccagcccacctgccctcccctttttcgggactctgtattccctcttgggctgaccacagcttctccctttcccaaccaataaagtaaccactttcagca

SEQ ID NO: 1534 - DNA, 3232 bp, Homo sapiens
atctccgccgccacctcggtctcgctgctcctgggcggggggtgaggacgagtccggagtatctggggtttggcgttgttgtcagcctcggggagagagattggacaaatattctccaagaggaggagggcgacgccaaggactttccacatcaactgctttggggtatctccacaagttggaagagggaccctttcgttttgcattgcgtgtgttgtgctcattaccagtgcagcgactgccgtcccagggtgactctgagttgtcctttatcgtgagctagcaatggctagcgaagacaatcgtgtcccttccccgccaccaacaggtgatgacgggggaggtggagggagagaagaaacccctactgaagggggtgcattgtctctgaaaccagggctccccatcaggggcatcagaatgaaatttgccgtgttgaccggtttggttgaagttggagaagtatccaatagggatattgtagaaactgtctttaacctggatccaagccacgctcagaagcctgttgacagtggtgctcctcatgctgtcgttcttcatgatttcccagcagagcaagttgatgatttgaacctcacttctggagaaattgtttatcttctggagaagatagatacagattggtacagagggaactgtagaaaccagattggcatatttcctgccaactatgtcaaagtgattattgatatcccagaaggaggaaatgggaaaagagaatgtgtttcatctcattgtgttaaaggctcaagatgtgttgctcggtttgaatatattggagagcagaaggatgagttgagtttctcagagggagaaattattattcttaaagagtatgtgaatgaggaatgggccagaggagaagttcgaggcagaactgggattttccccctgaactttgtggagcctgttgaggattatcccacctctggtgcaaatgttttaagcacaaaggtaccactgaaaaccaaaaaagaagattctggctcaaactctcaggttaacagtcttccggcagaatggtgtgaagctcttcacagttttacagcagagaccagtgatgacttatcattcaagaggggagaccggatccagattctggaacgtctggattctgactggtgcaggggcagactgcaggacagggaggggatcttcccagcagtgtttgtgaggccctgcccagctgaggcaaaaagtatgttggccatagtaccgaaggggaggaaggccaaagccttatatgatttccgaggggagaatgaagatgaactttccttcaaggctggagatataataacagagctggaatctgtagatgatgactggatgagtggagaacttatgggaaaatctggaatatttcccaaaaactacatacagtttctacagatcagctagaggagaagcttgtctgtgttccttggcacaagaactcacttgaactatcaccttgactatcagatatgtttttgcactattttttttaactgaaaaagaaatatctaagctgtacatggtacactagaattttctgaaagcagaaaacgttcagattttgtagttaattttcattacaatagaaacatgcacatggaaacccatgagctaggattctaccgaggaaaacatctagtgggattagcaaggtgaagggaaagcatctggtggcatggcagcatggggaggctcacacacagaagttgcacgtggacatctgttttaatcagcacaagtgaattaaccatgcttcttcatttttttactttagttaaaaaagaggacatttaatattctacatgctgtaactatcaggacatggttagcaatctcaatttcatttttgatattcaaattaattcttacagcttgagcatatcagccttattaccagagcaaatccttccttcagatgggatagtttactgactagttggagcatttgtaagcacatggtgaaatcagcccctgcccaccaaaataatctttatgttaccaagtgattcccatttgtctaaggatttgaagggggtctaaattggatgtatcttacttagtctaaagaaccaaaaccatccctgaaatgccttgctaatacaactaatccttccatatatgtgccatacttatttttttcctcagtgtatactttatgttaacagggttattacaaagcacattttctgaatctgcaatcattcctttgacaattactggacccaaaggaaaattcattttctttgcattattccagtaatatataaaaactgtgtcttgttatagtagtacattatgaatcacatataaaatcttacaatacagaacaactgttaagatggaaaacagtgccaaacctccacagctcatttctttgtaatataatcagaatgaaaaataatttaagaggacagaagactggtacttttttgttttattttttctctagcttatccctgcacaattattagagtgaatgaaaaaccactttcctgctttccattgttataaattctaagcttaagataaaagtggttctttacatgactgaatcaattacaatttatgggctagagccaaataggttgaagacaatcatccaaacagatcaatggaatagaatttcattggaaatgtaaaacactttcccaacaatggtcatgactttcttctgtttttgagaagagtttcatatgctggaccacattttagcttttattgttttttttttcccattgtccaaaaagttaagcaacaagtggccacacttttacgtgactacaacctggagttctgcaaagaaggtaatatttacttggtctttgactaaagttatctccccattctatggttacattttattttggactatggggacttctaatacgttttggtaaagaagagagtataaagaaaattcttgtcaaatttcactcaaaagtaatttcatgagaaatcaatgatttaaagcattatccaaattaaattatcatttgcagcaaactgtacaacagcaggaaggatatggaatggaacatgaggtatatatctttgcctttataattttaacatcttatattgaagattctgaaaacctatctttattagaggaaaatctcaatcttcagttttggccttctgtcagcagaatgataagtgcaatagttgtaaatctacttgacactgtaataaactgaactgaactttcaaagtc

SEQ ID NO: 1535 - DNA, 3769 bp, Homo sapiens
atctccgccgccacctcggtctcgctgctcctgggcggggggtgaggacgagtccggagtatctggggtttggcgttgttgtcagcctcggggagagagattggacaaatattctccaagaggaggagggcgacgccaaggactttccacatcaactgctttggggtatctccacaagttggaagagggaccctttcgttttgcattgcgtgtgttgtgctcattaccagtgcagcgactgccgtcccagggtgactctgagttgtcctttatcgtgagctagcaatggctagcgaagacaatcgtgtcccttccccgccaccaacaggtgatgacgggggaggtggagggagagaagaaacccctactgaagggggtgcattgtctctgaaaccagggctccccatcaggggcatcagaatgaaatttgccgtgttgaccggtttggttgaagttggagaagtatccaatagggatattgtagaaactgtctttaacctggaatccaaccacccaggtcaaacaggaggttttgtgcgagtacccccaaggttgccaccgagacctgtgaatggaaaaaccattccaactcaacagcctccaaccaaggtgccccctgagagaccacctcccccaaagctttctgcaaccagaagatctaataagaaactgccttttaatcgatcctcttctgacatggatcttcagaaaaaacaaagtaacttggcaactggactctcaaaagccaagagtcaagtttttaaaaatcaagatccggtgctaccccctcgtcccaaaccaggacaccctctctacagtaaatacatgctgtctgtgcctcatggaattgccaatgaagatattgtctctcaaaaccccggagaactctcttgtaagcgtggggatgtacttgtgatgctgaagcagacggaaaataattacttggagtgccaaaagggagaagacactggcagagttcacctgtctcaaatgaagattatcactccacttgatgaacatcttagaagcagaccaaacgatccaagccacgctcagaagcctgttgacagtggtgctcctcatgctgtcgttcttcatgatttcccagcagagcaagttgatgatttgaacctcacttctggagaaattgtttatcttctggagaagatagatacagattggtacagagggaactgtagaaaccagattggcatatttcctgccaactatgtcaaagtgattattgatatcccagaaggaggaaatgggaaaagagaatgtgtttcatctcattgtgttaaaggctcaagatgtgttgctcggtttgaatatattggagagcagaaggatgagttgagtttctcagagggagaaattattattcttaaagagtatgtgaatgaggaatgggccagaggagaagttcgaggcagaactgggattttccccctgaactttgtggagcctgttgaggattatcccacctctggtgcaaatgttttaagcacaaaggtaccactgaaaaccaaaaaagaagattctggctcaaactctcaggttaacagtcttccggcagaatggtgtgaagctcttcacagttttacagcagagaccagtgatgacttatcattcaagaggggagaccggatccagattctggaacgtctggattctgactggtgcaggggcagactgcaggacagggaggggatcttcccagcagtgtttgtgaggccctgcccagctgaggcaaaaagtatgttggccatagtaccgaaggggaggaaggccaaagccttatatgatttccgaggggagaatgaagatgaactttccttcaaggctggagatataataacagagctggaatctgtagatgatgactggatgagtggagaacttatgggaaaatctggaatatttcccaaaaactacatacagtttctacagatcagctagaggagaagcttgtctgtgttccttggcacaagaactcacttgaactatcaccttgactatcagatatgtttttgcactattttttttaactgaaaaagaaatatctaagctgtacatggtacactagaattttctgaaagcagaaaacgttcagattttgtagttaattttcattacaatagaaacatgcacatggaaacccatgagctaggattctaccgaggaaaacatctagtgggattagcaaggtgaagggaaagcatctggtggcatggcagcatggggaggctcacacacagaagttgcacgtggacatctgttttaatcagcacaagtgaattaaccatgcttcttcatttttttactttagttaaaaaagaggacatttaatattctacatgctgtaactatcaggacatggttagcaatctcaatttcatttttgatattcaaattaattcttacagcttgagcatatcagccttattaccagagcaaatccttccttcagatgggatagtttactgactagttggagcatttgtaagcacatggtgaaatcagcccctgcccaccaaaataatctttatgttaccaagtgattcccatttgtctaaggatttgaagggggtctaaattggatgtatcttacttagtctaaagaaccaaaaccatccctgaaatgccttgctaatacaactaatccttccatatatgtgccatacttatttttttcctcagtgtatactttatgttaacagggttattacaaagcacattttctgaatctgcaatcattcctttgacaattactggacccaaaggaaaattcattttctttgcattattccagtaatatataaaaactgtgtcttgttatagtagtacattatgaatcacatataaaatcttacaatacagaacaactgttaagatggaaaacagtgccaaacctccacagctcatttctttgtaatataatcagaatgaaaaataatttaagaggacagaagactggtacttttttgttttattttttctctagcttatccctgcacaattattagagtgaatgaaaaaccactttcctgctttccattgttataaattctaagcttaagataaaagtggttctttacatgactgaatcaattacaatttatgggctagagccaaataggttgaagacaatcatccaaacagatcaatggaatagaatttcattggaaatgtaaaacactttcccaacaatggtcatgactttcttctgtttttgagaagagtttcatatgctggaccacattttagcttttattgttttttttttcccattgtccaaaaagttaagcaacaagtggccacacttttacgtgactacaacctggagttctgcaaagaaggtaatatttacttggtctttgactaaagttatctccccattctatggttacattttattttggactatggggacttctaatacgttttggtaaagaagagagtataaagaaaattcttgtcaaatttcactcaaaagtaatttcatgagaaatcaatgatttaaagcattatccaaattaaattatcatttgcagcaaactgtacaacagcaggaaggatatggaatggaacatgaggtatatatctttgcctttataattttaacatcttatattgaagattctgaaaacctatctttattagaggaaaatctcaatcttcagttttggccttctgtcagcagaatgataagtgcaatagttgtaaatctacttgacactgtaataaactgaactgaactttcaaagtc

SEQ ID NO: 1536 - DNA, 3659 bp, Homo sapiens
agggaaacttggaggctgcgaccagggtttggcgttgttgtcagcctcggggagagagattggacaaatattctccaagaggaggagggcgacgccaaggactttccacatcaactgctttggggtatctccacaagttggaagagggaccctttcgttttgcattgcgtgtgttgtgctcattaccagtgcagcgactgccgtcccagggtgactctgagttgtcctttatcgtgagctagcaatggctagcgaagacaatcgtgtcccttccccgccaccaacaggtgatgacgggggaggtggagggagagaagaaacccctactgaagggggtgcattgtctctgaaaccagggctccccatcaggggcatcagaatgaaatttgccgtgttgaccggtttggttgaagttggagaagtatccaatagggatattgtagaaactgtctttaacctggaatccaaccacccaggtcaaacaggaggttttgtgcgagtacccccaaggttgccaccgagacctgtgaatggaaaaaccattccaactcaacagcctccaaccaaggtgccccctgagagaccacctcccccaaagctttctgcaaccagaagatctaataagaaactgccttttaatcgatcctcttctgacatggatcttcagaaaaaacaaagtaacttggcaactggactctcaaaagccaagagtcaagtttttaaaaatcaagatccggtgctaccccctcgtcccaaaccaggacaccctctctacagtaaatacatgcgtggggatgtacttgtgatgctgaagcagacggaaaataattacttggagtgccaaaagggagaagacactggcagagttcacctgtctcaaatgaagattatcactccacttgatgaacatcttagaagcagaccaaacgatccaagccacgctcagaagcctgttgacagtggtgctcctcatgctgtcgttcttcatgatttcccagcagagcaagttgatgatttgaacctcacttctggagaaattgtttatcttctggagaagatagatacagattggtacagagggaactgtagaaaccagattggcatatttcctgccaactatgtcaaagtgattattgatatcccagaaggaggaaatgggaaaagagaatgtgtttcatctcattgtgttaaaggctcaagatgtgttgctcggtttgaatatattggagagcagaaggatgagttgagtttctcagagggagaaattattattcttaaagagtatgtgaatgaggaatgggccagaggagaagttcgaggcagaactgggattttccccctgaactttgtggagcctgttgaggattatcccacctctggtgcaaatgttttaagcacaaaggtaccactgaaaaccaaaaaagaagattctggctcaaactctcaggttaacagtcttccggcagaatggtgtgaagctcttcacagttttacagcagagaccagtgatgacttatcattcaagaggggagaccggatccagattctggaacgtctggattctgactggtgcaggggcagactgcaggacagggaggggatcttcccagcagtgtttgtgaggccctgcccagctgaggcaaaaagtatgttggccatagtaccgaaggggaggaaggccaaagccttatatgatttccgaggggagaatgaagatgaactttccttcaaggctggagatataataacagagctggaatctgtagatgatgactggatgagtggagaacttatgggaaaatctggaatatttcccaaaaactacatacagtttctacagatcagctagaggagaagcttgtctgtgttccttggcacaagaactcacttgaactatcaccttgactatcagatatgtttttgcactattttttttaactgaaaaagaaatatctaagctgtacatggtacactagaattttctgaaagcagaaaacgttcagattttgtagttaattttcattacaatagaaacatgcacatggaaacccatgagctaggattctaccgaggaaaacatctagtgggattagcaaggtgaagggaaagcatctggtggcatggcagcatggggaggctcacacacagaagttgcacgtggacatctgttttaatcagcacaagtgaattaaccatgcttcttcatttttttactttagttaaaaaagaggacatttaatattctacatgctgtaactatcaggacatggttagcaatctcaatttcatttttgatattcaaattaattcttacagcttgagcatatcagccttattaccagagcaaatccttccttcagatgggatagtttactgactagttggagcatttgtaagcacatggtgaaatcagcccctgcccaccaaaataatctttatgttaccaagtgattcccatttgtctaaggatttgaagggggtctaaattggatgtatcttacttagtctaaagaaccaaaaccatccctgaaatgccttgctaatacaactaatccttccatatatgtgccatacttatttttttcctcagtgtatactttatgttaacagggttattacaaagcacattttctgaatctgcaatcattcctttgacaattactggacccaaaggaaaattcattttctttgcattattccagtaatatataaaaactgtgtcttgttatagtagtacattatgaatcacatataaaatcttacaatacagaacaactgttaagatggaaaacagtgccaaacctccacagctcatttctttgtaatataatcagaatgaaaaataatttaagaggacagaagactggtacttttttgttttattttttctctagcttatccctgcacaattattagagtgaatgaaaaaccactttcctgctttccattgttataaattctaagcttaagataaaagtggttctttacatgactgaatcaattacaatttatgggctagagccaaataggttgaagacaatcatccaaacagatcaatggaatagaatttcattggaaatgtaaaacactttcccaacaatggtcatgactttcttctgtttttgagaagagtttcatatgctggaccacattttagcttttattgttttttttttcccattgtccaaaaagttaagcaacaagtggccacacttttacgtgactacaacctggagttctgcaaagaaggtaatatttacttggtctttgactaaagttatctccccattctatggttacattttattttggactatggggacttctaatacgttttggtaaagaagagagtataaagaaaattcttgtcaaatttcactcaaaagtaatttcatgagaaatcaatgatttaaagcattatccaaattaaattatcatttgcagcaaactgtacaacagcaggaaggatatggaatggaacatgaggtatatatctttgcctttataattttaacatcttatattgaagattctgaaaacctatctttattagaggaaaatctcaatcttcagttttggccttctgtcagcagaatgataagtgcaatagttgtaaatctacttgacactgtaataaactgaactgaactttcaaagtc

SEQ ID NO: 1537 - DNA, 3028 bp, Homo sapiens
atctccgccgccacctcggtctcgctgctcctgggcggggggtgaggacgagtccggagtatctggggtttggcgttgttgtcagcctcggggagagagattggacaaatattctccaagaggaggagggcgacgccaaggactttccacatcaactgctttggggtatctccacaagttggaagagggaccctttcgttttgcattgcgtgtgttgtgctcattaccagtgcagcgactgccgtcccagggtgactctgagttgtcctttatcgtgagctagcaatggctagcgaagacaatcgtgtcccttccccgccaccaacaggtgatgacgggggaggtggagggagagaagaaacccctactgaagggggtgcattgtctctgaaaccagggctccccatcaggggcatcagaatgaaatttgccgtgttgaccggtttggttgaagttggagaagtatccaatagggatattgtagaaactgtctttaacctgattgatatcccagaaggaggaaatgggaaaagagaatgtgtttcatctcattgtgttaaaggctcaagatgtgttgctcggtttgaatatattggagagcagaaggatgagttgagtttctcagagggagaaattattattcttaaagagtatgtgaatgaggaatgggccagaggagaagttcgaggcagaactgggattttccccctgaactttgtggagcctgttgaggattatcccacctctggtgcaaatgttttaagcacaaaggtaccactgaaaaccaaaaaagaagattctggctcaaactctcaggttaacagtcttccggcagaatggtgtgaagctcttcacagttttacagcagagaccagtgatgacttatcattcaagaggggagaccggatccagattctggaacgtctggattctgactggtgcaggggcagactgcaggacagggaggggatcttcccagcagtgtttgtgaggccctgcccagctgaggcaaaaagtatgttggccatagtaccgaaggggaggaaggccaaagccttatatgatttccgaggggagaatgaagatgaactttccttcaaggctggagatataataacagagctggaatctgtagatgatgactggatgagtggagaacttatgggaaaatctggaatatttcccaaaaactacatacagtttctacagatcagctagaggagaagcttgtctgtgttccttggcacaagaactcacttgaactatcaccttgactatcagatatgtttttgcactattttttttaactgaaaaagaaatatctaagctgtacatggtacactagaattttctgaaagcagaaaacgttcagattttgtagttaattttcattacaatagaaacatgcacatggaaacccatgagctaggattctaccgaggaaaacatctagtgggattagcaaggtgaagggaaagcatctggtggcatggcagcatggggaggctcacacacagaagttgcacgtggacatctgttttaatcagcacaagtgaattaaccatgcttcttcatttttttactttagttaaaaaagaggacatttaatattctacatgctgtaactatcaggacatggttagcaatctcaatttcatttttgatattcaaattaattcttacagcttgagcatatcagccttattaccagagcaaatccttccttcagatgggatagtttactgactagttggagcatttgtaagcacatggtgaaatcagcccctgcccaccaaaataatctttatgttaccaagtgattcccatttgtctaaggatttgaagggggtctaaattggatgtatcttacttagtctaaagaaccaaaaccatccctgaaatgccttgctaatacaactaatccttccatatatgtgccatacttatttttttcctcagtgtatactttatgttaacagggttattacaaagcacattttctgaatctgcaatcattcctttgacaattactggacccaaaggaaaattcattttctttgcattattccagtaatatataaaaactgtgtcttgttatagtagtacattatgaatcacatataaaatcttacaatacagaacaactgttaagatggaaaacagtgccaaacctccacagctcatttctttgtaatataatcagaatgaaaaataatttaagaggacagaagactggtacttttttgttttattttttctctagcttatccctgcacaattattagagtgaatgaaaaaccactttcctgctttccattgttataaattctaagcttaagataaaagtggttctttacatgactgaatcaattacaatttatgggctagagccaaataggttgaagacaatcatccaaacagatcaatggaatagaatttcattggaaatgtaaaacactttcccaacaatggtcatgactttcttctgtttttgagaagagtttcatatgctggaccacattttagcttttattgttttttttttcccattgtccaaaaagttaagcaacaagtggccacacttttacgtgactacaacctggagttctgcaaagaaggtaatatttacttggtctttgactaaagttatctccccattctatggttacattttattttggactatggggacttctaatacgttttggtaaagaagagagtataaagaaaattcttgtcaaatttcactcaaaagtaatttcatgagaaatcaatgatttaaagcattatccaaattaaattatcatttgcagcaaactgtacaacagcaggaaggatatggaatggaacatgaggtatatatctttgcctttataattttaacatcttatattgaagattctgaaaacctatctttattagaggaaaatctcaatcttcagttttggccttctgtcagcagaatgataagtgcaatagttgtaaatctacttgacactgtaataaactgaactgaactttcaaagtc

SEQ ID NO: 1538-1574 - skipped (37 entries)

SEQ ID NO: 1575 - DNA, 9384 bp, Homo sapiens
ggccgcgggatggcgggcagcaggggcgcctagctgcgccgggagccggggccgccgccggagtcgttgtcgccggagcctggagccgtgaacccagccgcgccagacgccgtgtgcgccgcctcgcgcagctccgcctggccgcccggaggggccccaccgccggccgcctgtgcgccccgggccgcgggcccgccgccgagcgcaagccccgctggccgccgccatgcacgccgcggagcccccgccgcccgaggactctgggactacgccgaggccgaacttttaggtcccactgagctaggcctgcgggccgggtggggggctgatcgcggcactcccgcggaggatggatggccgagacttcgggccccagcggtccgtgcacggtcccccgccgccgctgctgtccggcctggccatggacagccaccgcgtgggcgcggccactgccggacgcttgcccgcctcgggcttgcccggcccgctgccgcccgggaagtacatggccggcctgaatctccatccgcacccgggcgaggccttcttgggcagctttgtggccagcgggatggggccctcggcctcgtcccatgggagcccagtgccactgccctctgacctgtctttccgctccccaacccctagcaacctgcccatggtgcagctgtgggccgcccacgcccatgaaggcttctcccacctgcccagtgggctgtacccatcctacctccacctgaaccacctggagccccccagcagtgggagccccctcctcagccagctgggtcagcccagcattttcgatacccagaaaggtcaggggccaggaggagacggtttctacctgcccaccgcgggggctccgggctccctgcactctcacgcgccctcggcccggacccctggcggcggccactcctcgggcgccccggccaaaggctcgtcgtcgcgggacggtccagccaaggagcgggcgggccgcggcggggagccgcctccgcttttcggcaagaaggacccgcgcgcccggggcgaggaggcctcggggccacggggcgtggtggacctgacccaggaggcgcgcgccgagggccgccaggaccgggggcccccgcgcctggctgagcgcctgtcgcccttcctggctgagtccaagaccaagaatgcggcgctgcagccgtcggtactgaccatgtgcaacggcggcgccggggacgtggggctgcccgcgctggtggccgaagcggggcgcgggggtgccaaggaggctgcccggcaggacgagggcgcgcggctgctgcggcgcacggagaccctgctccctgggccgcgcccctgcccctcaccgctgcccccgccgcccgcgccccccaaggggcctcctgcaccccccgcggccacccccgccggcgtctacaccgtcttccgcgagcagggccgtgagcaccgcgtggtggcgcccaccttcgtgccttccgtggaggccttcgacgagcgcccggggcccatccagatcgcatcccaggcgcgcgatgcccgggcccgcgagcgcgaggctggcaggccaggggtcctgcaggcgccccccggctccccgcggcctctggaccggcccgagggcctgcgcgagaagaactcggtcatccgctcgctcaagcggccgccccccgcggatgcccccacggtgcgggccacacgcgcctccccggacccccgcgcctacgtgcctgccaaggagctgctcaagcccgaggcggacccgaggccctgcgagcgtgcgccccgcggcccagccggtcctgcagcccaacaggccgccaagctcttcggcctggagcccgggcgccccccgcccaccggccctgagcataaatggaaacccttcgagctgggcaacttcgccgccacgcagatggccgtgctggccgcgcagcaccaccacagccgcgccgaagaggaggccgccgtggtcgctgcctcctcctccaagaaggcctacctggaccctggggctgtgctgccccgctcggcggccacctgcggccggccggtcgctgacatgcactctgcggcccacgggtctggagaggcctcggccatgcagagccttataaagtacagtggcagctttgcccgggacgccgtggccgtgcgccctggtggctgtggcaagaagagcccctttggaggtttgggcaccatgaaacccgagcctgcgcccacctctgcgggtgcctcccgagcccaggcccgtctcccacactccggaggccctgcagcgggcggcggccggcagctgaagcgggaccccgagaggcccgagagcgccaaagctttcgggcgcgagggctctggtgcccagggtgaggcagaagtgcgacacccgcctgtgggcattgcagtggctgtggcccggcagaaggacagtggcggcagtggccggctggggcctgggctggtagaccaggagcgctctctgtcgctgagtaacgtcaaagggcacggccgagcagatgaggactgtgtggacgaccgggccagacaccgggaggaacggctgctcggggcacggctggaccgggatcaggagaagctgctcagagagagtaaggagctggctgacctggcccgcctgcaccctaccagctgtgctcctaacggcctgaaccccaacctcatggtgacggggggcccggcgctggcgggctcaggtcgctggtctgccgaccccgcagcccatctggccacgcacccctggttgccccgctcgggcaacgcatccatgtggctcgctggacacccctacggcttgggtcccccatctctgcaccagggcatggcccctgcgttcccacctggcctggggggctccctcccgtcagcctaccagtttgtcagggacccccaatcgggccagctggtggtcattcccagtgatcaccttcctcactttgcggagctgatggagcgggccaccgtaccgcccctctggcccgccctgtacccgccgggccgcagccccctgcaccacgcccagcagctgcagctcttctcacagcagcacttcctgcggcagcaggagttcctgtacctgcagcagcaggcggcccaggccttggaactgcagaggagcgcccagctcgtgcaggagcggttgaaggcgcaggagcaccgggcggagatggaagagaaggggagcaagcggggcctggaggctgcgggcaaggctggcctggccaccgccggccccgggctgctgccgcggaagccccctggcctggccgccggccccgcgggcacctacggcaaggccgtgagcccgccaccatcaccccgcgcatcccctgtggctgccctgaaggccaaggtcatccagaagctggaggacgtgtccaagccacccgcctacgcctaccccgccacccccagctcccaccccaccagcccgccgcccgcctccccaccgcccaccccgggtatcacccgcaaggaggaggctcccgagaatgtggtcgagaagaaagacttggagttggagaaggaagcccccagccccttccaggccctgttctcagatatcccgcccaggtacccgttccaagccctgccaccgcactacgggaggccctaccctttcctgctgcagcccacggccgccgccgacgcggacggcttggcccctgatgtgccgctcccggctgatgggcccgagcgcctggcactctcacccgaagacaagcccatccgcttgtccccctccaagatcacagagccgctgcgggagggcccggaggaagaaccgctggctgagcgggaggtgaaggcagaggtggaggacatggacgagggccccacagagctgccgcctctggagtcgccgctgccactgcccgccgcggaagccatggctacccccagccctgcagggggttgtggaggtggcctgttggaggcccaggcgctgagtgccaccgggcagagctgcgcagagccctctgagtgtccagactttgtggaggggcctgaaccacgggtggattccccgggccggacagaaccctgcaccgccgccctggacctgggggtgcagctgacacccgagacactggtggaggccaaggaggagccggtggaggtgcctgtggcggtgcccgtggtggaggcagtgcccgaggaaggcctggcgcaggtggcaccgagcgagtcccagcccaccctagaaatgtcagactgtgacgtgcccgccggggagggacagtgcccgagcctggagccccaagaggccgtgcctgtactcggcagcacctgcttcctggaagaggcaagctctgaccagttcctgcccagtctggaggacccactggctggcatgaacgccctggcggcagctgcggagctgccccaggccaggcctctgccctccccgggtgctgctggagcccaggccttggagaagctggaagcagccgagagccttgtcttggagcagagcttcctgcatggcatcaccctgctaagtgagatcgcagagctggagctggagaggaggagccaagagatgggaggtgcggagcgggccctggtggcgcggccctccctggagagtctgctggcagctggcagccacatgctgagggaggtgctggatgggcccgtggtggacccactcaagaacctgcggctcccgcgggagctgaagcccaacaagaagtacagctggatgcgcaagaaggaggagcggatgtatgccatgaagtcctccctggaggacatggacgccctggagctggacttccggatgcggctggccgaggtgcagcgccagtacaaggagaagcagcgtgagctggtgaagctgcagcgccgccgggactccgaggacaggcgcgaggaaccccatagaagcttggcacgcagaggccctggcaggccgcggaaacggacccacgccccgagcgccctgtcgcccccccgcaagagagggaagagcggccacagtagcggaaagctgagcagcaagtctctgctgacatcagatgattatgagctgggagcagggataagaaagagacacaaggggtctgaggaggaacatgatgccctcatcggaatggggaaagccagggggaggaaccagacttgggatgaacatgaggcctcgtcggacttcatcagtcaggccttgtctgatgccattaaaaaatggcaggagctgtcaccagaaaccagtggaaaaaggaagaagagaaaacaaatgaaccagtattcttacattgatttcaagtttgaacaaggtgacataaaaatagaaaagaggatgttctttcttgaaaataagcgacgacattgtaggtcctatgaccgacgtgctctccttccagctgtgcaacaagagcaggagttctatgagcagaaaatcaaagagatggcagagcatgaagactttttgcttgccctacagatgaatgaagaacagtatcaaaaggatggccagctgattgagtgtcgctgctgctatggggaatttccattcgaggagctgacgcagtgcgcagatgctcacttgttctgcaaagagtgtctcatcagatatgcccaagaggcagtctttggatctggaaagttggagctcagctgcatggaaggcagctgcacgtgttcgttcccaaccagtgagctggagaaggtgctcccccagaccatcctgtataagtactatgagcgaaaagccgaggaggaggttgcggcagcctacgccgacgagcttgtcaggtgcccgtcctgtagctttccggctctgttggacagtgatgtgaagaggttcagctgtcctaatcctcactgccgaaaggaaacctgtaggaagtgtcagggactctggaaagaacataatggcctcacctgtgaagagctggctgaaaaagacgacatcaagtaccgtacctctattgaagaaaaaatgactgctgcccgcattagaaaatgccacaagtgtgggactggcctcatcaaatctgaaggctgcaaccgcatgtcttgccgctgtggtgcccagatgtgctacctctgtcgagtttctattaatggatatgaccatttctgccaacatccccgctcaccaggagccccttgccaggagtgttcaagatgctctctctggaccgatcccactgaagatgatgagaagcttattgaggaaatccagaaggaggctgaagaggaacagaaaagaaagaatggagagaacaccttcaaacgcattggacccccgctggagaagcctgtggagaaggtgcagagggtggaggccctcccgaggcccgttccgcagaacctgccacagccacagatgccaccctatgccttcgcgcacccacccttccccctgcctcccgtgcggcctgtgttcaacaacttcccactcaacatggggcctatcccagccccgtacgtgccccctctgcccaacgtgcgggtcaactatgacttcggtcccatccacatgcccctggagcacaacctgcccatgcactttggcccccagccgcggcatcgcttctgatggccccgaatccccattgagcagcacaaagcccgtttggggtaggagtgtggatggagaaccctcccccaaggctggtgtctgtaccattgcatcctaagtcagcttgaagggtaggctggttttcttcccacccctttcctagaagggctactgctcctggaagagtggacggatccataataaagacgtcccaaatggtggagttcggagagagctgcgatgtgaactgcccctcccctcgcatcccccaggccaccaacggcagtccttctgccttgtccatggcataggccatagaccaggtccctgctgctcacacctgggcctctcctcggagccgacccctgggtagcaaggcagccgagagcatctccctggaggggcccacggttgggccaagggcagagggggctgcacctgcgggcctgggaagcattgctcagggtggggggctgggaccatggcccgcagaggcactgccacagctgtgagggccaagatgctgtccccccatccaaaacccgtgcgccactgcagtgagtgttgagggcacctctcctcccctcttacacctactcagatgaggcagcagcagacccatctcgcggcgggggttttgttctgttgccgcctaactttctcatcctcggtctctggaaagtcaggctgagaaatcctttcccaggccaggccgctgcggtacactggatggttctgaagctggcccattgaaagagcctcttaaggcagctgggacagaggcctggtggccctgctgggcagcccaactgctgggggagacgtttctgccaccctgggtgatgagcagcttttcccccctggctttctgggggaggagtgggcctccttagggagacaggtgaccctgggtgccacccctgccccgtgtgtgccccgggtgttctcagtggttgctgaaggcaggtagagggtgctgtccagtatcccccatgtgaaggtcacttcccttctcatggagtcagctgagcatcagctcagccctgccatgtccccactcaccctcctcgcctcctgtccggccctgggtttctagcggtgcctgaggcatcactctggcccattgacagatgagaggtctgaagccttcctggccacaggcatcactttctcctcctcctcatgccctgccttgtccttgtcgtgttgccatggggttctgagaggctgggagttcacagacctcagacacagctgagtccgacaaccattggggtggggctgcatcagtctccggagtggcccgccacctcctgaagcagggcctggcccacccaaggtgcctggggcaggcgggcaccgtcattcgctgccattggcttctcagatgtatttcaaggactaaagtgggctctaagatctaagatggcccggcgcggtggctcccgcctgtaatcccagcactttgggaggccgaggcgggcggatgagttgaggtcgggagtttgagtccccgtctctactaaaaatacaaaattagccggacaaggtggcgcatgcctataatcccaggtactcaggaggctgaggcaggagaatcacttgaacctgggaggcagaggttgcagtgagccaagattgtgccactgcactccagcctgagcaacaaaagcaaaactctatctttaaaaaaaaaaaaaaaaaaactaagatacccattctttctgcctttgcccaggatggaggctttgaagacaggtggtcacctggacctggggtaagggtgcgcagggaggccgggcttgggggcagcctgctgctatgtccttgctggcgcccatacctgttggactgcctgaactttgctactagcctgaacgacagtgccttggaaaggcaggctccatgcggcagcaacaggattgtcttcggtaccttaaatatgctccctgtgcttccccagggaggatctctgggagcagagggcggctgtagacatcacagctgaagaggtgacctcaggccctgggagcctcagctccctctgccctgtaccctaggcacgtggctccagcaagagccccaggcaggacaaagggagcaggcagcagctgcagaaacagccctagacaggtgctggcctcaaccctggcaggggagggggagcccagagtgatgtttctcctaaggccaaaccccaggggtgggtcatttgagaggagttccagctgttctggccacactgggctggtggggaaggagcggcggcctctttccttggagggtccctgattcctgaggatcctccccgagccaggcacgggggaccacagggctgccgtgagcacccaccctggttctccaggcccctctgtccagaggcagggcctgaacctcgggctcctgcctggaccagtgacagcattggggagagaagcactgggggtcttcagaccagccagcaaggggccgtgccagtgcccagagagcaggtcagacaacaggcaaccctgaggcagctggctccctctctctgccctgcagggcttgccgcagggcgtgaggctccccagccacagccccctcttacttgccttaaaactggagagaggaatctagtatttgcacttagcaaaatatttaaaaactgaaaaaaatgtgcatgatctgtcactttgtataaaaacaagaaacgattagttcattaaactttttctttaccttctggtagtaaaaatagataaaataattccgtttcaactactgtgtgtaaaaagcctgtatcatatgtaactgggacttttgtaaataaatgtttgtgcgctctgctccctcca

SEQ ID NO: 1576-1632 - skipped (57 entries)

SEQ ID NO: 1633 - DNA, 4901 bp, Homo sapiens
cgccgccattttcccagagcgagaggcagtgacactgagcgggcgcagggggccgagtcggagaccgtgccggagttcgggagcggcaacagagtgggcatagacactccgagcagcctcgccgtcgtctctgcgttcctgttgactgcctggctgccccctcccctactcctcggttcctggtgaagaggctgcgcgctgctgtttggggagggggtgtgtggagccgggtcctgtgtccgcagtggctgctgtcggggggtcgcctgttcgcggaggtgcggagagactccttgggggtcgagcacataacggggttcgggtgtctcgtgtgtgaacatcacaggtctattctggataagcaggttttgtgaagacatttattctttcttggacctcagatttaccagacatctcatgggtttgtggatgcacttagatgtttgcaatgagcactgtggctggcatgccccagtgttttggataccaatgcataggactccatagtaatcgaatttaccagaggcgaacgtcatgagcatagtgatcccattgggggttgatacagcagagacgtcatacttggaaatggctgcaggttcagaaccagaatccgtagaagctagccctgtggtagttgagaaatccaacagttatccccaccagttatataccagcagctcacatcattcacacagttacattggtttgccctatgcggaccataattatggtgctcgtcctcctccgacacctccggcttcccctcctccatcagtccttattagcaaaaatgaagtaggcatatttaccactcctaattttgatgaaacttccagtgctactacaatcagcacatctgaggatggaagttatggtactgatgtaaccaggtgcatatgtggttttacacatgatgatggatacatgatctgttgtgacaaatgcagcactctggagtctccttgaaccagaaccacagtctcccctcccccaaccctggttcagccaccaagaaaggcctcctcccctagagaagcgtttggcaacatattgactgcatggggattgataggcagcatattcctgatacatatctatgtgaacgttgtcagcctaggaatttggataaagagagggcagtgctactacaacgccggaaaagggaaaatatgtcagatggtgataccagtgcaactgagagtggtgatgaggttcctgtggaattatatactgcatttcagcatactccaacatcaattactttaactgcttcaagagtttccaaagttaatgataaaagaaggaaaaaaagcggggagaaagaacaacacatttcaaaatgtaaaaaggcatttcgtgaaggatctaggaagtcatcaagagttaagggttcagctccagagattgatccttcatctgatggttcaaattttggatgggagacaaagatcaaagcatggatggatcgatatgaagaagcaaataacaaccagtacagtgagggtgttcagagggaggcacaaagaatagctctgagattaggcaatggaaatgacaaaaaagagatgaataaatccgatttgaataccaacaatttgctcttcaaacctcctgtagagagccatatacaaaagaataagaaaattcttaaatctgcaaaagatttgcctcctgatgcacttatcattgaatacagagggaagtttatgctgagagaacagtttgaagcaaatgggtatttctttaaaagaccatacccttttgtgttattctactctaaatttcatgggctagaaatgtgtgttgatgcaaggacttttgggaatgaggctcgattcatcaggcggtcttgtacacccaatgcagaggtgaggcatgaaattcaagatggaaccatacatctttatatttattctatacacagtattccaaagggaactgaaattactattgcctttgattttgactatggaaattgtaagtacaaggtggactgtgcatgcctcaaagaaaacccagagtgccctgttctaaaacgtagttctgaatccatggaaaatatcaatagtggttatgagaccagacggaaaaaaggaaaaaaagacaaagatatttcaaaagaaaaagatacacaaaatcagaatattactttggattgtgaaggaacgaccaacaaaatgaagagcccagaaactaaacaaagaaagctttctccactgagactatcagtatcaaataatcagctgcctgccttgtgcttggctgtatgattttccctgatggctgggactcagatgaagtaaaacggatgtgtggagaaaagacagacaagtacactcttggggcttgctcagtccgctgggcatacatcctggctattattggaattttggatgccctgatcctctcatttctagcatttgtgcttggtaatcgacaagacagcttgatggcagaggaactgaaggcagaaaacaaagatgatggaaatgcttaaggcaaactaaggtagtgtgagaccacaccatttctgctaagccaatattctctagaatgagcacaaaacaaatcgaataacagctaaacaaatcgaataacagctaaacgaatcgaataacagcttttgtacatcaacatcaagaaggaatacgcctgagagagatcagagtatatagatgaatatgaacaagaatggaacattcacttgtcaacgcactttctaaatctagatcagcagagatgggagtgattttctggaaagagatgtgatcatggattaaacaccagctcattggaaactcattggatgagatcagaaaacgttcatgaaaaatcatattcaggaaataaggaagaggaatataaatgctctagagttaacatgtaaaatatatacgtactgaggtttgtaaactgtcctttttaaatcaaactgaaaacaaaaagctttaacctttcaacagaatttttaaaaaggcagttagttctaaattattcctatctcaatagccaagaggctgatcaagcgtcatttattgaggaagcatcttagaaaatgcctctgaatgttttcataggagccgtgacctttggttcttcatctctaccattcatttacttcactgtgtaattagttacaaccactcagttattaagagacgtaacgcttcaaactttttaccaagtctgtgttctgtttaatctgtccatacaagttattactgagaaagtgtttatgccatatactattactccatcaagctgtatattacaggaagtacatctttacatcataggttcccaagcaacatagatttccctatctttcaggaaacagcatcaaggaactctgaaaaatatagaaaaagttcattttcaccttggaagctcacgtgtaatattataggctactatcaaataaacactttttttctaattctccctagtatatgcataggaatttaatatactttataaataagtatctaaaatgtctcctacttttttcctatttctttgccatacatgttatcagaaatccatgtcttctatttcccttactgatgggcactcatttttatttttttaaaaatcattccattaaacatatttctaaataatagtaagtggtactaacaaaataaataataatttaatagccttagaaataaatgactgtatacttatacaggttgaaaaaaactcggtaggaataagttacctttttgtttactaatgttggtttcaaaaatactcagattcattttagttggctgacatctggaagtagttaacaactaaccagtggacttcaacaatcatttgctcccaggcttcccccatcatcaccctcaccacatatcctgctaatatccaacaacaaacaaatatttaatattgaaatagcccattgcctgagaatgaacacaagctaaaatacatgcaagggtacttaatggaagccaaaccatgttctatacctaaggagaaaacatggacatgtagaatgcttttattcatgtattcaaaatcagaacaaatcagtgtatatcactagaacatcagatggaggataacacaagaagtgatacagatcagggttcacttctcttaccctctctctgttaggaccacattcctattttagccaaatgtttctggtacgggccatcttttcaccataaatggcattatgtttcaaatggctaaaagcatattatgggtatgctcaaaggagtaaaacccaattcacagagatgtggcttttctaaagaaccaaattaagggaatacttagtatctacaactaaagtattagtcattctgaggattatttgttgctttaagtattagctccctactacatccataacaccctacttactaaatttaattacacacaacttttcaagaattcgtattttatttgaagggaggtacctgtctactttatctacaataaaaacaaagggtattggctttctctaatccatgcaaactacaaattccatcgggagtcctacatcactaacagtggtatgaacaaaactaagaaagtacttcctatccacatgtgaatgttttaaaaaagtttttgccataaaacctaagtgtaatttagcataccacagtgctctgaagatgggtcattgacgatgtaccatttgtatataggtaatacacatgtaaatcactaattgttaattaaatataagaagtaggtttttatctttttaaaaaaaaaacaaaaaaggtgactccctttctcattctgttctgttgtattgcgtccaaaagttgtgtgtaatttttttaaggtccaagaaatgtaaagaaatttgttggaatacctgaatttctgtaaaaaaataaaaataaaaataagattttgttacttaa

SEQ ID NO: 1634 - DNA, 677 bp, Homo sapiens; identical to SEQ ID NO: 634

SEQ ID NO: 1635 - DNA, 4690 bp, Homo sapiens
cgccgccattttcccagagcgagaggcagtgacactgagcgggcgcagggggccgagtcggagaccgtgccggagttcgggagcggcaacagagtgggcatagacactccgagcagcctcgccgtcgtctctgcgttcctgttgactgcctggctgccccctcccctactcctcggttcctggtgaagaggctgcgcgctgctgtttggggagggggtgtgtggagccgggtcctgtgtccgcagtggctgctgtcggggggtcgcctgttcgcggaggtgcggagagactccttgggggtcgagcacataacggggttcgggtgtctcgtgtgtgaacatcacagggtttgtggatgcacttagatgtttgcaatgagcactgtggctggcatgccccagtgttttggataccaatgcataggactccatagtaatcgaatttaccagaggcgaacgtcatgagcatagtgatcccattgggggttgatacagcagagacgtcatacttggaaatggctgcaggttcagaaccagaatccgtagaagctagccctgtggtagttgagaaatccaacagttatccccaccagttatataccagcagctcacatcattcacacagttacattggtttgccctatgcggaccataattatggtgctcgtcctcctccgacacctccggcttcccctcctccatcagtccttattagcaaaaatgaagtaggcatatttaccactcctaattttgatgaaacttccagtgctactacaatcagcacatctgaggatggaagttatggtactgatgtaaccaggtgcatatgtggttttacacatgatgatggatacatgatctgttgtgacaaatgcagcgtttggcaacatattgactgcatggggattgataggcagcatattcctgatacatatctatgtgaacgttgtcagcctaggaatttggataaagagagggcagtgctactacaacgccggaaaagggaaaatatgtcagatggtgataccagtgcaactgagagtggtgatgaggttcctgtggaattatatactgcatttcagcatactccaacatcaattactttaactgcttcaagagtttccaaagttaatgataaaagaaggaaaaaaagcggggagaaagaacaacacatttcaaaatgtaaaaaggcatttcgtgaaggatctaggaagtcatcaagagttaagggttcagctccagagattgatccttcatctgatggttcaaattttggatgggagacaaagatcaaagcatggatggatcgatatgaagaagcaaataacaaccagtacagtgagggtgttcagagggaggcacaaagaatagctctgagattaggcaatggaaatgacaaaaaagagatgaataaatccgatttgaataccaacaatttgctcttcaaacctcctgtagagagccatatacaaaagaataagaaaattcttaaatctgcaaaagatttgcctcctgatgcacttatcattgaatacagagggaagtttatgctgagagaacagtttgaagcaaatgggtatttctttaaaagaccatacccttttgtgttattctactctaaatttcatgggctagaaatgtgtgttgatgcaaggacttttgggaatgaggctcgattcatcaggcggtcttgtacacccaatgcagaggtgaggcatgaaattcaagatggaaccatacatctttatatttattctatacacagtattccaaagggaactgaaattactattgcctttgattttgactatggaaattgtaagtacaaggtggactgtgcatgcctcaaagaaaacccagagtgccctgttctaaaacgtagttctgaatccatggaaaatatcaatagtggttatgagaccagacggaaaaaaggaaaaaaagacaaagatatttcaaaagaaaaagatacacaaaatcagaatattactttggattgtgaaggaacgaccaacaaaatgaagagcccagaaactaaacaaagaaagctttctccactgagactatcagtatcaaataatcagctgcctgccttgtgcttggctgtatgattttccctgatggctgggactcagatgaagtaaaacggatgtgtggagaaaagacagacaagtacactcttggggcttgctcagtccgctgggcatacatcctggctattattggaattttggatgccctgatcctctcatttctagcatttgtgcttggtaatcgacaagacagcttgatggcagaggaactgaaggcagaaaacaaagttctgctaagccaatattctctagaatgagcacaaaacaaatcgaataacagctaaacaaatcgaataacagctaaacgaatcgaataacagcttttgtacatcaacatcaagaaggaatacgcctgagagagatcagagtatatagatgaatatgaacaagaatggaacattcacttgtcaacgcactttctaaatctagatcagcagagatgggagtgattttctggaaagagatgtgatcatggattaaacaccagctcattggaaactcattggatgagatcagaaaacgttcatgaaaaatcatattcaggaaataaggaagaggaatataaatgctctagagttaacatgtaaaatatatacgtactgaggtttgtaaactgtcctttttaaatcaaactgaaaacaaaaagctttaacctttcaacagaatttttaaaaaggcagttagttctaaattattcctatctcaatagccaagaggctgatcaagcgtcatttattgaggaagcatcttagaaaatgcctctgaatgttttcataggagccgtgacctttggttcttcatctctaccattcatttacttcactgtgtaattagttacaaccactcagttattaagagacgtaacgcttcaaactttttaccaagtctgtgttctgtttaatctgtccatacaagttattactgagaaagtgtttatgccatatactattactccatcaagctgtatattacaggaagtacatctttacatcataggttcccaagcaacatagatttccctatctttcaggaaacagcatcaaggaactctgaaaaatatagaaaaagttcattttcaccttggaagctcacgtgtaatattataggctactatcaaataaacactttttttctaattctccctagtatatgcataggaatttaatatactttataaataagtatctaaaatgtctcctacttttttcctatttctttgccatacatgttatcagaaatccatgtcttctatttcccttactgatgggcactcatttttatttttttaaaaatcattccattaaacatatttctaaataatagtaagtggtactaacaaaataaataataatttaatagccttagaaataaatgactgtatacttatacaggttgaaaaaaactcggtaggaataagttacctttttgtttactaatgttggtttcaaaaatactcagattcattttagttggctgacatctggaagtagttaacaactaaccagtggacttcaacaatcatttgctcccaggcttcccccatcatcaccctcaccacatatcctgctaatatccaacaacaaacaaatatttaatattgaaatagcccattgcctgagaatgaacacaagctaaaatacatgcaagggtacttaatggaagccaaaccatgttctatacctaaggagaaaacatggacatgtagaatgcttttattcatgtattcaaaatcagaacaaatcagtgtatatcactagaacatcagatggaggataacacaagaagtgatacagatcagggttcacttctcttaccctctctctgttaggaccacattcctattttagccaaatgtttctggtacgggccatcttttcaccataaatggcattatgtttcaaatggctaaaagcatattatgggtatgctcaaaggagtaaaacccaattcacagagatgtggcttttctaaagaaccaaattaagggaatacttagtatctacaactaaagtattagtcattctgaggattatttgttgctttaagtattagctccctactacatccataacaccctacttactaaatttaattacacacaacttttcaagaattcgtattttatttgaagggaggtacctgtctactttatctacaataaaaacaaagggtattggctttctctaatccatgcaaactacaaattccatcgggagtcctacatcactaacagtggtatgaacaaaactaagaaagtacttcctatccacatgtgaatgttttaaaaaagtttttgccataaaacctaagtgtaatttagcataccacagtgctctgaagatgggtcattgacgatgtaccatttgtatataggtaatacacatgtaaatcactaattgttaattaaatataagaagtaggtttttatctttttaaaaaaaaaacaaaaaaggtgactccctttctcattctgttctgttgtattgcgtccaaaagttgtgtgtaatttttttaaggtccaagaaatgtaaagaaatttgttggaatacctgaatttctgtaaaaaaataaaaataaaaataagattttgttacttaa

SEQ ID NO: 1636 - DNA, 4853 bp, Homo sapiens
cgccgccattttcccagagcgagaggcagtgacactgagcgggcgcagggggccgagtcggagaccgtgccggagttcgggagcggcaacagagtgggcatagacactccgagcagcctcgccgtcgtctctgcgttcctgttgactgcctggctgccccctcccctactcctcggttcctggtgaagaggctgcgcgctgctgtttggggagggggtgtgtggagccgggtcctgtgtccgcagtggctgctgtcggggggtcgcctgttcgcggaggtgcggagagactccttgggggtcgagcacataacggggttcgggtgtctcgtgtgtgaacatcacaggtctattctggataagcaggttttgtgaagacatttattctttcttggacctcagatttaccagacatctcatgggtttgtggatgcacttagatgtttgcaatgagcactgtggctggcatgccccagtgttttggataccaatgcataggactccatagtaatcgaatttaccagaggcgaacgtcatgagcatagtgatcccattgggggttgatacagcagagacgtcatacttggaaatggctgcaggttcagaaccagaatccgtagaagctagccctgtggtagttgagaaatccaacagttatccccaccagttatataccagcagctcacatcattcacacagttacattggtttgccctatgcggaccataattatggtgctcgtcctcctccgacacctccggcttcccctcctccatcagtccttattagcaaaaatgaagtaggcatatttaccactcctaattttgatgaaacttccagtgctactacaatcagcacatctgaggatggaagttatggtactgatgtaaccaggtgcatatgtggttttacacatgatgatggatacatgatctgttgtgacaaatgcagcactctggagtctccttgaaccagaaccacagtctcccctcccccaaccctggttcagccaccaagaaaggcctcctcccctagagaagcgtttggcaacatattgactgcatggggattgataggcagcatattcctgatacatatctatgtgaacgttgtcagcctaggaatttggataaagagagggcagtgctactacaacgccggaaaagggaaaatatgtcagatggtgataccagtgcaactgagagtggtgatgaggttcctgtggaattatatactgcatttcagcatactccaacatcaattactttaactgcttcaagagtttccaaagttaatgataaaagaaggaaaaaaagcggggagaaagaacaacacatttcaaaatgtaaaaaggcatttcgtgaaggatctaggaagtcatcaagagttaagggttcagctccagagattgatccttcatctgatggttcaaattttggatgggagacaaagatcaaagcatggatggatcgatatgaagaagcaaataacaaccagtacagtgagggtgttcagagggaggcacaaagaatagctctgagattaggcaatggaaatgacaaaaaagagatgaataaatccgatttgaataccaacaatttgctcttcaaacctcctgtagagagccatatacaaaagaataagaaaattcttaaatctgcaaaagatttgcctcctgatgcacttatcattgaatacagagggaagtttatgctgagagaacagtttgaagcaaatgggtatttctttaaaagaccatacccttttgtgttattctactctaaatttcatgggctagaaatgtgtgttgatgcaaggacttttgggaatgaggctcgattcatcaggcggtcttgtacacccaatgcagaggtgaggcatgaaattcaagatggaaccatacatctttatatttattctatacacagtattccaaagggaactgaaattactattgcctttgattttgactatggaaattgtaagtacaaggtggactgtgcatgcctcaaagaaaacccagagtgccctgttctaaaacgtagttctgaatccatggaaaatatcaatagtggttatgagaccagacggaaaaaaggaaaaaaagacaaagatatttcaaaagaaaaagatacacaaaatcagaatattactttggattgtgaaggaacgaccaacaaaatgaagagcccagaaactaaacaaagaaagctttctccactgagactatcagtatcaaataatcagctgcctgccttgtgcttggctgtatgattttccctgatggctgggactcagatgaagtaaaacggatgtgtggagaaaagacagacaagtacactcttggggcttgctcagtccgctgggcatacatcctggctattattggaattttggatgccctgatcctctcatttctagcatttgtgcttggtaatcgacaagacagcttgatggcagaggaactgaaggcagaaaacaaagttctgctaagccaatattctctagaatgagcacaaaacaaatcgaataacagctaaacaaatcgaataacagctaaacgaatcgaataacagcttttgtacatcaacatcaagaaggaatacgcctgagagagatcagagtatatagatgaatatgaacaagaatggaacattcacttgtcaacgcactttctaaatctagatcagcagagatgggagtgattttctggaaagagatgtgatcatggattaaacaccagctcattggaaactcattggatgagatcagaaaacgttcatgaaaaatcatattcaggaaataaggaagaggaatataaatgctctagagttaacatgtaaaatatatacgtactgaggtttgtaaactgtcctttttaaatcaaactgaaaacaaaaagctttaacctttcaacagaatttttaaaaaggcagttagttctaaattattcctatctcaatagccaagaggctgatcaagcgtcatttattgaggaagcatcttagaaaatgcctctgaatgttttcataggagccgtgacctttggttcttcatctctaccattcatttacttcactgtgtaattagttacaaccactcagttattaagagacgtaacgcttcaaactttttaccaagtctgtgttctgtttaatctgtccatacaagttattactgagaaagtgtttatgccatatactattactccatcaagctgtatattacaggaagtacatctttacatcataggttcccaagcaacatagatttccctatctttcaggaaacagcatcaaggaactctgaaaaatatagaaaaagttcattttcaccttggaagctcacgtgtaatattataggctactatcaaataaacactttttttctaattctccctagtatatgcataggaatttaatatactttataaataagtatctaaaatgtctcctacttttttcctatttctttgccatacatgttatcagaaatccatgtcttctatttcccttactgatgggcactcatttttatttttttaaaaatcattccattaaacatatttctaaataatagtaagtggtactaacaaaataaataataatttaatagccttagaaataaatgactgtatacttatacaggttgaaaaaaactcggtaggaataagttacctttttgtttactaatgttggtttcaaaaatactcagattcattttagttggctgacatctggaagtagttaacaactaaccagtggacttcaacaatcatttgctcccaggcttcccccatcatcaccctcaccacatatcctgctaatatccaacaacaaacaaatatttaatattgaaatagcccattgcctgagaatgaacacaagctaaaatacatgcaagggtacttaatggaagccaaaccatgttctatacctaaggagaaaacatggacatgtagaatgcttttattcatgtattcaaaatcagaacaaatcagtgtatatcactagaacatcagatggaggataacacaagaagtgatacagatcagggttcacttctcttaccctctctctgttaggaccacattcctattttagccaaatgtttctggtacgggccatcttttcaccataaatggcattatgtttcaaatggctaaaagcatattatgggtatgctcaaaggagtaaaacccaattcacagagatgtggcttttctaaagaaccaaattaagggaatacttagtatctacaactaaagtattagtcattctgaggattatttgttgctttaagtattagctccctactacatccataacaccctacttactaaatttaattacacacaacttttcaagaattcgtattttatttgaagggaggtacctgtctactttatctacaataaaaacaaagggtattggctttctctaatccatgcaaactacaaattccatcgggagtcctacatcactaacagtggtatgaacaaaactaagaaagtacttcctatccacatgtgaatgttttaaaaaagtttttgccataaaacctaagtgtaatttagcataccacagtgctctgaagatgggtcattgacgatgtaccatttgtatataggtaatacacatgtaaatcactaattgttaattaaatataagaagtaggtttttatctttttaaaaaaaaaacaaaaaaggtgactccctttctcattctgttctgttgtattgcgtccaaaagttgtgtgtaatttttttaaggtccaagaaatgtaaagaaatttgttggaatacctgaatttctgtaaaaaaataaaaataaaaataagattttgttacttaa

SEQ ID NO: 1637 - DNA, 665 bp, Homo sapiens; identical to SEQ ID NO: 637

SEQ ID NO: 1638 - DNA, 4738 bp, Homo sapiens
cgccgccattttcccagagcgagaggcagtgacactgagcgggcgcagggggccgagtcggagaccgtgccggagttcgggagcggcaacagagtgggcatagacactccgagcagcctcgccgtcgtctctgcgttcctgttgactgcctggctgccccctcccctactcctcggttcctggtgaagaggctgcgcgctgctgtttggggagggggtgtgtggagccgggtcctgtgtccgcagtggctgctgtcggggggtcgcctgttcgcggaggtgcggagagactccttgggggtcgagcacataacggggttcgggtgtctcgtgtgtgaacatcacagggtttgtggatgcacttagatgtttgcaatgagcactgtggctggcatgccccagtgttttggataccaatgcataggactccatagtaatcgaatttaccagaggcgaacgtcatgagcatagtgatcccattgggggttgatacagcagagacgtcatacttggaaatggctgcaggttcagaaccagaatccgtagaagctagccctgtggtagttgagaaatccaacagttatccccaccagttatataccagcagctcacatcattcacacagttacattggtttgccctatgcggaccataattatggtgctcgtcctcctccgacacctccggcttcccctcctccatcagtccttattagcaaaaatgaagtaggcatatttaccactcctaattttgatgaaacttccagtgctactacaatcagcacatctgaggatggaagttatggtactgatgtaaccaggtgcatatgtggttttacacatgatgatggatacatgatctgttgtgacaaatgcagcgtttggcaacatattgactgcatggggattgataggcagcatattcctgatacatatctatgtgaacgttgtcagcctaggaatttggataaagagagggcagtgctactacaacgccggaaaagggaaaatatgtcagatggtgataccagtgcaactgagagtggtgatgaggttcctgtggaattatatactgcatttcagcatactccaacatcaattactttaactgcttcaagagtttccaaagttaatgataaaagaaggaaaaaaagcggggagaaagaacaacacatttcaaaatgtaaaaaggcatttcgtgaaggatctaggaagtcatcaagagttaagggttcagctccagagattgatccttcatctgatggttcaaattttggatgggagacaaagatcaaagcatggatggatcgatatgaagaagcaaataacaaccagtacagtgagggtgttcagagggaggcacaaagaatagctctgagattaggcaatggaaatgacaaaaaagagatgaataaatccgatttgaataccaacaatttgctcttcaaacctcctgtagagagccatatacaaaagaataagaaaattcttaaatctgcaaaagatttgcctcctgatgcacttatcattgaatacagagggaagtttatgctgagagaacagtttgaagcaaatgggtatttctttaaaagaccatacccttttgtgttattctactctaaatttcatgggctagaaatgtgtgttgatgcaaggacttttgggaatgaggctcgattcatcaggcggtcttgtacacccaatgcagaggtgaggcatgaaattcaagatggaaccatacatctttatatttattctatacacagtattccaaagggaactgaaattactattgcctttgattttgactatggaaattgtaagtacaaggtggactgtgcatgcctcaaagaaaacccagagtgccctgttctaaaacgtagttctgaatccatggaaaatatcaatagtggttatgagaccagacggaaaaaaggaaaaaaagacaaagatatttcaaaagaaaaagatacacaaaatcagaatattactttggattgtgaaggaacgaccaacaaaatgaagagcccagaaactaaacaaagaaagctttctccactgagactatcagtatcaaataatcagctgcctgccttgtgcttggctgtatgattttccctgatggctgggactcagatgaagtaaaacggatgtgtggagaaaagacagacaagtacactcttggggcttgctcagtccgctgggcatacatcctggctattattggaattttggatgccctgatcctctcatttctagcatttgtgcttggtaatcgacaagacagcttgatggcagaggaactgaaggcagaaaacaaagatgatggaaatgcttaaggcaaactaaggtagtgtgagaccacaccatttctgctaagccaatattctctagaatgagcacaaaacaaatcgaataacagctaaacaaatcgaataacagctaaacgaatcgaataacagcttttgtacatcaacatcaagaaggaatacgcctgagagagatcagagtatatagatgaatatgaacaagaatggaacattcacttgtcaacgcactttctaaatctagatcagcagagatgggagtgattttctggaaagagatgtgatcatggattaaacaccagctcattggaaactcattggatgagatcagaaaacgttcatgaaaaatcatattcaggaaataaggaagaggaatataaatgctctagagttaacatgtaaaatatatacgtactgaggtttgtaaactgtcctttttaaatcaaactgaaaacaaaaagctttaacctttcaacagaatttttaaaaaggcagttagttctaaattattcctatctcaatagccaagaggctgatcaagcgtcatttattgaggaagcatcttagaaaatgcctctgaatgttttcataggagccgtgacctttggttcttcatctctaccattcatttacttcactgtgtaattagttacaaccactcagttattaagagacgtaacgcttcaaactttttaccaagtctgtgttctgtttaatctgtccatacaagttattactgagaaagtgtttatgccatatactattactccatcaagctgtatattacaggaagtacatctttacatcataggttcccaagcaacatagatttccctatctttcaggaaacagcatcaaggaactctgaaaaatatagaaaaagttcattttcaccttggaagctcacgtgtaatattataggctactatcaaataaacactttttttctaattctccctagtatatgcataggaatttaatatactttataaataagtatctaaaatgtctcctacttttttcctatttctttgccatacatgttatcagaaatccatgtcttctatttcccttactgatgggcactcatttttatttttttaaaaatcattccattaaacatatttctaaataatagtaagtggtactaacaaaataaataataatttaatagccttagaaataaatgactgtatacttatacaggttgaaaaaaactcggtaggaataagttacctttttgtttactaatgttggtttcaaaaatactcagattcattttagttggctgacatctggaagtagttaacaactaaccagtggacttcaacaatcatttgctcccaggcttcccccatcatcaccctcaccacatatcctgctaatatccaacaacaaacaaatatttaatattgaaatagcccattgcctgagaatgaacacaagctaaaatacatgcaagggtacttaatggaagccaaaccatgttctatacctaaggagaaaacatggacatgtagaatgcttttattcatgtattcaaaatcagaacaaatcagtgtatatcactagaacatcagatggaggataacacaagaagtgatacagatcagggttcacttctcttaccctctctctgttaggaccacattcctattttagccaaatgtttctggtacgggccatcttttcaccataaatggcattatgtttcaaatggctaaaagcatattatgggtatgctcaaaggagtaaaacccaattcacagagatgtggcttttctaaagaaccaaattaagggaatacttagtatctacaactaaagtattagtcattctgaggattatttgttgctttaagtattagctccctactacatccataacaccctacttactaaatttaattacacacaacttttcaagaattcgtattttatttgaagggaggtacctgtctactttatctacaataaaaacaaagggtattggctttctctaatccatgcaaactacaaattccatcgggagtcctacatcactaacagtggtatgaacaaaactaagaaagtacttcctatccacatgtgaatgttttaaaaaagtttttgccataaaacctaagtgtaatttagcataccacagtgctctgaagatgggtcattgacgatgtaccatttgtatataggtaatacacatgtaaatcactaattgttaattaaatataagaagtaggtttttatctttttaaaaaaaaaacaaaaaaggtgactccctttctcattctgttctgttgtattgcgtccaaaagttgtgtgtaatttttttaaggtccaagaaatgtaaagaaatttgttggaatacctgaatttctgtaaaaaaataaaaataaaaataagattttgttacttaa

SEQ ID NO: 1639-1640 - skipped (2 entries)

SEQ ID NO: 1641 - DNA, 2170 bp, Homo sapiens
atttgcctgaagacctggataatctccatttttgtcatggactgttaaaacgtttgaagttccaattctggtcttgatttcccagttaaagatgttcttcacccgaatgcagtctttcctgttggtaaaataagacaaccatcaacattgcctgtttgtctgcttttgaatctcttaaggatggatgtttgtaagatgttgcttaatacagtctggaatactctgtccatttgttgaattgtaaatgactttcaaatgtgcaagttctgttaaatacaaagagaacctctatgggtaacttttgtgttgaagaagtcatttgtcaaccatggtaaaacttgcaaacccactttatacagagtggattcttgaagctatacagaaaataaaaaagcaaaagcaaaggccctctgaagagagaatctgccatgcggtcagtacttcccatgggttggataagaagacagtctctgaacagctggaactcagtgttcaggatggctcagttctcaaagtcaccaacaaaggccttgcctcctataaggacccagacaaccctgggcgcttttcatcagttaaaccaggcacttttcctaagtcagccaaggggtctagaggatcatgtaatgatctccgcaatgtggattggaataaacttttaaggagagcaattgaaggacttgaggagccgaatggctcctccctgaagaacatagagaagtatctcagaagtcaaagtgatctcacaagcaccaccaacaacccagcctttcagcagcggctgcgactgggggccaaacgcgctgtgaataatgggaggttactgaaagacggaccgcagtacagggtcaattatgggagcttagatggcaaaggggcacctcagtatcccagtgcattcccatcctcgctcccacctgtcagccttctaccccatgagaaagaccaggaagctgccacttttgctagagagcaaggctttgagactaaagacattaaagagatagccaaaaagacacaagccctgccaaagatgaactcaaagaggcagcgaatcgtgatcttcacccaagggagagatgacactataatggctacagaaagtgaagtcactgcttttgctgtcttggatcaagaccagaaagaaattattgataccaatggagctggagatgcatttgttggaggttttctgtctcaactggtctctgacaagcctctgactgaatgtatccgtgctggccactatgcagcaagcatcataattagacggactggctgcacctttcctgagaagccagacttccactgatggaagagctgaaaacacaagcccaggagtgcagacactgccctaattgcttcctgagaattcccatattaataaagaagaaaattatctgccattttttcctactataataatgctgaatcttaatttagagggtacaagggtatggtaatgcttgtagaatctttattatctcaacaatctaaaaaatgatgtttatttccatagtttgatagtgccacttaaatgccaattaaacaagaatataacatttcaatagaaatttttatttcattttcaattactttgtaaattcgtgtgtatttagtacactgatttgtttttttacatttctgctttgaatgcagatgcaatttaatataatagattttttaatgaattaatcttaacatagtaatctttagctttttatacaaatatatttaatttaggagtatatgtgtgtctatacacacacatacataaatataccacatatacacctgatagtcaaataaggtacagaaattttatcttgtcaattatgccaaataatctctttaatgtgcactcaaacatgtaataaactttggataattaaataatgtgccaaatttaagttgtaccacaatattcaaatcatagtcttatggaactctgtaattggacacaaacaaaaacttgtcatataggaatttttttctgtcttttccctgtgtacagcaaactgaggaagaaagatcattatttaatactgggccctgaaatgacacccaatttgttaatggaattatgaagaacagcaatataatacactgaagaataacttagtatcagagaccaataaatcacttttttaaggatgacaaaatggtataa

SEQ ID NO: 1642 - DNA, 2506 bp, Homo sapiens
caacgacaacaacagggggacacaaaatggcggcggcttagctcctacccctggcggcggcggcagcggtggcggaggcgacggcacctcctccaggcggcagccgcagtttctcaggcagcggcagcgcccccggcaggcgcggtggcggtggcgcgcagccagatttgcctgaagacctggataatctccatttttgtcatggactgttaaaacgtttgaagttccaattctggtcttgatttcccagttaaagatgttcttcacccgaatgcagtctttcctgttggtaaaataagacaaccatcaacattgcctgtttgtctgcttttgaatctcttaaggatggatgtttgtaagatgttgcttaatacagtctggaatactctgtccatttgttgaattgtaaatgactttcaaatgtgcaagttctgttaaatacaaagagaacctctatgggtaacttttgtgttgaagaagtcatttgtcaaccatggtaaaacttgcaaacccactttatacagagtggattcttgaagctatacagaaaataaaaaagcaaaagcaaaggccctctgaagagagaatctgccatgcggtcagtacttcccatgggttggataagaagacagtctctgaacagctggaactcagtgttcaggatggctcagttctcaaagtcaccaacaaaggccttgcctcctataaggacccagacaaccctgggcgcttttcatcagttaaaccaggcacttttcctaagtcagccaaggggtctagaggatcatgtaatgatctccgcaatgtggattggaataaacttttaaggagagcaattgaaggacttgaggagccgaatggctcctccctgaagaacatagagaagtatctcagaagtcaaagtgatctcacaagcaccaccaacaacccagcctttcagcagcggctgcgactgggggccaaacgcgctgtgaataatgggaggttactgaaagacggaccgcagtacagggtcaattatgggagcttagatggcaaaggggcacctcagtatcccagtgcattcccatcctcgctcccacctgtcagccttctaccccatgagaaagaccagggcttttttcttacagtttccccagagtcagtattaaaggtggctcaccatgcttctgaaaacaacaggattttcactttgaatctatctgcaccgtttattagccagttctacaaggaatcattgatgaaagttatgccttatgttgatatactttttggaaatgagacagaagctgccacttttgctagagagcaaggctttgagactaaagacattaaagagatagccaaaaagacacaagccctgccaaagatgaactcaaagaggcagcgaatcgtgatcttcacccaagggagagatgacactataatggctacagaaagtgaagtcactgcttttgctgtcttggatcaagaccagaaagaaattattgataccaatggagctggagatgcatttgttggaggttttctgtctcaactggtctctgacaagcctctgactgaatgtatccgtgctggccactatgcagcaagcatcataattagacggactggctgcacctttcctgagaagccagacttccactgatggaagagctgaaaacacaagcccaggagtgcagacactgccctaattgcttcctgagaattcccatattaataaagaagaaaattatctgccattttttcctactataataatgctgaatcttaatttagagggtacaagggtatggtaatgcttgtagaatctttattatctcaacaatctaaaaaatgatgtttatttccatagtttgatagtgccacttaaatgccaattaaacaagaatataacatttcaatagaaatttttatttcattttcaattactttgtaaattcgtgtgtatttagtacactgatttgtttttttacatttctgctttgaatgcagatgcaatttaatataatagattttttaatgaattaatcttaacatagtaatctttagctttttatacaaatatatttaatttaggagtatatgtgtgtctatacacacacatacataaatataccacatatacacctgatagtcaaataaggtacagaaattttatcttgtcaattatgccaaataatctctttaatgtgcactcaaacatgtaataaactttggataattaaataatgtgccaaatttaagttgtaccacaatattcaaatcatagtcttatggaactctgtaattggacacaaacaaaaacttgtcatataggaatttttttctgtcttttccctgtgtacagcaaactgaggaagaaagatcattatttaatactgggccctgaaatgacacccaatttgttaatggaattatgaagaacagcaatataatacactgaagaataacttagtatcagagaccaataaatcacttttttaaggatgacaaaatggtataa

SEQ ID NO: 1643 - DNA, 1175 bp, Homo sapiens
cgggcgcgggcggccgagcggagccgagcgcagccgagccgggccgagccgggccgggccgggcccaggagcgcgcggatgatgcgggcggccaggcgggggtcgacgggtccctgaagcccgcgccccgggccagcaagggagccccgcgcaggccgcgcgcatccggaggcggccgggccccgccatggccggggtcagctacgcggcgccctggtgggtgagcctcctgcaccggctgccccacttcgacctgagctgggaggccactagcagccagttccggcccgaggacaccgactaccagcaggagcgggacggtatgcgggccatcctggggtcctacgacagcgagctgaccccggccgagtactcaccccagctgacgcggcgcatgcgggaggctgaggatatggtgcagaaggtgcacagccacagcgccgagatggaggctcagctgtcgcaggccctggaggagctgggaggccagaaacaaagagcagacatgctggagatggagctgaagatgctgaagtctcagtccagctctgccgaacagagcttcctgttctccagggaggaggcggacacgctcaggttgaaggtcgaggagctggaaggcgagcggagtcggctggaggaggaaaagaggatgctggaggcacagctggagcggcgagctctgcagggtgactatgaccagagcaggaccaaagtgctgcacatgagcctgaaccccaccagtgtggccaggcagcgcctgcgcgaggaccacagccagctgcaggcggagtgcgagcgactgcgcgggctcctgcgcgccatggagagaggaggcaccgtcccagccgaccttgaggctgccgccgcgagtctgccatcgtccaaggaggtggcagagctgaagaagcaggtggagagtgccgagctgaagaaccagcggctcaaggaggttttccagaccaagatccaggagttccgcaaggcctgctacacgctcaccggctaccagatcgacatcaccacggagaaccagtaccggctgacctcgctgtacgccgagcacccaggcgactgcctcatcttcaaggaagccgcactcagccacaagctgtgcggaaagctataggattatcaagatcaaaaggtcagccctccgcctcctctcctccacc

SEQ ID NO: 1644 - DNA, 747 bp, Homo sapiens
cgggcgcgggcggccgagcggagccgagcgcagccgagccgggccgagccgggccgggccgggcccaggagcgcgcggatgatgcgggcggccaggcgggggtcgacgggtccctgaagcccgcgccccgggccagcaagggagccccgcgcaggccgcgcgcatccggaggcggccgggccccgccatggccggggtcagctacgcggcgccctggtgggtgagcctcctgcaccggctgccccacttcgacctgagctgggaggccactagcagccagttccggcccgaggacaccgactaccagcaggccaccagcccctcgggttccaagatgcagctactggagacagagttctcacacaccgtgggcgagctcatcgaggtgcacctgcggcgccaggacagcatccctgccttcctcagctcgctcaccctcgagctcttcagccgccagaccgtggcgtagcctgcaggctcgggggcatagccggagccactctgcttggcctgacctgcaggtcccctgccccgccagccacaggctgggtgcacgtcctgcctctccagccccacagggcagcagcatgactgacagacacgctgggacctacgtcgggcttcctgctggggcggccagcaccctctccacgtgcagaccccatgcgtcccggagcctggtgtgtgggcgtcggccaccagcctgggttcctcaccttgtgaaataaaatcttctcccctagacac

SEQ ID NO: 1645 - DNA, 1403 bp, Homo sapiens
cgggcgcgggcggccgagcggagccgagcgcagccgagccgggccgagccgggccgggccgggcccaggagcgcgcggatgatgcgggcggccaggcgggggtcgacgggtccctgaagcccgcgccccgggccagcaagggagccccgcgcaggccgcgcgcatccggaggcggccgggccccgccatggccggggtcagctacgcggcgccctggtgggtgagcctcctgcaccggctgccccacttcgacctgagctgggaggccactagcagccagttccggcccgaggacaccgactaccagcagctggagatggagctgaagatgctgaagtctcagtccagctctgccgaacagagcttcctgttctccagggaggaggcggacacgctcaggttgaaggtcgaggagctggaaggcgagcggagtcggctggaggaggaaaagaggatgctggaggcacagctggagcggcgagctctgcagggtgactatgaccagagcaggaccaaagtgctgcacatgagcctgaaccccaccagtgtggccaggcagcgcctgcgcgaggaccacagccagctgcaggcggagtgcgagcgactgcgcgggctcctgcgcgccatggagagaggaggcaccgtcccagccgaccttgaggctgccgccgcgagtctgccatcgtccaaggaggtggcagagctgaagaagcaggtggagagtgccgagctgaagaaccagcggctcaaggaggttttccagaccaagatccaggagttccgcaaggcctgctacacgctcaccggctaccagatcgacatcaccacggagaaccagtaccggctgacctcgctgtacgccgagcacccaggcgactgcctcatcttcaaggtgggtcctgcgtgtgacggctctccggctgtctcgctctctgtctcctcctgtggggagatccgaccgtagccctcagcaaaggagcagcctcgcgtccaaaggggatggtgtggagggctgggcgggaaggaggtgcactggcccgtcctcgtcaccccctgaggcttctcagccttgggccaaccctatgtggctttgcagccctggacctcctgggtgcagaagaccctaggctgtccccctgactttctcagcctctgtctgtcgcaacttgggcttcgttccatgagggctgcggccgtaggcgtgtgtgtcagtgtgtccagaggcagtggtgcctggggaggactgaagtccgtgtggggccggggcaggggacgccttccaagatgccaggctgcgcagtgggacagcgcagtcccagaagccagcacagggcaaggtagacagactagaagaggaaaggagagccagccgcatctctacactcgcgtcctgcgagccagca

SEQ ID NO: 1646 - DNA, 1034 bp, Homo sapiens
cgggcgcgggcggccgagcggagccgagcgcagccgagccgggccgagccgggccgggccgggcccaggagcgcgcggatgatgcgggcggccaggcgggggtcgacgggtccctgaagcccgcgccccgggccagcaagggagccccgcgcaggccgcgcgcatccggaggcggccgggccccgccatggccggggtcagctacgcggcgccctggtgggtgagcctcctgcaccggctgccccacttcgacctgagctgggaggccactagcagccagttccggcccgaggacaccgactaccagcaggctcagctgtcgcaggccctggaggagctgggaggccagaaacaaagagcagacatgctggagatggagctgaagatgctgaagtctcagtccagctctgccgaacagagcttcctgttctccagggaggaggcggacacgctcaggttgaaggtcgaggagctggaaggcgagcggagtcggctggaggaggaaaagaggatgctggaggcacagctggagcggcgagctctgcagggtgactatgaccagagcaggaccaaagtgctgcacatgagcctgaaccccaccagtgtggccaggcagcgcctgcgcgaggaccacagccagctgcaggcggagtgcgagcgactgcgcgggctcctgcgcgccatggagagaggaggcaccgtcccagccgaccttgaggctgccgccgcgagtctgccatcgtccaaggaggtggcagagctgaagaagcaggtggagagtgccgagctgaagaaccagcggctcaaggaggttttccagaccaagatccaggagttccgcaaggcctgctacacgctcaccggctaccagatcgacatcaccacggagaaccagtaccggctgacctcgctgtacgccgagcacccaggcgactgcctcatcttcaaggaagccgcactcagccacaagctgtgcggaaagctataggattatcaagatcaaaaggtcagccctccgcctcctctcctccacc

SEQ ID NO: 1647 - DNA, 1329 bp, Homo sapiens
cgggcgcgggcggccgagcggagccgagcgcagccgagccgggccgagccgggccgggccgggcccaggagcgcgcggatgatgcgggcggccaggcgggggtcgacgggtccctgaagcccgcgccccgggccagcaagggagccccgcgcaggccgcgcgcatccggaggcggccgggccccgccatggccggggtcagctacgcggcgccctggtgggtgagcctcctgcaccggctgccccacttcgacctgagctgggaggccactagcagccagttccggcccgaggacaccgactaccagcagctggagatggagctgaagatgctgaagtctcagtccagctctgccgaacagagcttcctgttctccagggaggaggcggacacgctcaggttgaaggtcgaggagctggaaggcgagcggagtcggctggaggaggaaaagaggatgctggaggcacagctggagcggcgagctctgcagggtgactatgaccagagcaggaccaaagtgctgcacatgagcctgaaccccaccagtgtggccaggcagcgcctgcgcgaggaccacagccagctgcaggcggagtgcgagcgactgcgcgggctcctgcgcgccatggagagaggaggcaccgtcccagccgaccttgaggctgccgccgcgagtctgccatcgtccaaggaggtggcagagctgaagaagcaggtggagagtgccgagctgaagaaccagcggctcaaggaggttttccagaccaagatccaggagttccgcaaggcctgctacacgctcaccggctaccagatcgacatcaccacggagaaccagtaccggctgacctcgctgtacgccgagcacccaggcgactgcctcatcttcaaggccaccagcccctcgggttccaagatgcagctactggagacagagttctcacacaccgtgggcgagctcatcgaggtgcacctgcggcgccaggacagcatccctgccttcctcagctcgctcaccctcgagctcttcagccgccagaccgtggcgtagcctgcaggctcgggggcatagccggagccactctgcttggcctgacctgcaggtcccctgccccgccagccacaggctgggtgcacgtcctgcctctccagccccacagggcagcagcatgactgacagacacgctgggacctacgtcgggcttcctgctggggcggccagcaccctctccacgtgcagaccccatgcgtcccggagcctggtgtgtgggcgtcggccaccagcctgggttcctcaccttgtgaaataaaatcttctcccctagacac

SEQ ID NO: 1648 - DNA, 1386 bp, Homo sapiens
cgggcgcgggcggccgagcggagccgagcgcagccgagccgggccgagccgggccgggccgggcccaggagcgcgcggatgatgcgggcggccaggcgggggtcgacgggtccctgaagcccgcgccccgggccagcaagggagccccgcgcaggccgcgcgcatccggaggcggccgggccccgccatggccggggtcagctacgcggcgccctggtgggtgagcctcctgcaccggctgccccacttcgacctgagctgggaggccactagcagccagttccggcccgaggacaccgactaccagcaggctcagctgtcgcaggccctggaggagctgggaggccagaaacaaagagcagacatgctggagatggagctgaagatgctgaagtctcagtccagctctgccgaacagagcttcctgttctccagggaggaggcggacacgctcaggttgaaggtcgaggagctggaaggcgagcggagtcggctggaggaggaaaagaggatgctggaggcacagctggagcggcgagctctgcagggtgactatgaccagagcaggaccaaagtgctgcacatgagcctgaaccccaccagtgtggccaggcagcgcctgcgcgaggaccacagccagctgcaggcggagtgcgagcgactgcgcgggctcctgcgcgccatggagagaggaggcaccgtcccagccgaccttgaggctgccgccgcgagtctgccatcgtccaaggaggtggcagagctgaagaagcaggtggagagtgccgagctgaagaaccagcggctcaaggaggttttccagaccaagatccaggagttccgcaaggcctgctacacgctcaccggctaccagatcgacatcaccacggagaaccagtaccggctgacctcgctgtacgccgagcacccaggcgactgcctcatcttcaaggccaccagcccctcgggttccaagatgcagctactggagacagagttctcacacaccgtgggcgagctcatcgaggtgcacctgcggcgccaggacagcatccctgccttcctcagctcgctcaccctcgagctcttcagccgccagaccgtggcgtagcctgcaggctcgggggcatagccggagccactctgcttggcctgacctgcaggtcccctgccccgccagccacaggctgggtgcacgtcctgcctctccagccccacagggcagcagcatgactgacagacacgctgggacctacgtcgggcttcctgctggggcggccagcaccctctccacgtgcagaccccatgcgtcccggagcctggtgtgtgggcgtcggccaccagcctgggttcctcaccttgtgaaataaaatcttctcccctagacac

SEQ ID NO: 1649 - DNA, 797 bp, Homo sapiens
cgggcgcgggcggccgagcggagccgagcgcagccgagccgggccgagccgggccgggccgggcccaggagcgcgcggatgatgcgggcggccaggcgggggtcgacgggtccctgaagcccgcgccccgggccagcaagggagccccgcgcaggccgcgcgcatccggaggcggccgggccccgccatggccggggtcagctacgcggcgccctggtgggtgagcctcctgcaccggctgccccacttcgacctgagctgggaggccactagcagccagttccggcccgaggacaccgactaccagcagggtgactatgaccagagcaggaccaaagtgctgcacatgagcctgaaccccaccagtgtggccaggcagcgcctgcgcgaggaccacagccagctgcaggcggagtgcgagcgactgcgcgggctcctgcgcgccatggagagaggaggcaccgtcccagccgaccttgaggctgccgccgcgagtctgccatcgtccaaggaggtggcagagctgaagaagcaggtggagagtgccgagctgaagaaccagcggctcaaggaggttttccagaccaagatccaggagttccgcaaggcctgctacacgctcaccggctaccagatcgacatcaccacggagaaccagtaccggctgacctcgctgtacgccgagcacccaggcgactgcctcatcttcaaggaagccgcactcagccacaagctgtgcggaaagctataggattatcaagatcaaaaggtcagccctccgcctcctctcctccacc

SEQ ID NO: 1650 - DNA, 1431 bp, Homo sapiens
cgggcgcgggcggccgagcggagccgagcgcagccgagccgggccgagccgggccgggccgggcccaggagcgcgcggatgatgcgggcggccaggcgggggtcgacgggtccctgaagcccgcgccccgggccagcaagggagccccgcgcaggccgcgcgcatccggaggcggccgggccccgccatggccggggtcagctacgcggcgccctggtgggtgagcctcctgcaccggctgccccacttcgacctgagctgggaggccactagcagccagttccggcccgaggacaccgactaccagcaggccctgctgctcctgggggccgccgccctggcctgcctcgccctggacctcctcttcctgctcttctactccttctggctgtgctgccggcggcgcaagagcgaggagcacctggacgccgactgctgctgcacggcctggtgtgtcatcatcgccacgctggtgtgcagcgccggcatcgcagtgggattctacggcaacggggagaccagtgatggcatccatagggccacctactcgctccgccacgccaaccgcacggtggccggggtccaggaccgcggtgactatgaccagagcaggaccaaagtgctgcacatgagcctgaaccccaccagtgtggccaggcagcgcctgcgcgaggaccacagccagctgcaggcggagtgcgagcgactgcgcgggctcctgcgcgccatggagagaggaggcaccgtcccagccgaccttgaggctgccgccgcgagtctgccatcgtccaaggaggtggcagagctgaagaagcaggtggagagtgccgagctgaagaaccagcggctcaaggaggttttccagaccaagatccaggagttccgcaaggcctgctacacgctcaccggctaccagatcgacatcaccacggagaaccagtaccggctgacctcgctgtacgccgagcacccaggcgactgcctcatcttcaaggccaccagcccctcgggttccaagatgcagctactggagacagagttctcacacaccgtgggcgagctcatcgaggtgcacctgcggcgccaggacagcatccctgccttcctcagctcgctcaccctcgagctcttcagccgccagaccgtggcgtagcctgcaggctcgggggcatagccggagccactctgcttggcctgacctgcaggtcccctgccccgccagccacaggctgggtgcacgtcctgcctctccagccccacagggcagcagcatgactgacagacacgctgggacctacgtcgggcttcctgctggggcggccagcaccctctccacgtgcagaccccatgcgtcccggagcctggtgtgtgggcgtcggccaccagcctgggttcctcaccttgtgaaataaaatcttctcccctagacac

SEQ ID NO: 1651 - DNA, 1223 bp, Homo sapiens
cgggcgcgggcggccgagcggagccgagcgcagccgagccgggccgagccgggccgggccgggcccaggagcgcgcggatgatgcgggcggccaggcgggggtcgacgggtccctgaagcccgcgccccgggccagcaagggagccccgcgcaggccgcgcgcatccggaggcggccgggccccgccatggccggggtcagctacgcggcgccctggtgggtgagcctcctgcaccggctgccccacttcgacctgagctgggaggccactagcagccagttccggcccgaggacaccgactaccagcagggtgactatgaccagagcaggaccaaagtgctgcacatgagcctgaaccccaccagtgtggccaggcagcgcctgcgcgaggaccacagccagctgcaggcggagtgcgagcgactgcgcgggctcctgcgcgccatggagagaggaggcaccgtcccagccgaccttgaggctgccgccgcgagtctgccatcgtccaaggaggtggcagagctgaagaagcaggtggagagtgccgagctgaagaaccagcggctcaaggaggttttccagaccaagatccaggagttccgcaaggcctgctacacgctcaccggctaccagatcgacatcaccacggagaaccagtaccggctgacctcgctgtacgccgagcacccaggcgactgcctcatcttcaaggtgggtcctgcgtgtgacggctctccggctgtctcgctctctgtctcctcctgtggggagatccgaccgtagccctcagcaaaggagcagcctcgcgtccaaaggggatggtgtggagggctgggcgggaaggaggtgcactggcccgtcctcgtcaccccctgaggcttctcagccttgggccaaccctatgtggctttgcagccctggacctcctgggtgcagaagaccctaggctgtccccctgactttctcagcctctgtctgtcgcaacttgggcttcgttccatgagggctgcggccgtaggcgtgtgtgtcagtgtgtccagaggcagtggtgcctggggaggactgaagtccgtgtggggccggggcaggggacgccttccaagatgccaggctgcgcagtgggacagcgcagtcccagaagccagcacagggcaaggtagacagactagaagaggaaaggagagccagccgcatctctacactcgcgtcctgcgagccagca

SEQ ID NO: 1652 - DNA, 1149 bp, Homo sapiens
cgggcgcgggcggccgagcggagccgagcgcagccgagccgggccgagccgggccgggccgggcccaggagcgcgcggatgatgcgggcggccaggcgggggtcgacgggtccctgaagcccgcgccccgggccagcaagggagccccgcgcaggccgcgcgcatccggaggcggccgggccccgccatggccggggtcagctacgcggcgccctggtgggtgagcctcctgcaccggctgccccacttcgacctgagctgggaggccactagcagccagttccggcccgaggacaccgactaccagcagggtgactatgaccagagcaggaccaaagtgctgcacatgagcctgaaccccaccagtgtggccaggcagcgcctgcgcgaggaccacagccagctgcaggcggagtgcgagcgactgcgcgggctcctgcgcgccatggagagaggaggcaccgtcccagccgaccttgaggctgccgccgcgagtctgccatcgtccaaggaggtggcagagctgaagaagcaggtggagagtgccgagctgaagaaccagcggctcaaggaggttttccagaccaagatccaggagttccgcaaggcctgctacacgctcaccggctaccagatcgacatcaccacggagaaccagtaccggctgacctcgctgtacgccgagcacccaggcgactgcctcatcttcaaggccaccagcccctcgggttccaagatgcagctactggagacagagttctcacacaccgtgggcgagctcatcgaggtgcacctgcggcgccaggacagcatccctgccttcctcagctcgctcaccctcgagctcttcagccgccagaccgtggcgtagcctgcaggctcgggggcatagccggagccactctgcttggcctgacctgcaggtcccctgccccgccagccacaggctgggtgcacgtcctgcctctccagccccacagggcagcagcatgactgacagacacgctgggacctacgtcgggcttcctgctggggcggccagcaccctctccacgtgcagaccccatgcgtcccggagcctggtgtgtgggcgtcggccaccagcctgggttcctcaccttgtgaaataaaatcttctcccctagacac

SEQ ID NO: 1653 - DNA, 977 bp, Homo sapiens
cgggcgcgggcggccgagcggagccgagcgcagccgagccgggccgagccgggccgggccgggcccaggagcgcgcggatgatgcgggcggccaggcgggggtcgacgggtccctgaagcccgcgccccgggccagcaagggagccccgcgcaggccgcgcgcatccggaggcggccgggccccgccatggccggggtcagctacgcggcgccctggtgggtgagcctcctgcaccggctgccccacttcgacctgagctgggaggccactagcagccagttccggcccgaggacaccgactaccagcagctggagatggagctgaagatgctgaagtctcagtccagctctgccgaacagagcttcctgttctccagggaggaggcggacacgctcaggttgaaggtcgaggagctggaaggcgagcggagtcggctggaggaggaaaagaggatgctggaggcacagctggagcggcgagctctgcagggtgactatgaccagagcaggaccaaagtgctgcacatgagcctgaaccccaccagtgtggccaggcagcgcctgcgcgaggaccacagccagctgcaggcggagtgcgagcgactgcgcgggctcctgcgcgccatggagagaggaggcaccgtcccagccgaccttgaggctgccgccgcgagtctgccatcgtccaaggaggtggcagagctgaagaagcaggtggagagtgccgagctgaagaaccagcggctcaaggaggttttccagaccaagatccaggagttccgcaaggcctgctacacgctcaccggctaccagatcgacatcaccacggagaaccagtaccggctgacctcgctgtacgccgagcacccaggcgactgcctcatcttcaaggaagccgcactcagccacaagctgtgcggaaagctataggattatcaagatcaaaaggtcagccctccgcctcctctcctccacc

SEQ ID NO: 1654 - DNA, 1527 bp, Homo sapiens
cgggcgcgggcggccgagcggagccgagcgcagccgagccgggccgagccgggccgggccgggcccaggagcgcgcggatgatgcgggcggccaggcgggggtcgacgggtccctgaagcccgcgccccgggccagcaagggagccccgcgcaggccgcgcgcatccggaggcggccgggccccgccatggccggggtcagctacgcggcgccctggtgggtgagcctcctgcaccggctgccccacttcgacctgagctgggaggccactagcagccagttccggcccgaggacaccgactaccagcaggagcgggacggtatgcgggccatcctggggtcctacgacagcgagctgaccccggccgagtactcaccccagctgacgcggcgcatgcgggaggctgaggatatggtgcagaaggtgcacagccacagcgccgagatggaggctcagctgtcgcaggccctggaggagctgggaggccagaaacaaagagcagacatgctggagatggagctgaagatgctgaagtctcagtccagctctgccgaacagagcttcctgttctccagggaggaggcggacacgctcaggttgaaggtcgaggagctggaaggcgagcggagtcggctggaggaggaaaagaggatgctggaggcacagctggagcggcgagctctgcagggtgactatgaccagagcaggaccaaagtgctgcacatgagcctgaaccccaccagtgtggccaggcagcgcctgcgcgaggaccacagccagctgcaggcggagtgcgagcgactgcgcgggctcctgcgcgccatggagagaggaggcaccgtcccagccgaccttgaggctgccgccgcgagtctgccatcgtccaaggaggtggcagagctgaagaagcaggtggagagtgccgagctgaagaaccagcggctcaaggaggttttccagaccaagatccaggagttccgcaaggcctgctacacgctcaccggctaccagatcgacatcaccacggagaaccagtaccggctgacctcgctgtacgccgagcacccaggcgactgcctcatcttcaaggccaccagcccctcgggttccaagatgcagctactggagacagagttctcacacaccgtgggcgagctcatcgaggtgcacctgcggcgccaggacagcatccctgccttcctcagctcgctcaccctcgagctcttcagccgccagaccgtggcgtagcctgcaggctcgggggcatagccggagccactctgcttggcctgacctgcaggtcccctgccccgccagccacaggctgggtgcacgtcctgcctctccagccccacagggcagcagcatgactgacagacacgctgggacctacgtcgggcttcctgctggggcggccagcaccctctccacgtgcagaccccatgcgtcccggagcctggtgtgtgggcgtcggccaccagcctgggttcctcaccttgtgaaataaaatcttctcccctagacac

SEQ ID NO: 1655 - DNA, 1505 bp, Homo sapiens
cgggcgcgggcggccgagcggagccgagcgcagccgagccgggccgagccgggccgggccgggcccaggagcgcgcggatgatgcgggcggccaggcgggggtcgacgggtccctgaagcccgcgccccgggccagcaagggagccccgcgcaggccgcgcgcatccggaggcggccgggccccgccatggccggggtcagctacgcggcgccctggtgggtgagcctcctgcaccggctgccccacttcgacctgagctgggaggccactagcagccagttccggcccgaggacaccgactaccagcaggccctgctgctcctgggggccgccgccctggcctgcctcgccctggacctcctcttcctgctcttctactccttctggctgtgctgccggcggcgcaagagcgaggagcacctggacgccgactgctgctgcacggcctggtgtgtcatcatcgccacgctggtgtgcagcgccggcatcgcagtgggattctacggcaacggggagaccagtgatggcatccatagggccacctactcgctccgccacgccaaccgcacggtggccggggtccaggaccgcggtgactatgaccagagcaggaccaaagtgctgcacatgagcctgaaccccaccagtgtggccaggcagcgcctgcgcgaggaccacagccagctgcaggcggagtgcgagcgactgcgcgggctcctgcgcgccatggagagaggaggcaccgtcccagccgaccttgaggctgccgccgcgagtctgccatcgtccaaggaggtggcagagctgaagaagcaggtggagagtgccgagctgaagaaccagcggctcaaggaggttttccagaccaagatccaggagttccgcaaggcctgctacacgctcaccggctaccagatcgacatcaccacggagaaccagtaccggctgacctcgctgtacgccgagcacccaggcgactgcctcatcttcaaggtgggtcctgcgtgtgacggctctccggctgtctcgctctctgtctcctcctgtggggagatccgaccgtagccctcagcaaaggagcagcctcgcgtccaaaggggatggtgtggagggctgggcgggaaggaggtgcactggcccgtcctcgtcaccccctgaggcttctcagccttgggccaaccctatgtggctttgcagccctggacctcctgggtgcagaagaccctaggctgtccccctgactttctcagcctctgtctgtcgcaacttgggcttcgttccatgagggctgcggccgtaggcgtgtgtgtcagtgtgtccagaggcagtggtgcctggggaggactgaagtccgtgtggggccggggcaggggacgccttccaagatgccaggctgcgcagtgggacagcgcagtcccagaagccagcacagggcaaggtagacagactagaagaggaaaggagagccagccgcatctctacactcgcgtcctgcgagccagca

SEQ ID NO: 1656 - DNA, 1460 bp, Homo sapiens
cgggcgcgggcggccgagcggagccgagcgcagccgagccgggccgagccgggccgggccgggcccaggagcgcgcggatgatgcgggcggccaggcgggggtcgacgggtccctgaagcccgcgccccgggccagcaagggagccccgcgcaggccgcgcgcatccggaggcggccgggccccgccatggccggggtcagctacgcggcgccctggtgggtgagcctcctgcaccggctgccccacttcgacctgagctgggaggccactagcagccagttccggcccgaggacaccgactaccagcaggctcagctgtcgcaggccctggaggagctgggaggccagaaacaaagagcagacatgctggagatggagctgaagatgctgaagtctcagtccagctctgccgaacagagcttcctgttctccagggaggaggcggacacgctcaggttgaaggtcgaggagctggaaggcgagcggagtcggctggaggaggaaaagaggatgctggaggcacagctggagcggcgagctctgcagggtgactatgaccagagcaggaccaaagtgctgcacatgagcctgaaccccaccagtgtggccaggcagcgcctgcgcgaggaccacagccagctgcaggcggagtgcgagcgactgcgcgggctcctgcgcgccatggagagaggaggcaccgtcccagccgaccttgaggctgccgccgcgagtctgccatcgtccaaggaggtggcagagctgaagaagcaggtggagagtgccgagctgaagaaccagcggctcaaggaggttttccagaccaagatccaggagttccgcaaggcctgctacacgctcaccggctaccagatcgacatcaccacggagaaccagtaccggctgacctcgctgtacgccgagcacccaggcgactgcctcatcttcaaggtgggtcctgcgtgtgacggctctccggctgtctcgctctctgtctcctcctgtggggagatccgaccgtagccctcagcaaaggagcagcctcgcgtccaaaggggatggtgtggagggctgggcgggaaggaggtgcactggcccgtcctcgtcaccccctgaggcttctcagccttgggccaaccctatgtggctttgcagccctggacctcctgggtgcagaagaccctaggctgtccccctgactttctcagcctctgtctgtcgcaacttgggcttcgttccatgagggctgcggccgtaggcgtgtgtgtcagtgtgtccagaggcagtggtgcctggggaggactgaagtccgtgtggggccggggcaggggacgccttccaagatgccaggctgcgcagtgggacagcgcagtcccagaagccagcacagggcaaggtagacagactagaagaggaaaggagagccagccgcatctctacactcgcgtcctgcgagccagca

SEQ ID NO: 1657 - DNA, 1601 bp, Homo sapiens
cgggcgcgggcggccgagcggagccgagcgcagccgagccgggccgagccgggccgggccgggcccaggagcgcgcggatgatgcgggcggccaggcgggggtcgacgggtccctgaagcccgcgccccgggccagcaagggagccccgcgcaggccgcgcgcatccggaggcggccgggccccgccatggccggggtcagctacgcggcgccctggtgggtgagcctcctgcaccggctgccccacttcgacctgagctgggaggccactagcagccagttccggcccgaggacaccgactaccagcaggagcgggacggtatgcgggccatcctggggtcctacgacagcgagctgaccccggccgagtactcaccccagctgacgcggcgcatgcgggaggctgaggatatggtgcagaaggtgcacagccacagcgccgagatggaggctcagctgtcgcaggccctggaggagctgggaggccagaaacaaagagcagacatgctggagatggagctgaagatgctgaagtctcagtccagctctgccgaacagagcttcctgttctccagggaggaggcggacacgctcaggttgaaggtcgaggagctggaaggcgagcggagtcggctggaggaggaaaagaggatgctggaggcacagctggagcggcgagctctgcagggtgactatgaccagagcaggaccaaagtgctgcacatgagcctgaaccccaccagtgtggccaggcagcgcctgcgcgaggaccacagccagctgcaggcggagtgcgagcgactgcgcgggctcctgcgcgccatggagagaggaggcaccgtcccagccgaccttgaggctgccgccgcgagtctgccatcgtccaaggaggtggcagagctgaagaagcaggtggagagtgccgagctgaagaaccagcggctcaaggaggttttccagaccaagatccaggagttccgcaaggcctgctacacgctcaccggctaccagatcgacatcaccacggagaaccagtaccggctgacctcgctgtacgccgagcacccaggcgactgcctcatcttcaaggtgggtcctgcgtgtgacggctctccggctgtctcgctctctgtctcctcctgtggggagatccgaccgtagccctcagcaaaggagcagcctcgcgtccaaaggggatggtgtggagggctgggcgggaaggaggtgcactggcccgtcctcgtcaccccctgaggcttctcagccttgggccaaccctatgtggctttgcagccctggacctcctgggtgcagaagaccctaggctgtccccctgactttctcagcctctgtctgtcgcaacttgggcttcgttccatgagggctgcggccgtaggcgtgtgtgtcagtgtgtccagaggcagtggtgcctggggaggactgaagtccgtgtggggccggggcaggggacgccttccaagatgccaggctgcgcagtgggacagcgcagtcccagaagccagcacagggcaaggtagacagactagaagaggaaaggagagccagccgcatctctacactcgcgtcctgcgagccagca

SEQ ID NO: 1658 - DNA, 1079 bp, Homo sapiens
cgggcgcgggcggccgagcggagccgagcgcagccgagccgggccgagccgggccgggccgggcccaggagcgcgcggatgatgcgggcggccaggcgggggtcgacgggtccctgaagcccgcgccccgggccagcaagggagccccgcgcaggccgcgcgcatccggaggcggccgggccccgccatggccggggtcagctacgcggcgccctggtgggtgagcctcctgcaccggctgccccacttcgacctgagctgggaggccactagcagccagttccggcccgaggacaccgactaccagcaggccctgctgctcctgggggccgccgccctggcctgcctcgccctggacctcctcttcctgctcttctactccttctggctgtgctgccggcggcgcaagagcgaggagcacctggacgccgactgctgctgcacggcctggtgtgtcatcatcgccacgctggtgtgcagcgccggcatcgcagtgggattctacggcaacggggagaccagtgatggcatccatagggccacctactcgctccgccacgccaaccgcacggtggccggggtccaggaccgcggtgactatgaccagagcaggaccaaagtgctgcacatgagcctgaaccccaccagtgtggccaggcagcgcctgcgcgaggaccacagccagctgcaggcggagtgcgagcgactgcgcgggctcctgcgcgccatggagagaggaggcaccgtcccagccgaccttgaggctgccgccgcgagtctgccatcgtccaaggaggtggcagagctgaagaagcaggtggagagtgccgagctgaagaaccagcggctcaaggaggttttccagaccaagatccaggagttccgcaaggcctgctacacgctcaccggctaccagatcgacatcaccacggagaaccagtaccggctgacctcgctgtacgccgagcacccaggcgactgcctcatcttcaaggaagccgcactcagccacaagctgtgcggaaagctataggattatcaagatcaaaaggtcagccctccgcctcctctcctccacc

SEQ ID NO: 1659-1662 - skipped (4 entries)

SEQ ID NO: 1663 - DNA, 1304 bp, Homo sapiens
gaagtccaaactgtcgtcggggctggtgccgcgcgctgccgctgggcacccgcttcgcttcccgcgtcctgcctgactgcccgggtccccgcgggccttgggtcgctttcaggagtttagagaaagccaggtcttcacgttcgtgtaggttcgagaccttaacgaactgcagagcgcaacaaagggaactagagccccggcgccttcgcagccggagcggaagccggagttgtgggaggcccgcgtgccctccccgcccgtggggcccagacgcgcggggacaacccctcccctccacgcatcccgagtctctctctccctcccttgtcctagccatggaagggctggaggaggcagaggccaactgctccgtggcgttcgctgaggctcagagatgggtggaggcagtaacagagaagaattttgaaacaaaagattttcgagcctctctagaaaatggtgttctgctgtgtgatttgattaataagcttaaacctggcgtcattaagaagatcaatagactgtctacaccaatagcaggattgtttcttaaacaattaggtctacatcctaactggcaattcgttgatgtatatggaatggatcctgaactccttagcatggtaccaagaccagtctgtgcagtcttacttctctttcctattacagaaaagtatgaagtattcagaacagaagaggaagaaaaaataaaatctcagggacaagatgttacatcatcagtatatttcatgaagcaaacaatcagcaatgcctgtggaacaattggactgattcatgctattgcaaacaataaagacaagatgcactttgaatctggatcaaccttgaaaaaattcctggaggaatctgtgtcaatgagccctgaagaacgagccagatacctggagaactatgatgccatccgagttactcatgagaccagtgcccatgaaggtcagactgaggcaccaagtatagatgagaaagtagatcttcattttattgcattagttcatgtagatgggcatctctatgaattagatgggcggaagccatttccaattaaccatggtgaaactagtgatgaaactttattagaggatgccatagaagtttgcaagaagtttatggagcgcgaccctgatgaactaagatttaatgcgattgctctttctgcagcatagcttgtcaataatggaaacaccaaaaactgtattatttgcaactaaattttctctgccatacactaactcaaaaattttgatattttcattaacttgatgattaaactttatgtgagttaa

SEQ ID NO: 1664 - DNA, 1556 bp, Homo sapiens
gaagtccaaactgtcgtcggggctggtgccgcgcgctgccgctgggcacccgcttcgcttcccgcgtcctgcctgactgcccgggtccccgcgggccttgggtcgctttcaggagtttagagaaagccaggtcttcacgttcgtgtaggttcgagaccttaacgaactgcagagcgcaacaaagggaactagagccccggcgccttcgcagccggagcggaagccggagttgtgggaggcccgcgtgccctccccgcccgtggggcccagacgcgcggggacaacccctcccctccacgcatcccgagtctctctctccctcccttgtcctagccatggaagggctggaggaggcagaggccaactgctccgtggcgttcgctgaggctcagagatgggtggaggcagtaacagagaagaattttgaaacaaaagattttcgagcctctctagaaaatggtgttctgctgtgtgatttgattaataagcttaaacctggcgtcattaagaagatcaatagactgtctacaccaatagcaggattggataatataaacgttttcttgaaagcttgtgaacagattggattgaaagaagcccagcttttccatcctggagatctacaggatttatcaaatcgagtcactgtcaagcaagaagagactgacaggagagtgaaaaatgttttgataacattgtactggctgggaagaaaagcacaaagcaacccgtactataatggtccccatcttaatttgaaagcgtttgagaatcttttaggacaagcactgacgaagtttcttaaacaattaggtctacatcctaactggcaattcgttgatgtatatggaatggatcctgaactccttagcatggtaccaagaccagtctgtgcagtcttacttctctttcctattacagaaaagtatgaagtattcagaacagaagaggaagaaaaaataaaatctcagggacaagatgttacatcatcagtatatttcatgaagcaaacaatcagcaatgcctgtggaacaattggactgattcatgctattgcaaacaataaagacaagatgcactttgaatctggatcaaccttgaaaaaattcctggaggaatctgtgtcaatgagccctgaagaacgagccagatacctggagaactatgatgccatccgagttactcatgagaccagtgcccatgaaggtcagactgaggcaccaagtatagatgagaaagtagatcttcattttattgcattagttcatgtagatgggcatctctatgaattagatgggcggaagccatttccaattaaccatggtgaaactagtgatgaaactttattagaggatgccatagaagtttgcaagaagtttatggagcgcgaccctgatgaactaagatttaatgcgattgctctttctgcagcatagcttgtcaataatggaaacaccaaaaactgtattatttgcaactaaattttctctgccatacactaactcaaaaattttgatattttcattaacttgatgattaaactttatgtgagttaa

SEQ ID NO: 1665 - DNA, 2385 bp, Homo sapiens
ggaaagaagtggaataattaggaacctagggtggggtagggtagcaggacatttcaaacattaatgagcatatgagattccaggtcttgttaaaatgcaaattctgattcagctggtaggtgaggtctgagattgtgcatttctaacaagcactcagataatcttaaggctgttggccccagggtcacacttatagtgattttctagaacccagttggggaagtgaatcttgggcaggagaaatacacacctcttgcattgagtttggagatctcatctgatataactttttaagaaagaaaaataattttccaaatatccaattgataagctttcccactaagtggctttcccactaagtggctgcgttatgaaaattgcttcactttgaaacttctggtcttggtaatatagaatttctgtgttctcacagtgcttgattgagaatatgatattgagattatggcataaaatatagtggctgtacaaaaaaaaatacattattaggatctctaacaattatgtaaaagtcattgcttcatgggtagagctcaaactttggtgtgagacctggttttattcttggcacttactctgagttgtcttaggcaaattaataccttaagcaaaaatattctcatgtacattttacatgagaattataaatgaagtacataaagtccagcagtcacaaatgttatctattattaccatcgtcctaagactgcaatcagctatagtgaaagtagtctcaaagattgtttcataaatcatcagattcacctaattttctaaagaatttaaataaggagatggaatgaatagattgcattttgtttccatgcacaggggaactgtgcatatttcttctgtgactcggaaatggtttaacttttaaaaatcccaaaatagctgaagttagcagacatgcaatttaccaaggatgattggaatttttatctttcctgtaataatactatacccaagcacactgctcatgaggaaaacatttttatgtgaatcttttactcttgggggcaaagaatgctgtttttctttttgataactatgtttatagaatctaaatcaccctgagcaattatttcaacatctaaagttattattaccattcatgtttcatttatagctatttgaattttgatgaatttcaatatggtgctacagtgatagggcaagtgcaaataagttcaatatatgggtacggtctaaagctattttaatttttttattacaactgctatgaagaaaattaggatatgccatattttcacgttttacagttggatgtcctatgatgttctcttccagagaacagagctcggagctctggaaatttggaggcaactgatatgtgctcatgtctgcatctgtgtgggttggctgtatctcagggacagagtctgcagcaaaaaagatataattttgaggactgaacaaaattcaggaaggactattctcattaaggcagtaacagagaagaattttgaaacaaaagattttcgagcctctctagaaaatggtgttctgctgtgtgatttgattaataagcttaaacctggcgtcattaagaagatcaatagactgtctacaccaatagcaggattgtttcttaaacaattaggtctacatcctaactggcaattcgttgatgtatatggaatggatcctgaactccttagcatggtaccaagaccagtctgtgcagtcttacttctctttcctattacagaaaagtatgaagtattcagaacagaagaggaagaaaaaataaaatctcagggacaagatgttacatcatcagtatatttcatgaagcaaacaatcagcaatgcctgtggaacaattggactgattcatgctattgcaaacaataaagacaagatgcactttgaatctggatcaaccttgaaaaaattcctggaggaatctgtgtcaatgagccctgaagaacgagccagatacctggagaactatgatgccatccgagttactcatgagaccagtgcccatgaaggtcagactgaggcaccaagtatagatgagaaagtagatcttcattttattgcattagttcatgtagatgggcatctctatgaattagatgggcggaagccatttccaattaaccatggtgaaactagtgatgaaactttattagaggatgccatagaagtttgcaagaagtttatggagcgcgaccctgatgaactaagatttaatgcgattgctctttctgcagcatagcttgtcaataatggaaacaccaaaaactgtattatttgcaactaaattttctctgccatacactaactcaaaaattttgatattttcattaacttgatgattaaactttatgtgagttaa

SEQ ID NO: 1666 - DNA, 743 bp, Homo sapiens
gaagtccaaactgtcgtcggggctggtgccgcgcgctgccgctgggcacccgcttcgcttcccgcgtcctgcctgactgcccgggtccccgcgggccttgggtcgctttcaggagtttagagaaagccaggtcttcacgttcgtgtaggttcgagaccttaacgaactgcagagcgcaacaaagggaactagagccccggcgccttcgcagccggagcggaagccggagttgtgggaggcccgcgtgccctccccgcccgtggggcccagacgcgcggggacaacccctcccctccacgcatcccgagtctctctctccctcccttgtcctagccatggaagggctggaggaggcagaggccaactgctccgtggcgttcgctgaggctcagagatgggtggaggcaccaagtatagatgagaaagtagatcttcattttattgcattagttcatgtagatgggcatctctatgaattagatgggcggaagccatttccaattaaccatggtgaaactagtgatgaaactttattagaggatgccatagaagtttgcaagaagtttatggagcgcgaccctgatgaactaagatttaatgcgattgctctttctgcagcatagcttgtcaataatggaaacaccaaaaactgtattatttgcaactaaattttctctgccatacactaactcaaaaattttgatattttcattaacttgatgattaaactttatgtgagttaa

SEQ ID NO: 1667 - DNA, 2244 bp, Homo sapiens
ggaaagaagtggaataattaggaacctagggtggggtagggtagcaggacatttcaaacattaatgagcatatgagattccaggtcttgttaaaatgcaaattctgattcagctggtaggtgaggtctgagattgtgcatttctaacaagcactcagataatcttaaggctgttggccccagggtcacacttatagtgattttctagaacccagttggggaagtgaatcttgggcaggagaaatacacacctcttgcattgagtttggagatctcatctgatataactttttaagaaagaaaaataattttccaaatatccaattgataagctttcccactaagtggctttcccactaagtggctgcgttatgaaaattgcttcactttgaaacttctggtcttggtaatatagaatttctgtgttctcacagtgcttgattgagaatatgatattgagattatggcataaaatatagtggctgtacaaaaaaaaatacattattaggatctctaacaattatgtaaaagtcattgcttcatgggtagagctcaaactttggtgtgagacctggttttattcttggcacttactctgagttgtcttaggcaaattaataccttaagcaaaaatattctcatgtacattttacatgagaattataaatgaagtacataaagtccagcagtcacaaatgttatctattattaccatcgtcctaagactgcaatcagctatagtgaaagtagtctcaaagattgtttcataaatcatcagattcacctaattttctaaagaatttaaataaggagatggaatgaatagattgcattttgtttccatgcacaggggaactgtgcatatttcttctgtgactcggaaatggtttaacttttaaaaatcccaaaatagctgaagttagcagacatgcaatttaccaaggatgattggaatttttatctttcctgtaataatactatacccaagcacactgctcatgaggaaaacatttttatgtgaatcttttactcttgggggcaaagaatgctgtttttctttttgataactatgtttatagaatctaaatcaccctgagcaattatttcaacatctaaagttattattaccattcatgtttcatttatagctatttgaattttgatgaatttcaatatggtgctacagtgatagggcaagtgcaaataagttcaatatatgggtacggtctaaagctattttaatttttttattacaactgctatgaagaaaattaggatatgccatattttcacgttttacagttggatgtcctatgatgttctcttccagagaacagagctcggagctctggaaatttggaggcaactgatatgtgctcatgtctgcatctgtgtgggttggctgtatctcagggacagagtctgcagcaaaaaagatataattttgaggactgaacaaaattcaggaaggactattctcattaagtttcttaaacaattaggtctacatcctaactggcaattcgttgatgtatatggaatggatcctgaactccttagcatggtaccaagaccagtctgtgcagtcttacttctctttcctattacagaaaagtatgaagtattcagaacagaagaggaagaaaaaataaaatctcagggacaagatgttacatcatcagtatatttcatgaagcaaacaatcagcaatgcctgtggaacaattggactgattcatgctattgcaaacaataaagacaagatgcactttgaatctggatcaaccttgaaaaaattcctggaggaatctgtgtcaatgagccctgaagaacgagccagatacctggagaactatgatgccatccgagttactcatgagaccagtgcccatgaaggtcagactgaggcaccaagtatagatgagaaagtagatcttcattttattgcattagttcatgtagatgggcatctctatgaattagatgggcggaagccatttccaattaaccatggtgaaactagtgatgaaactttattagaggatgccatagaagtttgcaagaagtttatggagcgcgaccctgatgaactaagatttaatgcgattgctctttctgcagcatagcttgtcaataatggaaacaccaaaaactgtattatttgcaactaaattttctctgccatacactaactcaaaaattttgatattttcattaacttgatgattaaactttatgtgagttaa

SEQ ID NO: 1668 - DNA, 1123 bp, Homo sapiens
taagatagcacgactgtgtatgctctggaggactgaaaggctgtacaagccctatgtattttttttcaaatatacatatgcatgggtcttgctgctgcctcttttgctgactgataatataaacgttttcttgaaagcttgtgaacagattggattgaaagaagcccagcttttccatcctggagatctacaggatttatcaaatcgagtcactgtcaagcaagaagagactgacaggagagtgaaaaatgttttgataacattgtactggctgggaagaaaagcacaaagcaacccgtactataatggtccccatcttaatttgaaagcgtttgagaatcttttaggacaagcactgacgaagtttcttaaacaattaggtctacatcctaactggcaattcgttgatgtatatggaatggatcctgaactccttagcatggtaccaagaccagtctgtgcagtcttacttctctttcctattacagaaaagtatgaagtattcagaacagaagaggaagaaaaaataaaatctcagggacaagatgttacatcatcagtatatttcatgaagcaaacaatcagcaatgcctgtggaacaattggactgattcatgctattgcaaacaataaagacaagatgcactttgaatctggatcaaccttgaaaaaattcctggaggaatctgtgtcaatgagccctgaagaacgagccagatacctggagaactatgatgccatccgagttactcatgagaccagtgcccatgaaggtcagactgaggcaccaagtatagatgagaaagtagatcttcattttattgcattagttcatgtagatgggcatctctatgaattagatgggcggaagccatttccaattaaccatggtgaaactagtgatgaaactttattagaggatgccatagaagtttgcaagaagtttatggagcgcgaccctgatgaactaagatttaatgcgattgctctttctgcagcatagcttgtcaataatggaaacaccaaaaactgtattatttgcaactaaattttctctgccatacactaactcaaaaattttgatattttcattaacttgatgattaaactttatgtgagttaa

SEQ ID NO: 1669 - DNA, 2637 bp, Homo sapiens
ggaaagaagtggaataattaggaacctagggtggggtagggtagcaggacatttcaaacattaatgagcatatgagattccaggtcttgttaaaatgcaaattctgattcagctggtaggtgaggtctgagattgtgcatttctaacaagcactcagataatcttaaggctgttggccccagggtcacacttatagtgattttctagaacccagttggggaagtgaatcttgggcaggagaaatacacacctcttgcattgagtttggagatctcatctgatataactttttaagaaagaaaaataattttccaaatatccaattgataagctttcccactaagtggctttcccactaagtggctgcgttatgaaaattgcttcactttgaaacttctggtcttggtaatatagaatttctgtgttctcacagtgcttgattgagaatatgatattgagattatggcataaaatatagtggctgtacaaaaaaaaatacattattaggatctctaacaattatgtaaaagtcattgcttcatgggtagagctcaaactttggtgtgagacctggttttattcttggcacttactctgagttgtcttaggcaaattaataccttaagcaaaaatattctcatgtacattttacatgagaattataaatgaagtacataaagtccagcagtcacaaatgttatctattattaccatcgtcctaagactgcaatcagctatagtgaaagtagtctcaaagattgtttcataaatcatcagattcacctaattttctaaagaatttaaataaggagatggaatgaatagattgcattttgtttccatgcacaggggaactgtgcatatttcttctgtgactcggaaatggtttaacttttaaaaatcccaaaatagctgaagttagcagacatgcaatttaccaaggatgattggaatttttatctttcctgtaataatactatacccaagcacactgctcatgaggaaaacatttttatgtgaatcttttactcttgggggcaaagaatgctgtttttctttttgataactatgtttatagaatctaaatcaccctgagcaattatttcaacatctaaagttattattaccattcatgtttcatttatagctatttgaattttgatgaatttcaatatggtgctacagtgatagggcaagtgcaaataagttcaatatatgggtacggtctaaagctattttaatttttttattacaactgctatgaagaaaattaggatatgccatattttcacgttttacagttggatgtcctatgatgttctcttccagagaacagagctcggagctctggaaatttggaggcaactgatatgtgctcatgtctgcatctgtgtgggttggctgtatctcagggacagagtctgcagcaaaaaagatataattttgaggactgaacaaaattcaggaaggactattctcattaaggcagtaacagagaagaattttgaaacaaaagattttcgagcctctctagaaaatggtgttctgctgtgtgatttgattaataagcttaaacctggcgtcattaagaagatcaatagactgtctacaccaatagcaggattggataatataaacgttttcttgaaagcttgtgaacagattggattgaaagaagcccagcttttccatcctggagatctacaggatttatcaaatcgagtcactgtcaagcaagaagagactgacaggagagtgaaaaatgttttgataacattgtactggctgggaagaaaagcacaaagcaacccgtactataatggtccccatcttaatttgaaagcgtttgagaatcttttaggacaagcactgacgaagtttcttaaacaattaggtctacatcctaactggcaattcgttgatgtatatggaatggatcctgaactccttagcatggtaccaagaccagtctgtgcagtcttacttctctttcctattacagaaaagtatgaagtattcagaacagaagaggaagaaaaaataaaatctcagggacaagatgttacatcatcagtatatttcatgaagcaaacaatcagcaatgcctgtggaacaattggactgattcatgctattgcaaacaataaagacaagatgcactttgaatctggatcaaccttgaaaaaattcctggaggaatctgtgtcaatgagccctgaagaacgagccagatacctggagaactatgatgccatccgagttactcatgagaccagtgcccatgaaggtcagactgaggcaccaagtatagatgagaaagtagatcttcattttattgcattagttcatgtagatgggcatctctatgaattagatgggcggaagccatttccaattaaccatggtgaaactagtgatgaaactttattagaggatgccatagaagtttgcaagaagtttatggagcgcgaccctgatgaactaagatttaatgcgattgctctttctgcagcatagcttgtcaataatggaaacaccaaaaactgtattatttgcaactaaattttctctgccatacactaactcaaaaattttgatattttcattaacttgatgattaaactttatgtgagttaa

SEQ ID NO: 1670 - DNA, 1163 bp, Homo sapiens
gaagtccaaactgtcgtcggggctggtgccgcgcgctgccgctgggcacccgcttcgcttcccgcgtcctgcctgactgcccgggtccccgcgggccttgggtcgctttcaggagtttagagaaagccaggtcttcacgttcgtgtaggttcgagaccttaacgaactgcagagcgcaacaaagggaactagagccccggcgccttcgcagccggagcggaagccggagttgtgggaggcccgcgtgccctccccgcccgtggggcccagacgcgcggggacaacccctcccctccacgcatcccgagtctctctctccctcccttgtcctagccatggaagggctggaggaggcagaggccaactgctccgtggcgttcgctgaggctcagagatgggtggagtttcttaaacaattaggtctacatcctaactggcaattcgttgatgtatatggaatggatcctgaactccttagcatggtaccaagaccagtctgtgcagtcttacttctctttcctattacagaaaagtatgaagtattcagaacagaagaggaagaaaaaataaaatctcagggacaagatgttacatcatcagtatatttcatgaagcaaacaatcagcaatgcctgtggaacaattggactgattcatgctattgcaaacaataaagacaagatgcactttgaatctggatcaaccttgaaaaaattcctggaggaatctgtgtcaatgagccctgaagaacgagccagatacctggagaactatgatgccatccgagttactcatgagaccagtgcccatgaaggtcagactgaggcaccaagtatagatgagaaagtagatcttcattttattgcattagttcatgtagatgggcatctctatgaattagatgggcggaagccatttccaattaaccatggtgaaactagtgatgaaactttattagaggatgccatagaagtttgcaagaagtttatggagcgcgaccctgatgaactaagatttaatgcgattgctctttctgcagcatagcttgtcaataatggaaacaccaaaaactgtattatttgcaactaaattttctctgccatacactaactcaaaaattttgatattttcattaacttgatgattaaactttatgtgagttaa

SEQ ID NO: 1671 - DNA, 436 bp, Homo sapiens
cccctcccttagcgggggcgcgcggcgctgaggaccgcacggaaacggggaagtcaggtggccgctgccgccgccgccgccgcggtttgtcgccagaaggaagatggcggatctggaggagcagttgtctgatgaagagaaggttttcccaaatagtgcaccccttgaaggagggacaaggctgaccatatgtggctgggactttggatttcggaggaataataaatttgatttaaagaaaactagagttctccttggaaatgagagctgcaccttgactttaagtgagagcacgatgaatacattgaaatgcacagttggtcctgccatgaataagcatttcaatatgtccataattatttcaaatggccacgggacaacacaatacagtacattctcctatgtggtaaggaagattctatcctatcatgtttga

SEQ ID NO: 1672 - DNA, 312 bp, Homo sapiens
cccctcccttagcgggggcgcgcggcgctgaggaccgcacggaaacggggaagtcaggtggccgctgccgccgccgccgccgcggtttgtcgccagaaggaagatggcggatctggaggagcagttgtctgatgaagagaaggttttcccaaatagtgcaccccttgaaggagggacaaggctgaccatatgtggctgggactttggatttcggaggaataataaatttgatttaaagaaaactagagttctccttggaaatgagagctgcaccttgactttaagtgagagcacgatgaatacgtaaggatc

SEQ ID NO: 1673 - DNA, 3613 bp, Homo sapiens
cccctcccttagcgggggcgcgcggcgctgaggaccgcacggaaacggggaagtcaggtggccgctgccgccgccgccgccgcggtttgtcgccagaaggaagatggcggatctggaggagcagttgtctgatgaagagaaggtgcgtatagcagcaaaattcatcattcatgcccctcctggagaatttaatgaggttttcaatgatcagtttcctaattcatctcagaacggttcatgccgacaagtgcagtatcctctgacagacatgtcccccatcctaactagtggggactctgatatatccagtccattactgcaaaatactgtccacattgacctcagtgctctaaatccagagctggtccaggcagtgcagcatgtagtgattgggcccagtagcctgattgtgcatttcaatgaagtcataggaagagggcattttggttgtgtatatcatgggactttgttggacaatgatggcaagaaaattcactgtgctgtgaaatccttgaacagaatcactgacataggagaagtttcccaatttctgaccgagggaatcatcatgaaagattttagtcatcccaatgtcctctcgctcctgggaatctgcctgcgaagtgaagggtctccgctggtggtcctaccatacatgaaacatggagatcttcgaaatttcattcgaaatgagactcataatccaactgtaaaagatcttattggctttggtcttcaagtagccaaaggcatgaaatatcttgcaagcaaaaagtttgtccacagagacttggctgcaagaaactgtatgctggatgaaaaattcacagtcaaggttgctgattttggtcttgccagagacatgtatgataaagaatactatagtgtacacaacaaaacaggtgcaaagctgccagtgaagtggatggctttggaaagtctgcaaactcaaaagtttaccaccaagtcagatgtgtggtcctttggcgtgctcctctgggagctgatgacaagaggagccccaccttatcctgacgtaaacacctttgatataactgtttacttgttgcaagggagaagactcctacaacccgaatactgcccagaccccttatatgaagtaatgctaaaatgctggcaccctaaagccgaaatgcgcccatccttttctgaactggtgtcccggatatcagcgatcttctctactttcattggggagcactatgtccatgtgaacgctacttatgtgaacgtaaaatgtgtcgctccgtatccttctctgttgtcatcagaagataacgctgatgatgaggtggacacacgaccagcctccttctgggagacatcatagtgctagtactatgtcaaagcaacagtccacactttgtccaatggttttttcactgcctgacctttaaaaggccatcgatattctttgctcttgccaaaattgcactattataggacttgtattgttatttaaattactggattctaaggaatttcttatctgacagagcatcagaaccagaggcttggtcccacaggccacggaccaatggcctgcagccgtgacaacactcctgtcatattggagtccaaaacttgaattctgggttgaattttttaaaaatcaggtaccacttgatttcatatgggaaattgaagcaggaaatattgagggcttcttgatcacagaaaactcagaagagatagtaatgctcaggacaggagcggcagccccagaacaggccactcatttagaattctagtgtttcaaaacacttttgtgtgttgtatggtcaataacatttttcattactgatggtgtcattcacccattaggtaaacattcccttttaaatgtttgtttgttttttgagacaggatctcactctgttgccagggctgtagtgcagtggtgtgatcatagctcactgcaacctccacctcccaggctcaagcctcccgaatagctgggactacaggcgcacaccaccatccccggctaatttttgtattttttgtagagacggggttttgccatgttgccaaggctggtttcaaactcctggactcaagaaatccacccacctcagcctcccaaagtgctaggattacaggcatgagccactgcgcccagcccttataaatttttgtatagacattcctttggttggaagaatatttataggcaatacagtcaaagtttcaaaatagcatcacacaaaacatgtttataaatgaacaggatgtaatgtacatagatgacattaagaaaatttgtatgaaataatttagtcatcatgaaatatttagttgtcatataaaaacccactgtttgagaatgatgctactctgatctaatgaatgtgaacatgtagatgttttgtgtgtatttttttaaatgaaaactcaaaataagacaagtaatttgttgataaatatttttaaagataactcagcatgtttgtaaagcaggatacattttactaaaaggttcattggttccaatcacagctcataggtagagcaaagaaagggtggatggattgaaaagattagcctctgtctcggtggcaggttcccacctcgcaagcaattggaaacaaaacttttggggagttttattttgcattagggtgtgttttatgttaagcaaaacatactttagaaacaaatgaaaaaggcaattgaaaatcccagctatttcacctagatggaatagccaccctgagcagaactttgtgatgcttcattctgtggaattttgtgcttgctactgtatagtgcatgtggtgtaggttactctaactggttttgtcgacgtaaacatttaaagtgttatattttttataaaaatgtttatttttaatgatatgagaaaaattttgttaggccacaaaaacactgcactgtgaacattttagaaaaggtatgtcagactgggattaatgacagcatgattttcaatgactgtaaattgcgataaggaaatgtactgattgccaatacaccccaccctcattacatcatcaggacttgaagccaagggttaacccagcaagctacaaagagggtgtgtcacactgaaactcaatagttgagtttggctgttgttgcaggaaaatgattataactaaaagctctctgatagtgcagagacttaccagaagacacaaggaattgtactgaagagctattacaatccaaatattgccgtttcataaatgtaataagtaatactaattcacagagtattgtaaatggtggatgacaaaagaaaatctgctctgtggaaagaaagaactgtctctaccagggtcaagagcatgaacgcatcaatagaaagaactcggggaaacatcccatcaacaggactacacacttgtatatacattcttgagaacactgcaatgtgaaaatcacgtttgctatttataaacttgtccttagattaatgtgtctggacagattgtgggagtaagtgattcttctaagaattagatacttgtcactgcctatacctgcagctgaactgaatggtacttcgtatgttaatagttgttctgataaatcatgcaattaaagtaaagtgatgcaacatcttgta

SEQ ID NO: 1674 - DNA, 407 bp, Homo sapiens
cccctcccttagcgggggcgcgcggcgctgaggaccgcacggaaacggggaagtcaggtggccgctgccgccgccgccgccgcggtttgtcgccagaaggaagatggcggatctggaggagcagttgtctgatgaagagaagggaaatgatattgaccctgaagcagttaaaggtgaagtgttaaaagttggaaataagagctgtgagaatatacacttacattctgaagccgttttatgcacggtccccaatgacctgctgaaattgaacagcgagctaaatatagaggtgggattcctgcattcctctcatgatgtaaataaggaagccagtgtaattatgttattctcaggcttaaaataaatcattaaagctcatttatgtgtgggttttggctcatcaactc

SEQ ID NO: 1675 - DNA, 4876 bp, Homo sapiens
cccctcccttagcgggggcgcgcggcgctgaggaccgcacggaaacggggaagtcaggtggccgctgccgccgccgccgccgcggtttgtcgccagaaggaagatggcggatctggaggagcagttgtctgatgaagagaaggttttcccaaatagtgcaccccttgaaggagggacaaggctgaccatatgtggctgggactttggatttcggaggaataataaatttgatttaaagaaaactagagttctccttggaaatgagagctgcaccttgactttaagtgagagcacgatgaatacattgaaatgcacagttggtcctgccatgaataagcatttcaatatgtccataattatttcaaatggccacgggacaacacaatacagtacattctcctatgtggatcctgtaataacaagtatttcgccgaaatacggtcctatggctggtggcactttacttactttaactggaaattacctaaacagtgggaattctagacacatttcaattggtggaaaaacatgtactttaaaaagtgtgtcaaacagtattcttgaatgttataccccagcccaaaccatttcaactgagtttgctgttaaattgaaaattgacttagccaaccgagagacaagcatcttcagttaccgtgaagatcccattgtctatgaaattcatccaaccaaatcttttattagtggtgggagcacaataacaggtgttgggaaaaacctgaattcagttagtgtcccgagaatggtcataaatgtgcatgaagcaggaaggaactttacagtggcatgtcaacatcgctctaattcagagataatctgttgtaccactccttccctgcaacagctgaatctgcaactccccctgaaaaccaaagcctttttcatgttagatgggatcctttccaaatactttgatctcatttatgtacataatcctgtgtttaagccttttgaaaagccagtgatgatctcaatgggcaatgaaaatgtactggaaattaagggaaatgatattgaccctgaagcagttaaaggtgaagtgttaaaagttggaaataagagctgtgagaatatacacttacattctgaagccgttttatgcacggtccccaatgacctgctgaaattgaacagcgagctaaatatagagtggaagcaagcaatttcttcaaccgtccttggaaaagtaatagttcaaccagatcagaatttcacaggattgattgctggtgttgtctcaatatcaacagcactgttattactacttgggtttttcctgtggctgaaaaagagaaagcaaattaaagatctgggcagtgaattagttcgctacgatgcaagagtacacactcctcatttggataggcttgtaagtgcccgaagtgtaagcccaactacagaaatggtttcaaatgaatctgtagactaccgagctacttttccagaagatcagtttcctaattcatctcagaacggttcatgccgacaagtgcagtatcctctgacagacatgtcccccatcctaactagtggggactctgatatatccagtccattactgcaaaatactgtccacattgacctcagtgctctaaatccagagctggtccaggcagtgcagcatgtagtgattgggcccagtagcctgattgtgcatttcaatgaagtcataggaagagggcattttggttgtgtatatcatgggactttgttggacaatgatggcaagaaaattcactgtgctgtgaaatccttgaacagaatcactgacataggagaagtttcccaatttctgaccgagggaatcatcatgaaagattttagtcatcccaatgtcctctcgctcctgggaatctgcctgcgaagtgaagggtctccgctggtggtcctaccatacatgaaacatggagatcttcgaaatttcattcgaaatgagactcataatccaactgtaaaagatcttattggctttggtcttcaagtagccaaaggcatgaaatatcttgcaagcaaaaagtttgtccacagagacttggctgcaagaaactgtatgctggatgaaaaattcacagtcaaggttgctgattttggtcttgccagagacatgtatgataaagaatactatagtgtacacaacaaaacaggtgcaaagctgccagtgaagtggatggctttggaaagtctgcaaactcaaaagtttaccaccaagtcagatgtgtggtcctttggcgtgctcctctgggagctgatgacaagaggagccccaccttatcctgacgtaaacacctttgatataactgtttacttgttgcaagggagaagactcctacaacccgaatactgcccagaccccttatatgaagtaatgctaaaatgctggcaccctaaagccgaaatgcgcccatccttttctgaactggtgtcccggatatcagcgatcttctctactttcattggggagcactatgtccatgtgaacgctacttatgtgaacgtaaaatgtgtcgctccgtatccttctctgttgtcatcagaagataacgctgatgatgaggtggacacacgaccagcctccttctgggagacatcatagtgctagtactatgtcaaagcaacagtccacactttgtccaatggttttttcactgcctgacctttaaaaggccatcgatattctttgctcttgccaaaattgcactattataggacttgtattgttatttaaattactggattctaaggaatttcttatctgacagagcatcagaaccagaggcttggtcccacaggccacggaccaatggcctgcagccgtgacaacactcctgtcatattggagtccaaaacttgaattctgggttgaattttttaaaaatcaggtaccacttgatttcatatgggaaattgaagcaggaaatattgagggcttcttgatcacagaaaactcagaagagatagtaatgctcaggacaggagcggcagccccagaacaggccactcatttagaattctagtgtttcaaaacacttttgtgtgttgtatggtcaataacatttttcattactgatggtgtcattcacccattaggtaaacattcccttttaaatgtttgtttgttttttgagacaggatctcactctgttgccagggctgtagtgcagtggtgtgatcatagctcactgcaacctccacctcccaggctcaagcctcccgaatagctgggactacaggcgcacaccaccatccccggctaatttttgtattttttgtagagacggggttttgccatgttgccaaggctggtttcaaactcctggactcaagaaatccacccacctcagcctcccaaagtgctaggattacaggcatgagccactgcgcccagcccttataaatttttgtatagacattcctttggttggaagaatatttataggcaatacagtcaaagtttcaaaatagcatcacacaaaacatgtttataaatgaacaggatgtaatgtacatagatgacattaagaaaatttgtatgaaataatttagtcatcatgaaatatttagttgtcatataaaaacccactgtttgagaatgatgctactctgatctaatgaatgtgaacatgtagatgttttgtgtgtatttttttaaatgaaaactcaaaataagacaagtaatttgttgataaatatttttaaagataactcagcatgtttgtaaagcaggatacattttactaaaaggttcattggttccaatcacagctcataggtagagcaaagaaagggtggatggattgaaaagattagcctctgtctcggtggcaggttcccacctcgcaagcaattggaaacaaaacttttggggagttttattttgcattagggtgtgttttatgttaagcaaaacatactttagaaacaaatgaaaaaggcaattgaaaatcccagctatttcacctagatggaatagccaccctgagcagaactttgtgatgcttcattctgtggaattttgtgcttgctactgtatagtgcatgtggtgtaggttactctaactggttttgtcgacgtaaacatttaaagtgttatattttttataaaaatgtttatttttaatgatatgagaaaaattttgttaggccacaaaaacactgcactgtgaacattttagaaaaggtatgtcagactgggattaatgacagcatgattttcaatgactgtaaattgcgataaggaaatgtactgattgccaatacaccccaccctcattacatcatcaggacttgaagccaagggttaacccagcaagctacaaagagggtgtgtcacactgaaactcaatagttgagtttggctgttgttgcaggaaaatgattataactaaaagctctctgatagtgcagagacttaccagaagacacaaggaattgtactgaagagctattacaatccaaatattgccgtttcataaatgtaataagtaatactaattcacagagtattgtaaatggtggatgacaaaagaaaatctgctctgtggaaagaaagaactgtctctaccagggtcaagagcatgaacgcatcaatagaaagaactcggggaaacatcccatcaacaggactacacacttgtatatacattcttgagaacactgcaatgtgaaaatcacgtttgctatttataaacttgtccttagattaatgtgtctggacagattgtgggagtaagtgattcttctaagaattagatacttgtcactgcctatacctgcagctgaactgaatggtacttcgtatgttaatagttgttctgataaatcatgcaattaaagtaaagtgatgcaacatcttgta

SEQ ID NO: 1676 - DNA, 4930 bp, Homo sapiens
cccctcccttagcgggggcgcgcggcgctgaggaccgcacggaaacggggaagtcaggtggccgctgccgccgccgccgccgcggtttgtcgccagaaggaagatggcggatctggaggagcagttgtctgatgaagagaaggttttcccaaatagtgcaccccttgaaggagggacaaggctgaccatatgtggctgggactttggatttcggaggaataataaatttgatttaaagaaaactagagttctccttggaaatgagagctgcaccttgactttaagtgagagcacgatgaatacattgaaatgcacagttggtcctgccatgaataagcatttcaatatgtccataattatttcaaatggccacgggacaacacaatacagtacattctcctatgtggatcctgtaataacaagtatttcgccgaaatacggtcctatggctggtggcactttacttactttaactggaaattacctaaacagtgggaattctagacacatttcaattggtggaaaaacatgtactttaaaaagtgtgtcaaacagtattcttgaatgttataccccagcccaaaccatttcaactgagtttgctgttaaattgaaaattgacttagccaaccgagagacaagcatcttcagttaccgtgaagatcccattgtctatgaaattcatccaaccaaatcttttattagtacttggtggaaagaacctctcaacattgtcagttttctattttgctttgccagtggtgggagcacaataacaggtgttgggaaaaacctgaattcagttagtgtcccgagaatggtcataaatgtgcatgaagcaggaaggaactttacagtggcatgtcaacatcgctctaattcagagataatctgttgtaccactccttccctgcaacagctgaatctgcaactccccctgaaaaccaaagcctttttcatgttagatgggatcctttccaaatactttgatctcatttatgtacataatcctgtgtttaagccttttgaaaagccagtgatgatctcaatgggcaatgaaaatgtactggaaattaagggaaatgatattgaccctgaagcagttaaaggtgaagtgttaaaagttggaaataagagctgtgagaatatacacttacattctgaagccgttttatgcacggtccccaatgacctgctgaaattgaacagcgagctaaatatagagtggaagcaagcaatttcttcaaccgtccttggaaaagtaatagttcaaccagatcagaatttcacaggattgattgctggtgttgtctcaatatcaacagcactgttattactacttgggtttttcctgtggctgaaaaagagaaagcaaattaaagatctgggcagtgaattagttcgctacgatgcaagagtacacactcctcatttggataggcttgtaagtgcccgaagtgtaagcccaactacagaaatggtttcaaatgaatctgtagactaccgagctacttttccagaagatcagtttcctaattcatctcagaacggttcatgccgacaagtgcagtatcctctgacagacatgtcccccatcctaactagtggggactctgatatatccagtccattactgcaaaatactgtccacattgacctcagtgctctaaatccagagctggtccaggcagtgcagcatgtagtgattgggcccagtagcctgattgtgcatttcaatgaagtcataggaagagggcattttggttgtgtatatcatgggactttgttggacaatgatggcaagaaaattcactgtgctgtgaaatccttgaacagaatcactgacataggagaagtttcccaatttctgaccgagggaatcatcatgaaagattttagtcatcccaatgtcctctcgctcctgggaatctgcctgcgaagtgaagggtctccgctggtggtcctaccatacatgaaacatggagatcttcgaaatttcattcgaaatgagactcataatccaactgtaaaagatcttattggctttggtcttcaagtagccaaaggcatgaaatatcttgcaagcaaaaagtttgtccacagagacttggctgcaagaaactgtatgctggatgaaaaattcacagtcaaggttgctgattttggtcttgccagagacatgtatgataaagaatactatagtgtacacaacaaaacaggtgcaaagctgccagtgaagtggatggctttggaaagtctgcaaactcaaaagtttaccaccaagtcagatgtgtggtcctttggcgtgctcctctgggagctgatgacaagaggagccccaccttatcctgacgtaaacacctttgatataactgtttacttgttgcaagggagaagactcctacaacccgaatactgcccagaccccttatatgaagtaatgctaaaatgctggcaccctaaagccgaaatgcgcccatccttttctgaactggtgtcccggatatcagcgatcttctctactttcattggggagcactatgtccatgtgaacgctacttatgtgaacgtaaaatgtgtcgctccgtatccttctctgttgtcatcagaagataacgctgatgatgaggtggacacacgaccagcctccttctgggagacatcatagtgctagtactatgtcaaagcaacagtccacactttgtccaatggttttttcactgcctgacctttaaaaggccatcgatattctttgctcttgccaaaattgcactattataggacttgtattgttatttaaattactggattctaaggaatttcttatctgacagagcatcagaaccagaggcttggtcccacaggccacggaccaatggcctgcagccgtgacaacactcctgtcatattggagtccaaaacttgaattctgggttgaattttttaaaaatcaggtaccacttgatttcatatgggaaattgaagcaggaaatattgagggcttcttgatcacagaaaactcagaagagatagtaatgctcaggacaggagcggcagccccagaacaggccactcatttagaattctagtgtttcaaaacacttttgtgtgttgtatggtcaataacatttttcattactgatggtgtcattcacccattaggtaaacattcccttttaaatgtttgtttgttttttgagacaggatctcactctgttgccagggctgtagtgcagtggtgtgatcatagctcactgcaacctccacctcccaggctcaagcctcccgaatagctgggactacaggcgcacaccaccatccccggctaatttttgtattttttgtagagacggggttttgccatgttgccaaggctggtttcaaactcctggactcaagaaatccacccacctcagcctcccaaagtgctaggattacaggcatgagccactgcgcccagcccttataaatttttgtatagacattcctttggttggaagaatatttataggcaatacagtcaaagtttcaaaatagcatcacacaaaacatgtttataaatgaacaggatgtaatgtacatagatgacattaagaaaatttgtatgaaataatttagtcatcatgaaatatttagttgtcatataaaaacccactgtttgagaatgatgctactctgatctaatgaatgtgaacatgtagatgttttgtgtgtatttttttaaatgaaaactcaaaataagacaagtaatttgttgataaatatttttaaagataactcagcatgtttgtaaagcaggatacattttactaaaaggttcattggttccaatcacagctcataggtagagcaaagaaagggtggatggattgaaaagattagcctctgtctcggtggcaggttcccacctcgcaagcaattggaaacaaaacttttggggagttttattttgcattagggtgtgttttatgttaagcaaaacatactttagaaacaaatgaaaaaggcaattgaaaatcccagctatttcacctagatggaatagccaccctgagcagaactttgtgatgcttcattctgtggaattttgtgcttgctactgtatagtgcatgtggtgtaggttactctaactggttttgtcgacgtaaacatttaaagtgttatattttttataaaaatgtttatttttaatgatatgagaaaaattttgttaggccacaaaaacactgcactgtgaacattttagaaaaggtatgtcagactgggattaatgacagcatgattttcaatgactgtaaattgcgataaggaaatgtactgattgccaatacaccccaccctcattacatcatcaggacttgaagccaagggttaacccagcaagctacaaagagggtgtgtcacactgaaactcaatagttgagtttggctgttgttgcaggaaaatgattataactaaaagctctctgatagtgcagagacttaccagaagacacaaggaattgtactgaagagctattacaatccaaatattgccgtttcataaatgtaataagtaatactaattcacagagtattgtaaatggtggatgacaaaagaaaatctgctctgtggaaagaaagaactgtctctaccagggtcaagagcatgaacgcatcaatagaaagaactcggggaaacatcccatcaacaggactacacacttgtatatacattcttgagaacactgcaatgtgaaaatcacgtttgctatttataaacttgtccttagattaatgtgtctggacagattgtgggagtaagtgattcttctaagaattagatacttgtcactgcctatacctgcagctgaactgaatggtacttcgtatgttaatagttgttctgataaatcatgcaattaaagtaaagtgatgcaacatcttgta

SEQ ID NO: 1677 - DNA, 601 bp, Homo sapiens
cccctcccttagcgggggcgcgcggcgctgaggaccgcacggaaacggggaagtcaggtggccgctgccgccgccgccgccgcggtttgtcgccagaaggaagatggcggatctggaggagcagttgtctgatgaagagaaggttttcccaaatagtgcaccccttgaaggagggacaaggctgaccatatgtggctgggactttggatttcggaggaataataaatttgatttaaagaaaactagagttctccttggaaatgagagctgcaccttgactttaagtgagagcacgatgaatacattgaaatgcacagttggtcctgccatgaataagcatttcaatatgtccataattatttcaaatggccacgggacaacacaatacagtacattctcctatgtggatcctgtaataacaagtatttcgccgaaatacggtcctatggctggtggcactttacttactttaactggaaattacctaaacagtgggaattctagacacatttcaattggtggaaaaacatgtactttaaaaaggtgttgtaaatttattttttgttgcatctgtcaatttgaattaatatctgtaccttaa

SEQ ID NO: 1678 - DNA, 924 bp, Homo sapiens
cccctcccttagcgggggcgcgcggcgctgaggaccgcacggaaacggggaagtcaggtggccgctgccgccgccgccgccgcggtttgtcgccagaaggaagatggcggatctggaggagcagttgtctgatgaagagaaggttttcccaaatagtgcaccccttgaaggagggacaaggctgaccatatgtggctgggactttggatttcggaggaataataaatttgatttaaagaaaactagagttctccttggaaatgagagctgcaccttgactttaagtgagagcacgatgaatacattgaaatgcacagttggtcctgccatgaataagcatttcaatatgtccataattatttcaaatggccacgggacaacacaatacagtacattctcctatgtggatcctgtaataacaagtatttcgccgaaatacggtcctatggctggtggcactttacttactttaactggaaattacctaaacagtgggaattctagacacatttcaattggtggaaaaacatgtactttaaaaagtgtgtcaaacagtattcttgaatgttataccccagcccaaaccatttcaactgagtttgctgttaaattgaaaattgacttagccaaccgagagacaagcatcttcagttaccgtgaagatcccattgtctatgaaattcatccaaccaaatcttttattaggcatgtcaacatcgctctaattcagagataatctgttgtaccactccttccctgcaacagctgaatctgcaactccccctgaaaaccaaagcctttttcatgttagatgggatcctttccaaatactttgatctcatttatgtacataatcctgtgtttaagccttttgaaaagccagtgatgatctcaatgggcaatgaaaatgtactggaaattaag

SEQ ID NO: 1679 - DNA, 4540 bp, Homo sapiens
cccctcccttagcgggggcgcgcggcgctgaggaccgcacggaaacggggaagtcaggtggccgctgccgccgccgccgccgcggtttgtcgccagaaggaagatggcggatctggaggagcagttgtctgatgaagagaaggtgcgtatagcagcaaaattcatcattcatgcccctcctggagaatttaatgaggttttcaatgatgttcggttactgcttaataatgacaatcttctcagggaaggagcagcccatgcatttgcacagtataacttggaccagtttactccagtaaaaattgaaggttatgaagatcaggtattgataacagaacatggcgacttgggaaatggaaagtttttggatccaaagaacagaatctgttttaaatttgatcacttaaggaaggaggcaactgatccaagaccctgtgaagtagaaaatgcagttgaatcatggagaacttcagtagaaactgctctgagagcttacgtaaaagaacattacccgaatggagtctgcactgtgtatggcaaaaaaatagatggacagcaaaccattattgcatgcatagaaagccatcagttccaagcaaaaaatttttggaatggtcgttggaggtcagaatggaagtttacaatcactccttcaaccactcaagtggttggcatcttgaaaattcagggaaatgatattgaccctgaagcagttaaaggtgaagtgttaaaagttggaaataagagctgtgagaatatacacttacattctgaagccgttttatgcacggtccccaatgacctgctgaaattgaacagcgagctaaatatagagtggaagcaagcaatttcttcaaccgtccttggaaaagtaatagttcaaccagatcagaatttcacaggattgattgctggtgttgtctcaatatcaacagcactgttattactacttgggtttttcctgtggctgaaaaagagaaagcaaattaaagatctgggcagtgaattagttcgctacgatgcaagagtacacactcctcatttggataggcttgtaagtgcccgaagtgtaagcccaactacagaaatggtttcaaatgaatctgtagactaccgagctacttttccagaagatcagtttcctaattcatctcagaacggttcatgccgacaagtgcagtatcctctgacagacatgtcccccatcctaactagtggggactctgatatatccagtccattactgcaaaatactgtccacattgacctcagtgctctaaatccagagctggtccaggcagtgcagcatgtagtgattgggcccagtagcctgattgtgcatttcaatgaagtcataggaagagggcattttggttgtgtatatcatgggactttgttggacaatgatggcaagaaaattcactgtgctgtgaaatccttgaacagaatcactgacataggagaagtttcccaatttctgaccgagggaatcatcatgaaagattttagtcatcccaatgtcctctcgctcctgggaatctgcctgcgaagtgaagggtctccgctggtggtcctaccatacatgaaacatggagatcttcgaaatttcattcgaaatgagactcataatccaactgtaaaagatcttattggctttggtcttcaagtagccaaaggcatgaaatatcttgcaagcaaaaagtttgtccacagagacttggctgcaagaaactgtatgctggatgaaaaattcacagtcaaggttgctgattttggtcttgccagagacatgtatgataaagaatactatagtgtacacaacaaaacaggtgcaaagctgccagtgaagtggatggctttggaaagtctgcaaactcaaaagtttaccaccaagtcagatgtgtggtcctttggcgtgctcctctgggagctgatgacaagaggagccccaccttatcctgacgtaaacacctttgatataactgtttacttgttgcaagggagaagactcctacaacccgaatactgcccagaccccttatatgaagtaatgctaaaatgctggcaccctaaagccgaaatgcgcccatccttttctgaactggtgtcccggatatcagcgatcttctctactttcattggggagcactatgtccatgtgaacgctacttatgtgaacgtaaaatgtgtcgctccgtatccttctctgttgtcatcagaagataacgctgatgatgaggtggacacacgaccagcctccttctgggagacatcatagtgctagtactatgtcaaagcaacagtccacactttgtccaatggttttttcactgcctgacctttaaaaggccatcgatattctttgctcttgccaaaattgcactattataggacttgtattgttatttaaattactggattctaaggaatttcttatctgacagagcatcagaaccagaggcttggtcccacaggccacggaccaatggcctgcagccgtgacaacactcctgtcatattggagtccaaaacttgaattctgggttgaattttttaaaaatcaggtaccacttgatttcatatgggaaattgaagcaggaaatattgagggcttcttgatcacagaaaactcagaagagatagtaatgctcaggacaggagcggcagccccagaacaggccactcatttagaattctagtgtttcaaaacacttttgtgtgttgtatggtcaataacatttttcattactgatggtgtcattcacccattaggtaaacattcccttttaaatgtttgtttgttttttgagacaggatctcactctgttgccagggctgtagtgcagtggtgtgatcatagctcactgcaacctccacctcccaggctcaagcctcccgaatagctgggactacaggcgcacaccaccatccccggctaatttttgtattttttgtagagacggggttttgccatgttgccaaggctggtttcaaactcctggactcaagaaatccacccacctcagcctcccaaagtgctaggattacaggcatgagccactgcgcccagcccttataaatttttgtatagacattcctttggttggaagaatatttataggcaatacagtcaaagtttcaaaatagcatcacacaaaacatgtttataaatgaacaggatgtaatgtacatagatgacattaagaaaatttgtatgaaataatttagtcatcatgaaatatttagttgtcatataaaaacccactgtttgagaatgatgctactctgatctaatgaatgtgaacatgtagatgttttgtgtgtatttttttaaatgaaaactcaaaataagacaagtaatttgttgataaatatttttaaagataactcagcatgtttgtaaagcaggatacattttactaaaaggttcattggttccaatcacagctcataggtagagcaaagaaagggtggatggattgaaaagattagcctctgtctcggtggcaggttcccacctcgcaagcaattggaaacaaaacttttggggagttttattttgcattagggtgtgttttatgttaagcaaaacatactttagaaacaaatgaaaaaggcaattgaaaatcccagctatttcacctagatggaatagccaccctgagcagaactttgtgatgcttcattctgtggaattttgtgcttgctactgtatagtgcatgtggtgtaggttactctaactggttttgtcgacgtaaacatttaaagtgttatattttttataaaaatgtttatttttaatgatatgagaaaaattttgttaggccacaaaaacactgcactgtgaacattttagaaaaggtatgtcagactgggattaatgacagcatgattttcaatgactgtaaattgcgataaggaaatgtactgattgccaatacaccccaccctcattacatcatcaggacttgaagccaagggttaacccagcaagctacaaagagggtgtgtcacactgaaactcaatagttgagtttggctgttgttgcaggaaaatgattataactaaaagctctctgatagtgcagagacttaccagaagacacaaggaattgtactgaagagctattacaatccaaatattgccgtttcataaatgtaataagtaatactaattcacagagtattgtaaatggtggatgacaaaagaaaatctgctctgtggaaagaaagaactgtctctaccagggtcaagagcatgaacgcatcaatagaaagaactcggggaaacatcccatcaacaggactacacacttgtatatacattcttgagaacactgcaatgtgaaaatcacgtttgctatttataaacttgtccttagattaatgtgtctggacagattgtgggagtaagtgattcttctaagaattagatacttgtcactgcctatacctgcagctgaactgaatggtacttcgtatgttaatagttgttctgataaatcatgcaattaaagtaaagtgatgcaacatcttgta

SEQ ID NO: 1680 - DNA, 2779 bp, Homo sapiens
cccctcccttagcgggggcgcgcggcgctgaggaccgcacggaaacggggaagtcaggtggccgctgccgccgccgccgccgcggtttgtcgccagaaggaagatggcggatctggaggagcagttgtctgatgaagagaagtggtcctttggcgtgctcctctgggagctgatgacaagaggagccccaccttatcctgacgtaaacacctttgatataactgtttacttgttgcaagggagaagactcctacaacccgaatactgcccagaccccttatatgaagtaatgctaaaatgctggcaccctaaagccgaaatgcgcccatccttttctgaactggtgtcccggatatcagcgatcttctctactttcattggggagcactatgtccatgtgaacgctacttatgtgaacgtaaaatgtgtcgctccgtatccttctctgttgtcatcagaagataacgctgatgatgaggtggacacacgaccagcctccttctgggagacatcatagtgctagtactatgtcaaagcaacagtccacactttgtccaatggttttttcactgcctgacctttaaaaggccatcgatattctttgctcttgccaaaattgcactattataggacttgtattgttatttaaattactggattctaaggaatttcttatctgacagagcatcagaaccagaggcttggtcccacaggccacggaccaatggcctgcagccgtgacaacactcctgtcatattggagtccaaaacttgaattctgggttgaattttttaaaaatcaggtaccacttgatttcatatgggaaattgaagcaggaaatattgagggcttcttgatcacagaaaactcagaagagatagtaatgctcaggacaggagcggcagccccagaacaggccactcatttagaattctagtgtttcaaaacacttttgtgtgttgtatggtcaataacatttttcattactgatggtgtcattcacccattaggtaaacattcccttttaaatgtttgtttgttttttgagacaggatctcactctgttgccagggctgtagtgcagtggtgtgatcatagctcactgcaacctccacctcccaggctcaagcctcccgaatagctgggactacaggcgcacaccaccatccccggctaatttttgtattttttgtagagacggggttttgccatgttgccaaggctggtttcaaactcctggactcaagaaatccacccacctcagcctcccaaagtgctaggattacaggcatgagccactgcgcccagcccttataaatttttgtatagacattcctttggttggaagaatatttataggcaatacagtcaaagtttcaaaatagcatcacacaaaacatgtttataaatgaacaggatgtaatgtacatagatgacattaagaaaatttgtatgaaataatttagtcatcatgaaatatttagttgtcatataaaaacccactgtttgagaatgatgctactctgatctaatgaatgtgaacatgtagatgttttgtgtgtatttttttaaatgaaaactcaaaataagacaagtaatttgttgataaatatttttaaagataactcagcatgtttgtaaagcaggatacattttactaaaaggttcattggttccaatcacagctcataggtagagcaaagaaagggtggatggattgaaaagattagcctctgtctcggtggcaggttcccacctcgcaagcaattggaaacaaaacttttggggagttttattttgcattagggtgtgttttatgttaagcaaaacatactttagaaacaaatgaaaaaggcaattgaaaatcccagctatttcacctagatggaatagccaccctgagcagaactttgtgatgcttcattctgtggaattttgtgcttgctactgtatagtgcatgtggtgtaggttactctaactggttttgtcgacgtaaacatttaaagtgttatattttttataaaaatgtttatttttaatgatatgagaaaaattttgttaggccacaaaaacactgcactgtgaacattttagaaaaggtatgtcagactgggattaatgacagcatgattttcaatgactgtaaattgcgataaggaaatgtactgattgccaatacaccccaccctcattacatcatcaggacttgaagccaagggttaacccagcaagctacaaagagggtgtgtcacactgaaactcaatagttgagtttggctgttgttgcaggaaaatgattataactaaaagctctctgatagtgcagagacttaccagaagacacaaggaattgtactgaagagctattacaatccaaatattgccgtttcataaatgtaataagtaatactaattcacagagtattgtaaatggtggatgacaaaagaaaatctgctctgtggaaagaaagaactgtctctaccagggtcaagagcatgaacgcatcaatagaaagaactcggggaaacatcccatcaacaggactacacacttgtatatacattcttgagaacactgcaatgtgaaaatcacgtttgctatttataaacttgtccttagattaatgtgtctggacagattgtgggagtaagtgattcttctaagaattagatacttgtcactgcctatacctgcagctgaactgaatggtacttcgtatgttaatagttgttctgataaatcatgcaattaaagtaaagtgatgcaacatcttgta

SEQ ID NO: 1681 - DNA, 1406 bp, Homo sapiens
cccctcccttagcgggggcgcgcggcgctgaggaccgcacggaaacggggaagtcaggtggccgctgccgccgccgccgccgcggtttgtcgccagaaggaagatggcggatctggaggagcagttgtctgatgaagagaagggtggtgatgaagagtaaatcaaagagtttagcagaatgcttcccatatgataaacctctcataatgaaggcccccgctgtgcttgcacctggcatcctcgtgctcctgtttaccttggtgcagaggagcaatggggagtgtaaagaggcactagcaaagtccgagatgaatgtgaatatgaagtatcagcttcccaacttcaccgcggaaacacccatccagaatgtcattctacatgagcatcacattttccttggtgccactaactacatttatgttttaaatgaggaagaccttcagaaggttgctgagtacaagactgggcctgtgctggaacacccagattgtttcccatgtcaggactgcagcagcaaagccaatttatcaggaggtgtttggaaagataacatcaacatggctctagttgtcgacacctactatgatgatcaactcattagctgtggcagcgtcaacagagggacctgccagcgacatgtctttccccacaatcatactgctgacatacagtcggaggttcactgcatattctccccacagatagaagagcccagccagtgtcctgactgtgtggtgagcgccctgggagccaaagtcctttcatctgtaaaggaccggttcatcaacttctttgtaggcaataccataaattcttcttatttcccagatcatccattgcattcgatatcagtgagaaggctaaaggaaacgaaagatggttttatgtttttgacggaccagtcctacattgatgttttacctgagttcagagattcttaccccattaagtatgtccatgcctttgaaagcaacaattttatttacttcttgacggtccaaagggaaactctagatgctcagacttttcacacaagaataatcaggttctgttccataaactctggattgcattcctacatggaaatgcctctggagtgtattctcacagaaaagagaaaaaagagatccacaaagaaggaagtgtttaatatacttcaggctgcgtatgtcagcaagcctggggcccagcttgctagacaaataggagccagcctgaatgatgacattcttttcggggtgttcgcacaaagcaagccagattctgccgaaccaatggatcgatctgccatgtgtgcattccctatcaaatatgtcaacgacttcttcaacaagatcgtcaacaaaaacaatgtgagatgtctccagcatttttacggacccaatcatgagcactgctttaatagg

SEQ ID NO: 1682 - DNA, 913 bp, Homo sapiens
cccctcccttagcgggggcgcgcggcgctgaggaccgcacggaaacggggaagtcaggtggccgctgccgccgccgccgccgcggtttgtcgccagaaggaagatggcggatctggaggagcagttgtctgatgaagagaaggttttcccaaatagtgcaccccttgaaggagggacaaggctgaccatatgtggctgggactttggatttcggaggaataataaatttgatttaaagaaaactagagttctccttggaaatgagagctgcaccttgactttaagtgagagcacgatgaatacattgaaatgcacagttggtcctgccatgaataagcatttcaatatgtccataattatttcaaatggccacgggacaacacaatacagtacattctcctatgtggatcctgtaataacaagtatttcgccgaaatacggtcctatggctggtggcactttacttactttaactggaaattacctaaacagtgggaattctagacacatttcaattggtggaaaaacatgtactttaaaaagtgtgtcaaacagtattcttgaatgttataccccagcccaaaccatttcaactgagtttgctgttaaattgaaaattgacttagccaaccgagagacaagcatcttcagttaccgtgaagatcccattgtctatgaaattcatccaaccaaatcttttattagtggtgggagcacaataacaggtgttgggaaaaacctgaattcagttagtgtcccgagaatggtcataaatgtgcatgaagcaggaaggaactttacagtggtaagtcctttgagcaatggttctactcagagctctgcatctttgcctctaaccatgtggctttcatggtacctgagacatctcagtttcgcctttaaggtttgctag

SEQ ID NO: 1683 - DNA, 1075 bp, Homo sapiens
cccctcccttagcgggggcgcgcggcgctgaggaccgcacggaaacggggaagtcaggtggccgctgccgccgccgccgccgcggtttgtcgccagaaggaagatggcggatctggaggagcagttgtctgatgaagagaaggttttcccaaatagtgcaccccttgaaggagggacaaggctgaccatatgtggctgggactttggatttcggaggaataataaatttgatttaaagaaaactagagttctccttggaaatgagagctgcaccttgactttaagtgagagcacgatgaatacattgaaatgcacagttggtcctgccatgaataagcatttcaatatgtccataattatttcaaatggccacgggacaacacaatacagtacattctcctatgtggatcctgtaataacaagtatttcgccgaaatacggtcctatggctggtggcactttacttactttaactggaaattacctaaacagtgggaattctagacacatttcaattggtggaaaaacatgtactttaaaaagtgtgtcaaacagtattcttgaatgttataccccagcccaaaccatttcaactgagtttgctgttaaattgaaaattgacttagccaaccgagagacaagcatcttcagttaccgtgaagatcccattgtctatgaaattcatccaaccaaatcttttattagtggtgggagcacaataacaggtgttgggaaaaacctgaattcagttagtgtcccgagaatggtcataaatgtgcatgaagcaggaaggaactttacagtggcatgtcaacatcgctctaattcagagataatctgttgtaccactccttccctgcaacagctgaatctgcaactccccctgaaaaccaaagcctttttcatgttagatgggatcctttccaaatactttgatctcatttatgtacataatcctgtgtttaagccttttgaaaagccagtgatgatctcaatgggcaatgaaaatgtactggaaattaaggtaagaaatgctttaaacactgtcttaaatcatcagctcaaacttaattga

SEQ ID NO: 1684 - DNA, 1289 bp, Homo sapiens
cccctcccttagcgggggcgcgcggcgctgaggaccgcacggaaacggggaagtcaggtggccgctgccgccgccgccgccgcggtttgtcgccagaaggaagatggcggatctggaggagcagttgtctgatgaagagaaggttttcccaaatagtgcaccccttgaaggagggacaaggctgaccatatgtggctgggactttggatttcggaggaataataaatttgatttaaagaaaactagagttctccttggaaatgagagctgcaccttgactttaagtgagagcacgatgaatacattgaaatgcacagttggtcctgccatgaataagcatttcaatatgtccataattatttcaaatggccacgggacaacacaatacagtacattctcctatgtggatcctgtaataacaagtatttcgccgaaatacggtcctatggctggtggcactttacttactttaactggaaattacctaaacagtgggaattctagacacatttcaattggtggaaaaacatgtactttaaaaagtgtgtcaaacagtattcttgaatgttataccccagcccaaaccatttcaactgagtttgctgttaaattgaaaattgacttagccaaccgagagacaagcatcttcagttaccgtgaagatcccattgtctatgaaattcatccaaccaaatcttttattagtggtgggagcacaataacaggtgttgggaaaaacctgaattcagttagtgtcccgagaatggtcataaatgtgcatgaagcaggaaggaactttacagtggcatgtcaacatcgctctaattcagagataatctgttgtaccactccttccctgcaacagctgaatctgcaactccccctgaaaaccaaagcctttttcatgttagatgggatcctttccaaatactttgatctcatttatgtacataatcctgtgtttaagccttttgaaaagccagtgatgatctcaatgggcaatgaaaatgtactggaaattaagggaaatgatattgaccctgaagcagttaaaggtgaagtgttaaaagttggaaataagagctgtgagaatatacacttacattctgaagccgttttatgcacggtccccaatgacctgctgaaattgaacagcgagctaaatatagaggtgggattcctgcattcctctcatgatgtaaataaggaagccagtgtaattatgttattctcaggcttaaaataaatcattaaagctcatttatgtgtgggttttggctcatcaactc

SEQ ID NO: 1685-1686 - skipped (2 entries)

SEQ ID NO: 1687 - DNA, 4574 bp, Homo sapiens
acaaatagtcgccgacctactgccaatccgcctctcctctctctctctctctgtctcaacatgactgactgggaagcggtggctcgggcagagcagctccgctggcgcaggcaggaggagcaggaggattattaaataacgcagctggactctgtgcaactgggagtggagaggagcccaacagccgagaaggggagggagggcagaggagggggaccaggaaggacacccccgtgccccgaagacataaatccctgagtgcccgggaggagccttaacaagcgcacggagccctcaaggaattggtgtgcttatgtacataccaggttatctcccacagtgatattggacaaccaggtcacttatgtcccaggtgggaaaggaccttgtggctggaccggtggatcctgtcctcagagatctcagaagatatccaatcctgtctataggatgcaacataaaattgtcacctcattggattggaggtgctgtcctggatacagtgggccgaaatgtcaactaagagcccaggaacagcaaagtttgatacacaccaaccaggctgaaagtcatacagctgttggcagaggagtagctgagcagcagcagcagcaaggctgtggtgacccagaagtgatgcaaaaaatgactgatcaggtgaactaccaggcaatgaaactgactcttctgcagaagaagattgacaatatttctttgactgtgaatgatgtaaggaacacttactcctccctagaaggaaaagtcagcgaagataaaagcagagaatttcaatctcttctaaaaggtctaaaatccaaaagcattaatgtactgataagagacatagtaagagaacaatttaaaatttttcaaaatgacatgcaagagactgtagcacagctcttcaagactgtatcaagtctatcagaggacctcgaaagcaccaggcaaataattcaaaaagttaatgaatctgtggtttcaatagcagcccagcaaaagtttgttttggtgcaagagaatcggcccactttgactgatatagtggaactaaggaatcacattgtgaatgtaaggcaagaaatgactcttacatgtgagaagcctattaaagaactagaagtaaagcagactcatttagaaggtgctctagaacaggaacactcaagaagcattctgtattatgaatccctcaataaaactctttctaaattgaaggaagtacatgagcagcttttatcaactgaacaggtatcagaccagaagaatgctccagctgctgagtcagttagcaataatgtcactgagtacatgtctactttacatgaaaatataaagaagcagagtttgatgatgctgcaaatgtttgaagatttgcacattcaagaaagcaagattaacaatctcaccgtctctttggagatggagaaagagtctctcagaggtgaatgtgaagacatgttatccaaatgcagaaatgattttaaatttcaacttaaggacacagaagagaatttacatgtgttaaatcaaacattggctgaagttctctttccaatggacaataagatggacaaaatgagtgagcaactaaatgatttgacttatgatatggagatccttcaacccttgcttgagcagggagcatcactcagacagacaatgacatatgaacaaccaaaggaagcaatagtgataaggaaaaagatagaaaatctgactagtgctgtcaatagtctaaattttattatcaaagaacttacaaaaagacacaacttacttagaaatgaagtacagggtcgtgatgatgccttagaaagacgtatcaatgaatatgccttagaaatggaagatggcctcaataagacaatgactattataaataatgctattgatttcattcaagataactatgccctaaaagagactttaagtactattaaggataatagtgagatccatcataaatgtacctccgatatggaaactattttgacatttattcctcagttccaccgtctgaatgattctattcagactttggtcaatgacaatcagagatataactttgttttgcaagtcgccaagacccttgcaggtattcccagagatgagaaactaaatcagtccaacttccaaaagatgtatcaaatgttcaatgaaaccacttcccaagtgagaaaataccagcaaaatatgagtcatttggaagaaaaactactcttaactaccaagatttccaaaaattttgagactcggttgcaagacattgagtctaaagttacccagacgctcataccttattatatttcagttaaaaaaggcagtgtagttacaaatgagagagatcaggctcttcaactgcaagtattaaattccagatttaaggcgttggaagcaaaatctatccatctttcaattaacttcttttcgcttaacaaaactctccacgaagttttaacaatgtgtcacaatgcttctacaagtgtgtcagaactgaatgctaccatccctaagtggataaaacattccctgccagatattcaacttcttcagaaaggtctaacagaatttgtggaaccaataattcaaataaaaactcaagctgccctatctaatttaacttgttgtatagatcgatcgttgcctggtagtctggcaaatgttgtcaagtctcagaagcaagtaaaatcattgccaaagaaaattaacgcacttaagaaaccaacggtaaatcttaccacagtcctgataggccggactcaaagaaacacggacaacataatatatcctgaggagtattcaagctgtagtcggcatccgtgccaaaatgggggcacgtgcataaatggaagaactagctttacctgtgcctgcagacatccttttactggtgacaactgcactatcaagcttgtggaagaaaatgctttagctccagatttttccaaaggatcttacagatatgcacccatggtggcattttttgcatctcatacgtatggaatgactatacctggtcctatcctgtttaataacttggatgtcaattatggagcttcatataccccaagaactggaaaatttagaattccgtatcttggagtatatgttttcaagtacaccatcgagtcatttagtgctcatatttctggatttttagtggttgatggaatagacaagcttgcatttgagtctgaaaatattaacagtgaaatacactgtgatagggttttaactggggatgccttattagaattaaattatgggcaggaagtctggttacgacttgcaaaaggaacaattccagccaagtttccccctgttactacatttagtggctatttattatatcgtacataagttagtatgaaaaacagactatcacctttattgagaaacagccagtgttttcatttatctttgcttgcacatctgctctgttttggtttttctacaggaaatgaaaatcaacttgtttttttaatatgagtaaacttgtatgtctattttataaaattatttgaatattgtttaatgtctgaatatgaaagagttcttgatcctaaagaaatttagtggcacagaaaacaaagtgaatttgttagcataattattcctattcttatttcttcattttaagtcattgcaatggaaagtaatattataaaatggtaattacaacatattatcagtcacagttttctttccaattaaacacttaacttttgttattccctgtatataaatatataacacacattttctagattcacaaatttaaataaattactcaaaaaatgaaaattgattttgtaaacttttatttttactctttacgttgagttgatcaattttccatactaagattttcattcagaatcaaaattaagaaagttggactgaaaatatgaaaaatgcttaactattgttctcttcctataattctctaattataacatagtaatttacatgtagttggacatgtacactcaagtctaagaatatatgagtggatcatttaccgccccccgccccacaacatctataaggggcaaaaagtctttttctaataagtattcttctatggtagtacctacagatctgcccttcttcttctaaagggtaagtcataatctgtgtaatactacaatttatgggatgctcactatgccctgtttctcttctaaacaatttacatgtaatgtctcattcctcacaataacccttgtaaagtgggcatgattaccatgatttttatagttgaagaacctaagacacagagaccaaggcccatgagctcatagggctgaggcaggatttggaatcaggccatgtcttctccagagcccacatccatcctttctctatattgcctcccacagatgtgctaaaatttatttaactaatcctttatcctctatttgtgttgtctcccattttttattattacaatattactgtggtgaacatgcttaaaaatacattccttggatatctgacaacgtgtttctgaaaaacagattttcataagtaataataaaaataataataaaaaagttttggtatggtaa

SEQ ID NO: 1688-1696 - skipped (9 entries)

SEQ ID NO: 1697 - DNA, 2410 bp, Homo sapiens
gagaagaaagccagtgcgtctctgggcgcaggggccagtggggctcggaggcacaggcaccccgcgacactccaggttccccgacccacgtccctggcagccccgattatttacagcctcagcagagcacggggcgggggcagaggggcccgcccgggagggctgctacttcttaaaacctctgcgggctgcttagtcacagccccccttgcttgggtgtgtccttcgctcgctccctccctccgtcttaggtcactgttttcaacctcgaataaaaactgcagccaacttccgaggcagcctcattgcccagcggaccccagcctctgccaggttcggtccgccatcctcgtcccgtcctccgccggcccctgccccgcgcccagggatcctccagctcctttcgcccgcgccctccgttcgctccggacaccatggacaagttttggtggcacgcagcctggggactctgcctcgtgccgctgagcctggcgcagatcgatttgaatataacctgccgctttgcaggtgtattccacgtggagaaaaatggtcgctacagcatctctcggacggaggccgctgacctctgcaaggctttcaatagcaccttgcccacaatggcccagatggagaaagctctgagcatcggatttgagacctgcaggtatgggttcatagaagggcacgtggtgattccccggatccaccccaactccatctgtgcagcaaacaacacaggggtgtacatcctcacatccaacacctcccagtatgacacatattgcttcaatgcttcagctccacctgaagaagattgtacatcagtcacagacctgcccaatgcctttgatggaccaattaccataagtgaagcggtgagtgctggagatgcattatgtgaaattgagactgacaaagctgtggttaccttagatgcaagtgatgatggaatcttggccaaaatcgtgcaaatgccagatgttaatgtaagctgggatggagagggcccaaagcaactgccatttattgacatttcagtggctgtggcaacagataaaggcttacttactccaatcataaaagatgctgctgctaaaggtatccaggaaattgctgactctgtaaaggctctatcaaagaaagcaagagatggaaaattgttgcctgaagaataccaaggaggatcttttagtatttccaacttggggatgtttggcatcgacgaatttactgcagtgattaaccctcctcaggcctgcattttggcggttgggaggttccgacctgtgctgaagctcactgaggatgaagagggaaatgccaaactgcagcagcgccagctcataacagtcacaatgtcaagtgacagtcgagtggttgatgacgaactggcaaccaggtttcttaaaagttttaaagcaaacctagagaatcctatccgacttgcctagtcctcaaagataagaagttggtgttcagcttagttgattcagtagttgttaccaagaaacatatgttataggaaaacaacttggtatttaagtatgaagtggatgaaatgtttatttatttaaggtgaaagcatttgacccagggtgtcttcatcttcaatttgggtttaatgttatagaaataaatgatgataaactctaactaataaaggaaagagaatatttggttactcagatccatttttaacctctggtgctgtataaagggaatattaaactagatgtaaatcaaagtatatgtttggctcatttgagcattttggaatatttgagaatgtatgatacatgtaaaattaaaaaaactattagaactgtaccataattatgttgaaggtagaagtgatcttcaaagagatggccattaacttagcagtgggacctcacttttacaagcactgctctagatatacttgaagaatttaataggtacagaagtttattctggataataaataaataaggatcacactgtattaggggttatggcaacattattgaattttttatgtacataaagccatatgtttagggtggtttctatctgtcttgtttttcacttatataacactgtgaacttctaaagcaagaggataaaagaagcatgaatgaaaagaatgacatttcaaaaaaatggttcaatgaaaaactatagctaaaatatgtaaacctttctaggtaaaccgcttgccttcatcttgagtcggaatatatttaaataaattgtgttatctcttgccaaacattttgttagtgtttatttaaaaacaaaatgttgtttcttaatgcatttaaatcagttttgtattgtgcagtaaaatgtgagaaaatataaacatttctattgtattttaaatgttaaaacacaaaagttcaataaaccttgaagttgattagta

SEQ ID NO: 1698 - DNA, 2803 bp, Homo sapiens
gagaagaaagccagtgcgtctctgggcgcaggggccagtggggctcggaggcacaggcaccccgcgacactccaggttccccgacccacgtccctggcagccccgattatttacagcctcagcagagcacggggcgggggcagaggggcccgcccgggagggctgctacttcttaaaacctctgcgggctgcttagtcacagccccccttgcttgggtgtgtccttcgctcgctccctccctccgtcttaggtcactgttttcaacctcgaataaaaactgcagccaacttccgaggcagcctcattgcccagcggaccccagcctctgccaggttcggtccgccatcctcgtcccgtcctccgccggcccctgccccgcgcccagggatcctccagctcctttcgcccgcgccctccgttcgctccggacaccatggacaagttttggtggcacgcagcctggggactctgcctcgtgccgctgagcctggcgcagatcggtgatcccattaagatactaatgccatcactgtctcctacaatggaagaaggaaacattgtgaaatggctgaaaaaggaaggtgaagcggtgagtgctggagatgcattatgtgaaattgagactgacaaagctgtggttaccttagatgcaagtgatgatggaatcttggccaaaatcgtggttgaagaaggaagtaaaaatatacggctaggttcactaattggtttgatagtagaagaaggagaagattggaaacatgttgaaattcccaaagacgtaggtcctccaccaccagtttcaaaaccttcagagcctcgcccctcaccagaaccacagatttccatccctgtcaagaaggaacacatacccgggacactacggttccgtttaagtccagctgcccgcaatattctggaaaaacactcactggatgctagccagggcacagccactggccctcgggggatattcactaaagaggatgctctcaaacttgtccagttgaaacaaacgggcaagattaccgagtccagaccaactccagcccccacagccactcccacagcaccttcgcccctacaggccacagctggaccatcttatccccggcctgtgatcccaccagtatcaactcctggacaacccaatgcagtgggcacattcactgaaatccccgccagcaatattcgaagagttattgccaagagattaactgaatctaaaagtactgtacctcatgcatatgctactgctgactgtgaccttggagctgttttaaaagttaggcaagatctggtcaaagatgacattaaagtatcagtaaatgattttatcatcaaggcagcagctgttacccttaaacaaatgccagatgttaatgtaagctgggatggagagggcccaaagcaactgccatttattgacatttcagtggctgtggcaacagataaaggcttacttactccaatcataaaagatgctgctgctaaaggtatccaggaaattgctgactctgtaaaggctctatcaaagaaagcaagagatggaaaattgttgcctgaagaataccaaggaggatcttttagtatttccaacttggggatgtttggcatcgacgaatttactgcagtgattaaccctcctcaggcctgcattttggcggttgggaggttccgacctgtgctgaagctcactgaggatgaagagggaaatgccaaactgcagcagcgccagctcataacagtcacaatgtcaagtgacagtcgagtggttgatgacgaactggcaaccaggtttcttaaaagttttaaagcaaacctagagaatcctatccgacttgcctagtcctcaaagataagaagttggtgttcagcttagttgattcagtagttgttaccaagaaacatatgttataggaaaacaacttggtatttaagtatgaagtggatgaaatgtttatttatttaaggtgaaagcatttgacccagggtgtcttcatcttcaatttgggtttaatgttatagaaataaatgatgataaactctaactaataaaggaaagagaatatttggttactcagatccatttttaacctctggtgctgtataaagggaatattaaactagatgtaaatcaaagtatatgtttggctcatttgagcattttggaatatttgagaatgtatgatacatgtaaaattaaaaaaactattagaactgtaccataattatgttgaaggtagaagtgatcttcaaagagatggccattaacttagcagtgggacctcacttttacaagcactgctctagatatacttgaagaatttaataggtacagaagtttattctggataataaataaataaggatcacactgtattaggggttatggcaacattattgaattttttatgtacataaagccatatgtttagggtggtttctatctgtcttgtttttcacttatataacactgtgaacttctaaagcaagaggataaaagaagcatgaatgaaaagaatgacatttcaaaaaaatggttcaatgaaaaactatagctaaaatatgtaaacctttctaggtaaaccgcttgccttcatcttgagtcggaatatatttaaataaattgtgttatctcttgccaaacattttgttagtgtttatttaaaaacaaaatgttgtttcttaatgcatttaaatcagttttgtattgtgcagtaaaatgtgagaaaatataaacatttctattgtattttaaatgttaaaacacaaaagttcaataaaccttgaagttgattagta

SEQ ID NO: 1699 - DNA, 3091 bp, Homo sapiens
gagaagaaagccagtgcgtctctgggcgcaggggccagtggggctcggaggcacaggcaccccgcgacactccaggttccccgacccacgtccctggcagccccgattatttacagcctcagcagagcacggggcgggggcagaggggcccgcccgggagggctgctacttcttaaaacctctgcgggctgcttagtcacagccccccttgcttgggtgtgtccttcgctcgctccctccctccgtcttaggtcactgttttcaacctcgaataaaaactgcagccaacttccgaggcagcctcattgcccagcggaccccagcctctgccaggttcggtccgccatcctcgtcccgtcctccgccggcccctgccccgcgcccagggatcctccagctcctttcgcccgcgccctccgttcgctccggacaccatggacaagttttggtggcacgcagcctggggactctgcctcgtgccgctgagcctggcgcagatcgatttgaatataacctgccgctttgcaggtgtattccacgtggagaaaaatggtcgctacagcatctctcggacggaggccgctgacctctgcaaggctttcaatagcaccttgcccacaatggcccagatggagaaagctctgagcatcggatttgagacctgcaggtatgggttcatagaagggcacgtggtgattccccggatccaccccaactccatctgtgcagcaaacaacacaggggtgtacatcctcacatccaacacctcccagtatgacacatattgcttcaatgcttcagctccacctgaagaagattgtacatcagtcacagacctgcccaatgcctttgatggaccaattaccataagtgaagcggtgagtgctggagatgcattatgtgaaattgagactgacaaagctgtggttaccttagatgcaagtgatgatggaatcttggccaaaatcgtggttgaagaaggaagtaaaaatatacggctaggttcactaattggtttgatagtagaagaaggagaagattggaaacatgttgaaattcccaaagacgtaggtcctccaccaccagtttcaaaaccttcagagcctcgcccctcaccagaaccacagatttccatccctgtcaagaaggaacacatacccgggacactacggttccgtttaagtccagctgcccgcaatattctggaaaaacactcactggatgctagccagggcacagccactggccctcgggggatattcactaaagaggatgctctcaaacttgtccagttgaaacaaacgggcaagattaccgagtccagaccaactccagcccccacagccactcccacagcaccttcgcccctacaggccacagctggaccatcttatccccggcctgtgatcccaccagtatcaactcctggacaacccaatgcagtgggcacattcactgaaatccccgccagcaatattcgaagagttattgccaagagattaactgaatctaaaagtactgtacctcatgcatatgctactgctgactgtgaccttggagctgttttaaaagttaggcaagatctggtcaaagatgacattaaagtatcagtaaatgattttatcatcaaggcagcagctgttacccttaaacaaatgccagatgttaatgtaagctgggatggagagggcccaaagcaactgccatttattgacatttcagtggctgtggcaacagataaaggcttacttactccaatcataaaagatgctgctgctaaaggtatccaggaaattgctgactctgtaaaggctctatcaaagaaagcaagagatggaaaattgttgcctgaagaataccaaggaggatcttttagtatttccaacttggggatgtttggcatcgacgaatttactgcagtgattaaccctcctcaggcctgcattttggcggttgggaggttccgacctgtgctgaagctcactgaggatgaagagggaaatgccaaactgcagcagcgccagctcataacagtcacaatgtcaagtgacagtcgagtggttgatgacgaactggcaaccaggtttcttaaaagttttaaagcaaacctagagaatcctatccgacttgcctagtcctcaaagataagaagttggtgttcagcttagttgattcagtagttgttaccaagaaacatatgttataggaaaacaacttggtatttaagtatgaagtggatgaaatgtttatttatttaaggtgaaagcatttgacccagggtgtcttcatcttcaatttgggtttaatgttatagaaataaatgatgataaactctaactaataaaggaaagagaatatttggttactcagatccatttttaacctctggtgctgtataaagggaatattaaactagatgtaaatcaaagtatatgtttggctcatttgagcattttggaatatttgagaatgtatgatacatgtaaaattaaaaaaactattagaactgtaccataattatgttgaaggtagaagtgatcttcaaagagatggccattaacttagcagtgggacctcacttttacaagcactgctctagatatacttgaagaatttaataggtacagaagtttattctggataataaataaataaggatcacactgtattaggggttatggcaacattattgaattttttatgtacataaagccatatgtttagggtggtttctatctgtcttgtttttcacttatataacactgtgaacttctaaagcaagaggataaaagaagcatgaatgaaaagaatgacatttcaaaaaaatggttcaatgaaaaactatagctaaaatatgtaaacctttctaggtaaaccgcttgccttcatcttgagtcggaatatatttaaataaattgtgttatctcttgccaaacattttgttagtgtttatttaaaaacaaaatgttgtttcttaatgcatttaaatcagttttgtattgtgcagtaaaatgtgagaaaatataaacatttctattgtattttaaatgttaaaacacaaaagttcaataaaccttgaagttgattagta

SEQ ID NO: 1700 - DNA, 1975 bp, Homo sapiens
gagaagaaagccagtgcgtctctgggcgcaggggccagtggggctcggaggcacaggcaccccgcgacactccaggttccccgacccacgtccctggcagccccgattatttacagcctcagcagagcacggggcgggggcagaggggcccgcccgggagggctgctacttcttaaaacctctgcgggctgcttagtcacagccccccttgcttgggtgtgtccttcgctcgctccctccctccgtcttaggtcactgttttcaacctcgaataaaaactgcagccaacttccgaggcagcctcattgcccagcggaccccagcctctgccaggttcggtccgccatcctcgtcccgtcctccgccggcccctgccccgcgcccagggatcctccagctcctttcgcccgcgccctccgttcgctccggacaccatggacaagttttggtggcacgcagcctggggactctgcctcgtgccgctgagcctggcgcagatcgatttgaatataacctgccgctttgcaggtgtattccacgtggagaaaaatggtcgctacagcatctctcggacggaggccgctgacctctgcaaggctttcaatagcaccttgcccacaatggcccagatggagaaagctctgagcatcggatttgagacctgcagtttgcattgcagtcaacagtcgaagaaggctctatcaaagaaagcaagagatggaaaattgttgcctgaagaataccaaggaggatcttttagtatttccaacttggggatgtttggcatcgacgaatttactgcagtgattaaccctcctcaggcctgcattttggcggttgggaggttccgacctgtgctgaagctcactgaggatgaagagggaaatgccaaactgcagcagcgccagctcataacagtcacaatgtcaagtgacagtcgagtggttgatgacgaactggcaaccaggtttcttaaaagttttaaagcaaacctagagaatcctatccgacttgcctagtcctcaaagataagaagttggtgttcagcttagttgattcagtagttgttaccaagaaacatatgttataggaaaacaacttggtatttaagtatgaagtggatgaaatgtttatttatttaaggtgaaagcatttgacccagggtgtcttcatcttcaatttgggtttaatgttatagaaataaatgatgataaactctaactaataaaggaaagagaatatttggttactcagatccatttttaacctctggtgctgtataaagggaatattaaactagatgtaaatcaaagtatatgtttggctcatttgagcattttggaatatttgagaatgtatgatacatgtaaaattaaaaaaactattagaactgtaccataattatgttgaaggtagaagtgatcttcaaagagatggccattaacttagcagtgggacctcacttttacaagcactgctctagatatacttgaagaatttaataggtacagaagtttattctggataataaataaataaggatcacactgtattaggggttatggcaacattattgaattttttatgtacataaagccatatgtttagggtggtttctatctgtcttgtttttcacttatataacactgtgaacttctaaagcaagaggataaaagaagcatgaatgaaaagaatgacatttcaaaaaaatggttcaatgaaaaactatagctaaaatatgtaaacctttctaggtaaaccgcttgccttcatcttgagtcggaatatatttaaataaattgtgttatctcttgccaaacattttgttagtgtttatttaaaaacaaaatgttgtttcttaatgcatttaaatcagttttgtattgtgcagtaaaatgtgagaaaatataaacatttctattgtattttaaatgttaaaacacaaaagttcaataaaccttgaagttgattagta

SEQ ID NO: 1701 - DNA, 2488 bp, Homo sapiens
gagaagaaagccagtgcgtctctgggcgcaggggccagtggggctcggaggcacaggcaccccgcgacactccaggttccccgacccacgtccctggcagccccgattatttacagcctcagcagagcacggggcgggggcagaggggcccgcccgggagggctgctacttcttaaaacctctgcgggctgcttagtcacagccccccttgcttgggtgtgtccttcgctcgctccctccctccgtcttaggtcactgttttcaacctcgaataaaaactgcagccaacttccgaggcagcctcattgcccagcggaccccagcctctgccaggttcggtccgccatcctcgtcccgtcctccgccggcccctgccccgcgcccagggatcctccagctcctttcgcccgcgccctccgttcgctccggacaccatggacaagttttggtggcacgcagcctggggactctgcctcgtgccgctgagcctggcgcagatcgatttgaatataacctgccgctttgcaggtgtattccacgtggagaaaaatggtcgctacagcatctctcggacggaggccgctgacctctgcaaggctttcaatagcaccttgcccacaatggcccagatggagaaagctctgagcatcggatttgagacctgcagggatgctctcaaacttgtccagttgaaacaaacgggcaagattaccgagtccagaccaactccagcccccacagccactcccacagcaccttcgcccctacaggccacagctggaccatcttatccccggcctgtgatcccaccagtatcaactcctggacaacccaatgcagtgggcacattcactgaaatccccgccagcaatattcgaagagttattgccaagagattaactgaatctaaaagtactgtacctcatgcatatgctactgctgactgtgaccttggagctgttttaaaagttaggcaagatctggtcaaagatgacattaaagtatcagtaaatgattttatcatcaaggcagcagctgttacccttaaacaaatgccagatgttaatgtaagctgggatggagagggcccaaagcaactgccatttattgacatttcagtggctgtggcaacagataaaggcttacttactccaatcataaaagatgctgctgctaaaggtatccaggaaattgctgactctgtaaaggctctatcaaagaaagcaagagatggaaaattgttgcctgaagaataccaaggaggatcttttagtatttccaacttggggatgtttggcatcgacgaatttactgcagtgattaaccctcctcaggcctgcattttggcggttgggaggttccgacctgtgctgaagctcactgaggatgaagagggaaatgccaaactgcagcagcgccagctcataacagtcacaatgtcaagtgacagtcgagtggttgatgacgaactggcaaccaggtttcttaaaagttttaaagcaaacctagagaatcctatccgacttgcctagtcctcaaagataagaagttggtgttcagcttagttgattcagtagttgttaccaagaaacatatgttataggaaaacaacttggtatttaagtatgaagtggatgaaatgtttatttatttaaggtgaaagcatttgacccagggtgtcttcatcttcaatttgggtttaatgttatagaaataaatgatgataaactctaactaataaaggaaagagaatatttggttactcagatccatttttaacctctggtgctgtataaagggaatattaaactagatgtaaatcaaagtatatgtttggctcatttgagcattttggaatatttgagaatgtatgatacatgtaaaattaaaaaaactattagaactgtaccataattatgttgaaggtagaagtgatcttcaaagagatggccattaacttagcagtgggacctcacttttacaagcactgctctagatatacttgaagaatttaataggtacagaagtttattctggataataaataaataaggatcacactgtattaggggttatggcaacattattgaattttttatgtacataaagccatatgtttagggtggtttctatctgtcttgtttttcacttatataacactgtgaacttctaaagcaagaggataaaagaagcatgaatgaaaagaatgacatttcaaaaaaatggttcaatgaaaaactatagctaaaatatgtaaacctttctaggtaaaccgcttgccttcatcttgagtcggaatatatttaaataaattgtgttatctcttgccaaacattttgttagtgtttatttaaaaacaaaatgttgtttcttaatgcatttaaatcagttttgtattgtgcagtaaaatgtgagaaaatataaacatttctattgtattttaaatgttaaaacacaaaagttcaataaaccttgaagttgattagta

SEQ ID NO: 1702 - DNA, 2722 bp, Homo sapiens
gagaagaaagccagtgcgtctctgggcgcaggggccagtggggctcggaggcacaggcaccccgcgacactccaggttccccgacccacgtccctggcagccccgattatttacagcctcagcagagcacggggcgggggcagaggggcccgcccgggagggctgctacttcttaaaacctctgcgggctgcttagtcacagccccccttgcttgggtgtgtccttcgctcgctccctccctccgtcttaggtcactgttttcaacctcgaataaaaactgcagccaacttccgaggcagcctcattgcccagcggaccccagcctctgccaggttcggtccgccatcctcgtcccgtcctccgccggcccctgccccgcgcccagggatcctccagctcctttcgcccgcgccctccgttcgctccggacaccatggacaagttttggtggcacgcagcctggggactctgcctcgtgccgctgagcctggcgcagatcgatttgaatataacctgccgctttgcaggtgtattccacgtggagaaaaatggtcgctacagcatctctcggacggaggccgctgacctctgcaaggctttcaatagcaccttgcccacaatggcccagatggagaaagctctgagcatcggatttgagacctgcaggtatgggttcatagaagggcacgtggtgattccccggatccaccccaactccatctgtgcagcaaacaacacaggggtgtacatcctcacatccaacacctcccagtatgacacatattgcttcaatgcttcagctccacctgaagaagattgtacatcagtcacagacctgcccaatgcctttgatggaccaattaccataactattgttaaccgtgatggcacccgctatgtccagaaaggagaatacagaacgaatcctgaagacatctaccccagcaaccctactgatgatgacgtgagcagcggctcctccagtgaaaggagcagcacttcaggaggttacatcttttacaccttttctactgtacaccccatcccagacgaagacagtccctggatcaccgacagcacagacagaatccctgctaccagtgatcccattaagatactaatgccatcactgtctcctacaatggaagaaggaaacattgtgaaatggctgaaaaaggaaggtgaagcggtgagtgctggagatgcattatgtgaaattgagactgacaaagctgtggttaccttagatgcaagtgatgatggaatcttggccaaaatcgtgcaaatgccagatgttaatgtaagctgggatggagagggcccaaagcaactgccatttattgacatttcagtggctgtggcaacagataaaggcttacttactccaatcataaaagatgctgctgctaaaggtatccaggaaattgctgactctgtaaaggctctatcaaagaaagcaagagatggaaaattgttgcctgaagaataccaaggaggatcttttagtatttccaacttggggatgtttggcatcgacgaatttactgcagtgattaaccctcctcaggcctgcattttggcggttgggaggttccgacctgtgctgaagctcactgaggatgaagagggaaatgccaaactgcagcagcgccagctcataacagtcacaatgtcaagtgacagtcgagtggttgatgacgaactggcaaccaggtttcttaaaagttttaaagcaaacctagagaatcctatccgacttgcctagtcctcaaagataagaagttggtgttcagcttagttgattcagtagttgttaccaagaaacatatgttataggaaaacaacttggtatttaagtatgaagtggatgaaatgtttatttatttaaggtgaaagcatttgacccagggtgtcttcatcttcaatttgggtttaatgttatagaaataaatgatgataaactctaactaataaaggaaagagaatatttggttactcagatccatttttaacctctggtgctgtataaagggaatattaaactagatgtaaatcaaagtatatgtttggctcatttgagcattttggaatatttgagaatgtatgatacatgtaaaattaaaaaaactattagaactgtaccataattatgttgaaggtagaagtgatcttcaaagagatggccattaacttagcagtgggacctcacttttacaagcactgctctagatatacttgaagaatttaataggtacagaagtttattctggataataaataaataaggatcacactgtattaggggttatggcaacattattgaattttttatgtacataaagccatatgtttagggtggtttctatctgtcttgtttttcacttatataacactgtgaacttctaaagcaagaggataaaagaagcatgaatgaaaagaatgacatttcaaaaaaatggttcaatgaaaaactatagctaaaatatgtaaacctttctaggtaaaccgcttgccttcatcttgagtcggaatatatttaaataaattgtgttatctcttgccaaacattttgttagtgtttatttaaaaacaaaatgttgtttcttaatgcatttaaatcagttttgtattgtgcagtaaaatgtgagaaaatataaacatttctattgtattttaaatgttaaaacacaaaagttcaataaaccttgaagttgattagta

SEQ ID NO: 1703 - DNA, 3403 bp, Homo sapiens
gagaagaaagccagtgcgtctctgggcgcaggggccagtggggctcggaggcacaggcaccccgcgacactccaggttccccgacccacgtccctggcagccccgattatttacagcctcagcagagcacggggcgggggcagaggggcccgcccgggagggctgctacttcttaaaacctctgcgggctgcttagtcacagccccccttgcttgggtgtgtccttcgctcgctccctccctccgtcttaggtcactgttttcaacctcgaataaaaactgcagccaacttccgaggcagcctcattgcccagcggaccccagcctctgccaggttcggtccgccatcctcgtcccgtcctccgccggcccctgccccgcgcccagggatcctccagctcctttcgcccgcgccctccgttcgctccggacaccatggacaagttttggtggcacgcagcctggggactctgcctcgtgccgctgagcctggcgcagatcgatttgaatataacctgccgctttgcaggtgtattccacgtggagaaaaatggtcgctacagcatctctcggacggaggccgctgacctctgcaaggctttcaatagcaccttgcccacaatggcccagatggagaaagctctgagcatcggatttgagacctgcaggtatgggttcatagaagggcacgtggtgattccccggatccaccccaactccatctgtgcagcaaacaacacaggggtgtacatcctcacatccaacacctcccagtatgacacatattgcttcaatgcttcagctccacctgaagaagattgtacatcagtcacagacctgcccaatgcctttgatggaccaattaccataactattgttaaccgtgatggcacccgctatgtccagaaaggagaatacagaacgaatcctgaagacatctaccccagcaaccctactgatgatgacgtgagcagcggctcctccagtgaaaggagcagcacttcaggaggttacatcttttacaccttttctactgtacaccccatcccagacgaagacagtccctggatcaccgacagcacagacagaatccctgctaccagtgatcccattaagatactaatgccatcactgtctcctacaatggaagaaggaaacattgtgaaatggctgaaaaaggaaggtgaagcggtgagtgctggagatgcattatgtgaaattgagactgacaaagctgtggttaccttagatgcaagtgatgatggaatcttggccaaaatcgtggttgaagaaggaagtaaaaatatacggctaggttcactaattggtttgatagtagaagaaggagaagattggaaacatgttgaaattcccaaagacgtaggtcctccaccaccagtttcaaaaccttcagagcctcgcccctcaccagaaccacagatttccatccctgtcaagaaggaacacatacccgggacactacggttccgtttaagtccagctgcccgcaatattctggaaaaacactcactggatgctagccagggcacagccactggccctcgggggatattcactaaagaggatgctctcaaacttgtccagttgaaacaaacgggcaagattaccgagtccagaccaactccagcccccacagccactcccacagcaccttcgcccctacaggccacagctggaccatcttatccccggcctgtgatcccaccagtatcaactcctggacaacccaatgcagtgggcacattcactgaaatccccgccagcaatattcgaagagttattgccaagagattaactgaatctaaaagtactgtacctcatgcatatgctactgctgactgtgaccttggagctgttttaaaagttaggcaagatctggtcaaagatgacattaaagtatcagtaaatgattttatcatcaaggcagcagctgttacccttaaacaaatgccagatgttaatgtaagctgggatggagagggcccaaagcaactgccatttattgacatttcagtggctgtggcaacagataaaggcttacttactccaatcataaaagatgctgctgctaaaggtatccaggaaattgctgactctgtaaaggctctatcaaagaaagcaagagatggaaaattgttgcctgaagaataccaaggaggatcttttagtatttccaacttggggatgtttggcatcgacgaatttactgcagtgattaaccctcctcaggcctgcattttggcggttgggaggttccgacctgtgctgaagctcactgaggatgaagagggaaatgccaaactgcagcagcgccagctcataacagtcacaatgtcaagtgacagtcgagtggttgatgacgaactggcaaccaggtttcttaaaagttttaaagcaaacctagagaatcctatccgacttgcctagtcctcaaagataagaagttggtgttcagcttagttgattcagtagttgttaccaagaaacatatgttataggaaaacaacttggtatttaagtatgaagtggatgaaatgtttatttatttaaggtgaaagcatttgacccagggtgtcttcatcttcaatttgggtttaatgttatagaaataaatgatgataaactctaactaataaaggaaagagaatatttggttactcagatccatttttaacctctggtgctgtataaagggaatattaaactagatgtaaatcaaagtatatgtttggctcatttgagcattttggaatatttgagaatgtatgatacatgtaaaattaaaaaaactattagaactgtaccataattatgttgaaggtagaagtgatcttcaaagagatggccattaacttagcagtgggacctcacttttacaagcactgctctagatatacttgaagaatttaataggtacagaagtttattctggataataaataaataaggatcacactgtattaggggttatggcaacattattgaattttttatgtacataaagccatatgtttagggtggtttctatctgtcttgtttttcacttatataacactgtgaacttctaaagcaagaggataaaagaagcatgaatgaaaagaatgacatttcaaaaaaatggttcaatgaaaaactatagctaaaatatgtaaacctttctaggtaaaccgcttgccttcatcttgagtcggaatatatttaaataaattgtgttatctcttgccaaacattttgttagtgtttatttaaaaacaaaatgttgtttcttaatgcatttaaatcagttttgtattgtgcagtaaaatgtgagaaaatataaacatttctattgtattttaaatgttaaaacacaaaagttcaataaaccttgaagttgattagta

SEQ ID NO: 1704 - DNA, 1999 bp, Homo sapiens
gagaagaaagccagtgcgtctctgggcgcaggggccagtggggctcggaggcacaggcaccccgcgacactccaggttccccgacccacgtccctggcagccccgattatttacagcctcagcagagcacggggcgggggcagaggggcccgcccgggagggctgctacttcttaaaacctctgcgggctgcttagtcacagccccccttgcttgggtgtgtccttcgctcgctccctccctccgtcttaggtcactgttttcaacctcgaataaaaactgcagccaacttccgaggcagcctcattgcccagcggaccccagcctctgccaggttcggtccgccatcctcgtcccgtcctccgccggcccctgccccgcgcccagggatcctccagctcctttcgcccgcgccctccgttcgctccggacaccatggacaagttttggtggcacgcagcctggggactctgcctcgtgccgctgagcctggcgcagatcgatgacattaaagtatcagtaaatgattttatcatcaaggcagcagctgttacccttaaacaaatgccagatgttaatgtaagctgggatggagagggcccaaagcaactgccatttattgacatttcagtggctgtggcaacagataaaggcttacttactccaatcataaaagatgctgctgctaaaggtatccaggaaattgctgactctgtaaaggctctatcaaagaaagcaagagatggaaaattgttgcctgaagaataccaaggaggatcttttagtatttccaacttggggatgtttggcatcgacgaatttactgcagtgattaaccctcctcaggcctgcattttggcggttgggaggttccgacctgtgctgaagctcactgaggatgaagagggaaatgccaaactgcagcagcgccagctcataacagtcacaatgtcaagtgacagtcgagtggttgatgacgaactggcaaccaggtttcttaaaagttttaaagcaaacctagagaatcctatccgacttgcctagtcctcaaagataagaagttggtgttcagcttagttgattcagtagttgttaccaagaaacatatgttataggaaaacaacttggtatttaagtatgaagtggatgaaatgtttatttatttaaggtgaaagcatttgacccagggtgtcttcatcttcaatttgggtttaatgttatagaaataaatgatgataaactctaactaataaaggaaagagaatatttggttactcagatccatttttaacctctggtgctgtataaagggaatattaaactagatgtaaatcaaagtatatgtttggctcatttgagcattttggaatatttgagaatgtatgatacatgtaaaattaaaaaaactattagaactgtaccataattatgttgaaggtagaagtgatcttcaaagagatggccattaacttagcagtgggacctcacttttacaagcactgctctagatatacttgaagaatttaataggtacagaagtttattctggataataaataaataaggatcacactgtattaggggttatggcaacattattgaattttttatgtacataaagccatatgtttagggtggtttctatctgtcttgtttttcacttatataacactgtgaacttctaaagcaagaggataaaagaagcatgaatgaaaagaatgacatttcaaaaaaatggttcaatgaaaaactatagctaaaatatgtaaacctttctaggtaaaccgcttgccttcatcttgagtcggaatatatttaaataaattgtgttatctcttgccaaacattttgttagtgtttatttaaaaacaaaatgttgtttcttaatgcatttaaatcagttttgtattgtgcagtaaaatgtgagaaaatataaacatttctattgtattttaaatgttaaaacacaaaagttcaataaaccttgaagttgattagta

SEQ ID NO: 1705 - DNA, 2122 bp, Homo sapiens
gagaagaaagccagtgcgtctctgggcgcaggggccagtggggctcggaggcacaggcaccccgcgacactccaggttccccgacccacgtccctggcagccccgattatttacagcctcagcagagcacggggcgggggcagaggggcccgcccgggagggctgctacttcttaaaacctctgcgggctgcttagtcacagccccccttgcttgggtgtgtccttcgctcgctccctccctccgtcttaggtcactgttttcaacctcgaataaaaactgcagccaacttccgaggcagcctcattgcccagcggaccccagcctctgccaggttcggtccgccatcctcgtcccgtcctccgccggcccctgccccgcgcccagggatcctccagctcctttcgcccgcgccctccgttcgctccggacaccatggacaagttttggtggcacgcagcctggggactctgcctcgtgccgctgagcctggcgcagatcggtgatcccattaagatactaatgccatcactgtctcctacaatggaagaaggaaacattgtgaaatggctgaaaaaggaaggtgaagcggtgagtgctggagatgcattatgtgaaattgagactgacaaagctgtggttaccttagatgcaagtgatgatggaatcttggccaaaatcgtgcaaatgccagatgttaatgtaagctgggatggagagggcccaaagcaactgccatttattgacatttcagtggctgtggcaacagataaaggcttacttactccaatcataaaagatgctgctgctaaaggtatccaggaaattgctgactctgtaaaggctctatcaaagaaagcaagagatggaaaattgttgcctgaagaataccaaggaggatcttttagtatttccaacttggggatgtttggcatcgacgaatttactgcagtgattaaccctcctcaggcctgcattttggcggttgggaggttccgacctgtgctgaagctcactgaggatgaagagggaaatgccaaactgcagcagcgccagctcataacagtcacaatgtcaagtgacagtcgagtggttgatgacgaactggcaaccaggtttcttaaaagttttaaagcaaacctagagaatcctatccgacttgcctagtcctcaaagataagaagttggtgttcagcttagttgattcagtagttgttaccaagaaacatatgttataggaaaacaacttggtatttaagtatgaagtggatgaaatgtttatttatttaaggtgaaagcatttgacccagggtgtcttcatcttcaatttgggtttaatgttatagaaataaatgatgataaactctaactaataaaggaaagagaatatttggttactcagatccatttttaacctctggtgctgtataaagggaatattaaactagatgtaaatcaaagtatatgtttggctcatttgagcattttggaatatttgagaatgtatgatacatgtaaaattaaaaaaactattagaactgtaccataattatgttgaaggtagaagtgatcttcaaagagatggccattaacttagcagtgggacctcacttttacaagcactgctctagatatacttgaagaatttaataggtacagaagtttattctggataataaataaataaggatcacactgtattaggggttatggcaacattattgaattttttatgtacataaagccatatgtttagggtggtttctatctgtcttgtttttcacttatataacactgtgaacttctaaagcaagaggataaaagaagcatgaatgaaaagaatgacatttcaaaaaaatggttcaatgaaaaactatagctaaaatatgtaaacctttctaggtaaaccgcttgccttcatcttgagtcggaatatatttaaataaattgtgttatctcttgccaaacattttgttagtgtttatttaaaaacaaaatgttgtttcttaatgcatttaaatcagttttgtattgtgcagtaaaatgtgagaaaatataaacatttctattgtattttaaatgttaaaacacaaaagttcaataaaccttgaagttgattagta

SEQ ID NO: 1706-1714 - skipped (9 entries)

SEQ ID NO: 1715 - DNA, 6210 bp, Homo sapiens
gagctcggcggctgggactggaggacagcggtggcggaggcgactagcggcggcgggagcggcgccgagaggccgtgcgggacgcgggcgccaggaccggccgaacgcagagaaggtagaagatagcaccatgccgattcgtcgaactgtgaattctacccgggaaactcctcccaaaagcaagcttgctgaaggggaggaagaaaagccaggtaacacaagtggcaagacagccgggaacccctaccccatccccttattcagcacatgaaataaacaaggggcatccaaatcttgcggcaacgcccccgggacatgcatcgtcccctggactctctcaaaccccttatccctctggacagaatgcaggtccaaccacgctggtataccctcaaacccctcagacaatgaattcacaacctcaaacccgttctccgggaggattcagacctatccagtttttccagaggcctcaaatacagcctcctagagctaccatcccgaacagcagtccttccattcgtcctggtgcacagacacccactgcagtgtaccaggctaatcagcacatcatgatggttaaccatctgcccatgccgtacccagtgccccaggggcctcagtactgtataccacagtaccgtcatagtggccctccttatgttgggcccccccaacaatatccagttcaaccaccggggccaggtcctttttatcctggaccaggacctggggacttccccaatgcttatggaacgcctttttacccaagtcagccggtgtatcagtcagcacctatcatagtgcctacgcagcaacagccgcctccagccaagagagagaaaaaaactataagaattcgggatccaaaccagggaggtaaagacataacagaggagattatgtctggaggtggcagcagaaatcctactccacccataggaagacccacgtccacacctactcctcctcagctgcccagccaggtccccgagcacagccctgtggtttatgggactgtggagagcgctcatcttgctgccagcacccctgtcactgcagctagcgaccagaagcaagaggagaagccaaaaccagatccagtgttaaagtctccttccccagtccttaggctagtcctcagtggagagaagaaagaacaagaaggccagacatctgaaactactgcaatagtatccatagcagagcttcctctgcctccatcacctaccactgtttcttctgttgctcgaagtacaattgcagcccccacctcttctgctcttagtagccaaccaatattcaccactgctatagatgacagatgtgaactctcatccccaagagaagacacaattcctatacccagcctcacatcttgcacagaaacatcagaccctttaccaacaaatgaaaatgatgatgatatatgcaagaaaccctgtagtgtagcacctaatgatattccactggtttctagtactaacctaattaatgaaataaatggagttagcgaaaaattatcagccacggagagcattgtggaaatagtaaaacaggaagtattgccattgactcttgaattggagattctcgaaaatcccccagaagaaatgaaactggagtgtatcccagctcccatcaccccttccacagttccttcctttcctccaactcctccaactcctccagcttctcctcctcacactccagtcattgttcctgctgctgccactactgttagttctccgagtgctgccatcacagtccagagagtcctagaggaggacgagagcataagaacttgccttagtgaagatgcaaaagagattcagaacaaaatagaggtagaagcagatgggcaaacagaagagattttggattctcaaaacttaaattcaagaaggagccctgtcccagctcaaatagctataactgtaccaaagacatggaagaaaccaaaagatcggacccgaaccactgaagagatgttagaggcagaattggagcttaaagctgaagaggagctttccattgacaaagtacttgaatctgaacaagataaaatgagccaggggtttcatcctgaaagagacccctctgacctaaaaaaagtgaaagctgtggaagaaaatggagaagaagctgagccagtacgtaatggtgctgagagtgtttctgagggtgaaggaatagatgctaattcaggctccacagatagttctggtgatggggttacatttccatttaaaccagaatcctggaagcctactgatactgaaggtaagaagcagtatgacagggagtttctgctggacttccagttcatgcctgcctgtatacaaaaaccagagggcctgcctcctatcagtgatgtggttcttgacaagatcaaccaacccaaattgccaatgcgaactctggatcctcgaattttgcctcgaggaccagactttacaccagcctttgctgattttggaaggcagacacctggtggaagaggcgtacctttgttgaatgttgggtcacgaagatctcaacctggccaaagaagagaacccagaaagatcatcacagtttctgtaaaagaagatgtacacctgaaaaaggcagaaaatgcctggaagccaagccaaaaacgagacagccaagccgatgatcccgaaaacattaaaacccaggagctttttagaaaagttcgaagtatcttaaataaattgacaccacagatgttcaatcaactgatgaagcaagtgtcaggacttactgttgacacagaggagcggctgaaaggagttattgacctggtctttgagaaggctattgatgaacccagtttctctgtggcttacgcaaacatgtgtcgatgtctagtaacgctgaaagtacccatggcagacaagcctggtaacacagtgaatttccggaagctgctactgaaccgttgccagaaggagtttgaaaaagataaagcagatgatgatgtctttgagaagaagcagaaagaacttgaggctgccagtgctccagaggagaggacaaggcttcatgatgaactggaagaagccaaggacaaagcccggcggagatccattggcaacatcaagtttattggagaactctttaaactcaaaatgctgactgaagccatcatgcatgactgtgtggtgaagctgctaaagaaccatgatgaagaatccctggagtgcctgtgtcgcctgctcaccaccattggcaaagacttggactttgaaaaagcaaagccacgtatggaccagtactttaatcagatggagaaaattgtgaaagaaagaaaaacctcatctaggattcggttcatgcttcaagatgttatagacctaaggctgtgcaattgggtatctcgaagagcagatcaagggcctaaaactatcgaacagattcacaaagaggctaaaatagaagaacaagaagagcaaaggaaggtccagcaactcatgaccaaagagaagagaagaccaggtgtccagagagtggacgaaggtgggtggaacactgtacaaggggccaagaacagtcgggtactggacccctcaaaattcctaaaaatcactaagcctacaattgatgaaaaaattcagctggtacctaaagcacagctaggcagctggggaaaaggcagcagtggtggagcaaaggcaagtgagactgatgccttacggtcaagtgcttccagtttaaacagattctctgccctgcaacctccagcaccctcagggtccacgccatccacgcctgtagagtttgattcccgaaggaccttaactagtcgtggaagtatgggcagggagaagaatgacaagccccttccatctgcaacagctcggccaaatactttcatgaggggtggcagcagtaaagacctgctagacaatcagtctcaagaagagcagcggagagagatgctggagaccgtgaagcagctcacaggaggtgtggatgtggagaggaacagcactgaggctgagcgaaataaaacaagggagtcagcaaaaccagaaatttcagcaatgtcagctcatgacaaggctgcattatcagaagaggaactggagaggaagtcgaaatctatcattgatgaatttctacacattaatgattttaaggaagccatgcagtgtgtggaagagctgaatgcccagggcctactacatgtttttgtgagagtgggagtggagtccaccctggaaaggagccagatcaccagggatcacatgggccaattactctatcagctggtacagtcagaaaaactcagcaaacaggactttttcaaaggtttttcagaaactttggaattggcagatgacatggccattgatattccccatatttggttgtaccttgctgaactggtgacccccatgttaaaagaaggtggaatctccatgagagaacttaccatagaatttagcaaacctttacttcctgttggaagagctggggtcttgctatctgaaatattgcacctactatgcaaacaaatgagccataagaaagtgggagccttatggagggaggctgacctcagctggaaggactttttaccagaaggagaagatgtacataattttcttttggagcagaagttggacttcatagagtctgacagtccctgttcctctgaagcactttcaaagaaagaactgtctgccgaagagctgtataagcgactcgagaaactcattattgaggacaaagcgaatgatgaacagatctttgactgggtagaggctaatctagacgaaatccagatgagttcacctacattccttagagctttaatgactgctgtttgtaaagcagctattatagccgactcttctaccttcagagtggacactgctgttatcaagcagagagtgccgatcttactcaagtacctagactcagatacagagaaggaactgcaagcactttatgcactacaagcatcgatagtaaaacttgatcaacctgccaatttgctgcggatgttttttgattgtctatatgacgaggaggtgatctccgaggatgccttctacaaatgggagagcagcaaggaccctgcagagcagaatgggaagggcgtggctctgaaatctgtcacggcattcttcacgtggctgcgggaagcagaagaggagtctgaggataactaaaacttcaaatacacaaaatgaaacaaaagaaacaatttaagtatttttttaaaaagtttcacgtcttcgccaatcacagtgcagcaaggccaattctcgcagaaacccccacgtgtgcacgagtgggagaggggaaagagaaaaaaaggtgatcatggaggaaaaaggtactggataaaagtaaacttcaaaccttagggcgggagcactaaaaccaaaatacatgtattatttatagaaaatattttctgttttaatcttttctttttaaacaaggactcatacttaaaaaaatgtttagcaaaaaaaaaaaaagttgagaacttttaatttattttaaggactgcaaatgccagtgtaattttttaatttgcagtttctgtaaacaacttgtataatagaaaagcagagaaataaatttccctccccttcaagatgcacctcatgtttgttttaaggtatagcatttagtccagatttgagaaagtttggggtgaacaaggtaagaaagatttttttttttttggcatcaaatctttctgcctgcctctcagcttgcttcagaaaatttaaaaaatcacaatagtaatcaaaacatacataacattgaaacagaaggaaatgctgtggaccacagaactccaagaattgtttaaaaaaaaaaaagtgctaccctgagaaaagtactcttaatactcttgaaatctttagagcaactttaaggcttgtaaatacatagaacaaatatttaaaaaaacaaaaagaaattgactcagtactatttcttttcactttgaaaatataaagaacaaaataaagacaaacattgcaagtttaaaagaaagtaaagtgacttctcctttggacagctgctgcatgtgtgcccattcctgggggtgctgtctggctatttattgtctaattcaaatcactcctgaggggagagagataaaacgagagagagtgagagagtgtgtgtatgtgcgtgtatgcgcacgtatgtgcatgcacatgtatgtatgtatat

SEQ ID NO: 1716 - DNA, 6276 bp, Homo sapiens
gagctcggcggctgggactggaggacagcggtggcggaggcgactagcggcggcgggagcggcgccgagaggccgtgcgggacgcgggcgccaggaccggccgaacgcagagaattcctagaggacctgtgcaacaacctcttgaggatcgaatcttcactcccgctgtctcagcagtctacagcacggtaacacaagtggcaagacagccgggaacccctaccccatccccttattcagcacatgaaataaacaaggggcatccaaatcttgcggcaacgcccccgggacatgcatcgtcccctggactctctcaaaccccttatccctctggacagaatgcaggtccaaccacgctggtataccctcaaacccctcagacaatgaattcacaacctcaaacccgttctccgtttttccagaggcctcaaatacagcctcctagagctaccatcccgaacagcagtccttccattcgtcctggtgcacagacacccactgcagtgtaccaggctaatcagcacatcatgatggttaaccatctgcccatgccgtacccagtgccccaggggcctcagtactgtataccacagtaccgtcatagtggccctccttatgttgggcccccccaacaatatccagttcaaccaccggggccaggtcctttttatcctggaccaggacctggggacttccccaatgcttatggaacgcctttttacccaagtcagccggtgtatcagtcagcacctatcatagtgcctacgcagcaacagccgcctccagccaagagagagaaaaaaactataagaattcgggatccaaaccagggaggtaaagacataacagaggagattatgtctggaggtggcagcagaaatcctactccacccataggaagacccacgtccacacctactcctcctcagctgcccagccaggtccccgagcacagccctgtggtttatgggactgtggagagcgctcatcttgctgccagcacccctgtcactgcagctagcgaccagaagcaagaggagaagccaaaaccagatccagtgttaaagtctccttccccagtccttaggctagtcctcagtggagagaagaaagaacaagaaggccagacatctgaaactactgcaatagtatccatagcagagcttcctctgcctccatcacctaccactgtttcttctgttgctcgaagtacaattgcagcccccacctcttctgctcttagtagccaaccaatattcaccactgctatagatgacagatgtgaactctcatccccaagagaagacacaattcctatacccagcctcacatcttgcacagaaacatcagaccctttaccaacaaatgaaaatgatgatgatatatgcaagaaaccctgtagtgtagcacctaatgatattccactggtttctagtactaacctaattaatgaaataaatggagttagcgaaaaattatcagccacggagagcattgtggaaatagtaaaacaggaagtattgccattgactcttgaattggagattctcgaaaatcccccagaagaaatgaaactggagtgtatcccagctcccatcaccccttccacagttccttcctttcctccaactcctccaactcctccagcttctcctcctcacactccagtcattgttcctgctgctgccactactgttagttctccgagtgctgccatcacagtccagagagtcctagaggaggacgagagcataagaacttgccttagtgaagatgcaaaagagattcagaacaaaatagaggtagaagcagatgggcaaacagaagagattttggattctcaaaacttaaattcaagaaggagccctgtcccagctcaaatagctataactgtaccaaagacatggaagaaaccaaaagatcggacccgaaccactgaagagatgttagaggcagaattggagcttaaagctgaagaggagctttccattgacaaagtacttgaatctgaacaagataaaatgagccaggggtttcatcctgaaagagacccctctgacctaaaaaaagtgaaagctgtggaagaaaatggagaagaagctgagccagtacgtaatggtgctgagagtgtttctgagggtgaaggaatagatgctaattcaggctccacagatagttctggtgatggggttacatttccatttaaaccagaatcctggaagcctactgatactgaaggtaagaagcagtatgacagggagtttctgctggacttccagttcatgcctgcctgtatacaaaaaccagagggcctgcctcctatcagtgatgtggttcttgacaagatcaaccaacccaaattgccaatgcgaactctggatcctcgaattttgcctcgaggaccagactttacaccagcctttgctgattttggaaggcagacacctggtggaagaggcgtacctatttgcaaagtgcagagcaggcatggattgccaattctggaacagagcaaagccccaacttgccctccactggtgatgtcacacccacccatgaagagcctgcctctagggttgttgaatgttgggtcacgaagatctcaacctggccaaagaagagaacccagaaagatcatcacagtttctgtaaaagaagatgtacacctgaaaaaggcagaaaatgcctggaagccaagccaaaaacgagacagccaagccgatgatcccgaaaacattaaaacccaggagctttttagaaaagttcgaagtatcttaaataaattgacaccacagatgttcaatcaactgatgaagcaagtgtcaggacttactgttgacacagaggagcggctgaaaggagttattgacctggtctttgagaaggctattgatgaacccagtttctctgtggcttacgcaaacatgtgtcgatgtctagtaacgctgaaagtacccatggcagacaagcctggtaacacagtgaatttccggaagctgctactgaaccgttgccagaaggagtttgaaaaagataaagcagatgatgatgtctttgagaagaagcagaaagaacttgaggctgccagtgctccagaggagaggacaaggcttcatgatgaactggaagaagccaaggacaaagcccggcggagatccattggcaacatcaagtttattggagaactctttaaactcaaaatgctgactgaagccatcatgcatgactgtgtggtgaagctgctaaagaaccatgatgaagaatccctggagtgcctgtgtcgcctgctcaccaccattggcaaagacttggactttgaaaaagcaaagccacgtatggaccagtactttaatcagatggagaaaattgtgaaagaaagaaaaacctcatctaggattcggttcatgcttcaagatgttatagacctaaggctgtgcaattgggtatctcgaagagcagatcaagggcctaaaactatcgaacagattcacaaagaggctaaaatagaagaacaagaagagcaaaggaaggtccagcaactcatgaccaaagagaagagaagaccaggtgtccagagagtggacgaaggtgggtggaacactgtacaaggggccaagaacagtcgggtactggacccctcaaaattcctaaaaatcactaagcctacaattgatgaaaaaattcagctggtacctaaagcacagctaggcagctggggaaaaggcagcagtggtggagcaaaggcaagtgagactgatgccttacggtcaagtgcttccagtttaaacagattctctgccctgcaacctccagcaccctcagggtccacgccatccacgcctgtagagtttgattcccgaaggaccttaactagtcgtggaagtatgggcagggagaagaatgacaagccccttccatctgcaacagctcggccaaatactttcatgaggggtggcagcagtaaagacctgctagacaatcagtctcaagaagagcagcggagagagatgctggagaccgtgaagcagctcacaggaggtgtggatgtggagaggaacagcactgaggctgagcgaaataaaacaagggagtcagcaaaaccagaaatttcagcaatgtcagctcatgacaaggctgcattatcagaagaggaactggagaggaagtcgaaatctatcattgatgaatttctacacattaatgattttaaggaagccatgcagtgtgtggaagagctgaatgcccagggcctactacatgtttttgtgagagtgggagtggagtccaccctggaaaggagccagatcaccagggatcacatgggccaattactctatcagctggtacagtcagaaaaactcagcaaacaggactttttcaaaggtttttcagaaactttggaattggcagatgacatggccattgatattccccatatttggttgtaccttgctgaactggtgacccccatgttaaaagaaggtggaatctccatgagagaacttaccatagaatttagcaaacctttacttcctgttggaagagctggggtcttgctatctgaaatattgcacctactatgcaaacaaatgagccataagaaagtgggagccttatggagggaggctgacctcagctggaaggactttttaccagaaggagaagatgtacataattttcttttggagcagaagttggacttcatagagtctgacagtccctgttcctctgaagcactttcaaagaaagaactgtctgccgaagagctgtataagcgactcgagaaactcattattgaggacaaagcgaatgatgaacagatctttgactgggtagaggctaatctagacgaaatccagatgagttcacctacattccttagagctttaatgactgctgtttgtaaagcagctattatagccgactcttctaccttcagagtggacactgctgttatcaagcagagagtgccgatcttactcaagtacctagactcagatacagagaaggaactgcaagcactttatgcactacaagcatcgatagtaaaacttgatcaacctgccaatttgctgcggatgttttttgattgtctatatgacgaggaggtgatctccgaggatgccttctacaaatgggagagcagcaaggaccctgcagagcagaatgggaagggcgtggctctgaaatctgtcacggcattcttcacgtggctgcgggaagcagaagaggagtctgaggataactaaaacttcaaatacacaaaatgaaacaaaagaaacaatttaagtatttttttaaaaagtttcacgtcttcgccaatcacagtgcagcaaggccaattctcgcagaaacccccacgtgtgcacgagtgggagaggggaaagagaaaaaaaggtgatcatggaggaaaaaggtactggataaaagtaaacttcaaaccttagggcgggagcactaaaaccaaaatacatgtattatttatagaaaatattttctgttttaatcttttctttttaaacaaggactcatacttaaaaaaatgtttagcaaaaaaaaaaaaagttgagaacttttaatttattttaaggactgcaaatgccagtgtaattttttaatttgcagtttctgtaaacaacttgtataatagaaaagcagagaaataaatttccctccccttcaagatgcacctcatgtttgttttaaggtatagcatttagtccagatttgagaaagtttggggtgaacaaggtaagaaagatttttttttttttggcatcaaatctttctgcctgcctctcagcttgcttcagaaaatttaaaaaatcacaatagtaatcaaaacatacataacattgaaacagaaggaaatgctgtggaccacagaactccaagaattgtttaaaaaaaaaaaagtgctaccctgagaaaagtactcttaatactcttgaaatctttagagcaactttaaggcttgtaaatacatagaacaaatatttaaaaaaacaaaaagaaattgactcagtactatttcttttcactttgaaaatataaagaacaaaataaagacaaacattgcaagtttaaaagaaagtaaagtgacttctcctttggacagctgctgcatgtgtgcccattcctgggggtgctgtctggctatttattgtctaattcaaatcactcctgaggggagagagataaaacgagagagagtgagagagtgtgtgtatgtgcgtgtatgcgcacgtatgtgcatgcacatgtatgtatgtatat

SEQ ID NO: 1717 - DNA, 2396 bp, Homo sapiens
cgaggctcgcgttccgccgctgcttccgtcgccggggcgggcgccgcggtgtccctgccgagcgtgagccccgaactgtcaccgcgccgagccccagcctcatccgtcggtgtccgcggtccgagctttccccgcctcgctggcggcccgcgctctcccccgccgtgcgcgttcgccgctgtggcctgtagctacctcgcctcgctgctttgtctccgctgctcttgccgtccttcccgcggccttctgcgggcggggctgtcggctgtcgctttgctgctccgcgacggcggccttgagtctcgctcccccggtgggaaacgtagaactggttactcgccaccttaggcggtggggtttgaatgagagcggtgcctcggtaggtcgtcagaaagttacagtcgcccatctgagcgtttgtaagagatggaggcaggagtggtgagaattcctagaggacctgtgcaacaacctcttgaggatcgaatcttcactcccgctgtctcagcagtctacagcacggtaacacaagtggcaagacagccgggaacccctaccccatccccttattcagcacatgaaataaacaaggggcatccaaatcttgcggcaacgcccccgggacatgcatcgtcccctggactctctcaaaccccttatccctctggacagaatgcaggtccaaccacgctggtataccctcaaacccctcagacaatgaattcacaacctcaaacccgttctccgtttgcagcggggcctcgacctccccatcatcagtttttccagaggcctcaaatacagcctcctagagctaccatcccgaacagcagtccttccattcgtcctggtgcacagacacccactgcagtgtaccaggctaatcagcacatcatgatggttaaccatctgcccatgccgtacccagtgccccaggggcctcagtactgtataccacagtaccgtcatagtggccctccttatgttgggcccccccaacaatatccagttcaaccaccggggccaggtcctttttatcctggaccaggacctggggacttccccaatgcttatggaacgcctttttacccaagtcagccggtgtatcagtcagcacctatcatagtgcctacgcagcaacagccgcctccagccaagagagagaaaaaaactataagaattcgggatccaaaccagggaggtaaagacataacagaggagattatgtctggaggtggcagcagaaatcctactccacccataggaagacccacgtccacacctactcctcctcagcagctgcccagccaggtccccgagcacagccctgtggtttatgggactgtggagagcgctcatcttgctgccagcacccctgtcactgcagctagcgaccagaagcaagaggagaagccaaaaccagatccagtgttaaagtctccttccccagtccttaggctagtcctcagtggagagaagaaagaacaagaaggccagacatctgaaactactgcaatagtatccatagcagagcttcctctgcctccatcacctaccactgtttcttctgttgctcgaagtacaattgcagcccccacctcttctgctcttagtagccaaccaatattcaccactgctatagatgacagatgtgaactctcatccccaagagaagacacaattcctatacccagcctcacatcttgcacagaaacatcagaccctttaccaacaaatgaaaatgatgatgatatatgcaagaaaccctgtagtgtagcacctaatgatattccactggtttctagtactaacctaattaatgaaataaatggagttagcgaaaaattatcagccacggagagcattgtggaaatagtaaaacaggaagtattgccattgactcttgaattggagattctcgaaaatcccccagaagaaatgaaactggagtgtatcccagctcccatcaccccttccacagttccttcctttcctccaactcctccaactcctccagcttctcctcctcacactccagtcattgttcctgctgctgccactactgttagttctccgagtgctgccatcacagtccagagagtcctagaggaggacgagagcataagaacttgccttagtgaagatgcaaaagagattcagaacaaaatagaggtagaagcagatgggcaaacagaagagattttggattctcaaaacttaaattcaagaaggagccctgtcccagaaacatcgaatgaatgctgaaattcctagtctggtttcttcagtggtgtgtttgtgttttagtacaacctgcaaaagagttactccattgtctaaaaatgcaaatgagaatttccaaatatacaaaatgcctccaaggtatatgtcacgaa

SEQ ID NO: 1718 - DNA, 2942 bp, Homo sapiens
tggagtgcagtggcgcgatctgggctcactgcaacctccacctcccaggttcaagcgattctcctgcctcaacctgccaagtagctgggactacaggcgtgcacctccacacctagctaatttttgtattttcaggagagacgggggtttcaccatgttggccaggatggtctcaatcttttgaccttgtgatccgcccaccttggcctcccaaagtgctgggattacaggcatgagtcaccgcgcccagccaatatgctatatttttgtatgactggcagcactgtaggtttgtttacaccaatgtcaccacaaacaagtgagtaacgtgctgcgctgtgatattaccacagctatcatgttaaccaggtaataggaggttttcagttccattataatcttaagggaccaccattgtatatgtggtctgttgaccaaatattgttacacagcacatgaccataaaagaataacttagtaataactataccttctagctataatcttcagggtattctttatctgagtttcataagtatagctaaggtctgtggaatttatagcaactatcgtgtgtgggtgtgggtgtgtttgtgtgtgtgtgtgtgtgtttaatggagatggcgtctcactatgttggctaggttgggcttgaactcctggcctcaagctgtcctccctcctcagcctcctaaattgctgggattacaggcatgagccactgcacccagcctatcgtctgttgttaaatgttctaatgcacctattaggtgcacagagtactgttatatactcagaataaaatttacataatgctttaaatctcacaaaattgttttgataaacatactcttataattcttgcaacaccttgggaaatagttggttctatattactgttttatagctgaggagaaagactcacatcatttactaagatcatatagctagctagtaaatgtttgagtgaaaatacaaacaaaggttttctgactttaagagcttgagttttttccactataccatattgcatctgttgtaattgttaactaatgtgcattttaaaattctcatttgtcttatgtactgagcccttataccagtgctaatttatgtgactcctttctcctgcagctaagagaaaaatacctttttaattcatttatagtacccagtttttaaagaagatttattttgtaaaattttgcttatggtacatgtcatcttagcctgtaaataaattaaagcattaatttttatccctccctggtcttttcctccttctgactttatacgtctttctagagagcttatcttctataataacaattctttgttttaaagtgagaaagatcagtctaaagaaaaggagaagaaagtgaaaaaaacaattccttcctgggctaccctttctgccagccagctagccagggcccagaaacaaacaccgatggcttcttccccacgtcccaagatggatgcaatcttaactgaggccattaaggctaatctagacgaaatccagatgagttcacctacattccttagagctttaatgactgctgtttgtaaagcagctattatagccgactcttctaccttcagagtggacactgctgttatcaagcagagagtgccgatcttactcaagtacctagactcagatacagagaaggaactgcaagcactttatgcactacaagcatcgatagtaaaacttgatcaacctgccaatttgctgcggatgttttttgattgtctatatgacgaggaggtgatctccgaggatgccttctacaaatgggagagcagcaaggaccctgcagagcagaatgggaagggcgtggctctgaaatctgtcacggcattcttcacgtggctgcgggaagcagaagaggagtctgaggataactaaaacttcaaatacacaaaatgaaacaaaagaaacaatttaagtatttttttaaaaagtttcacgtcttcgccaatcacagtgcagcaaggccaattctcgcagaaacccccacgtgtgcacgagtgggagaggggaaagagaaaaaaaggtgatcatggaggaaaaaggtactggataaaagtaaacttcaaaccttagggcgggagcactaaaaccaaaatacatgtattatttatagaaaatattttctgttttaatcttttctttttaaacaaggactcatacttaaaaaaatgtttagcaaaaaaaaaaaaagttgagaacttttaatttattttaaggactgcaaatgccagtgtaattttttaatttgcagtttctgtaaacaacttgtataatagaaaagcagagaaataaatttccctccccttcaagatgcacctcatgtttgttttaaggtatagcatttagtccagatttgagaaagtttggggtgaacaaggtaagaaagatttttttttttttggcatcaaatctttctgcctgcctctcagcttgcttcagaaaatttaaaaaatcacaatagtaatcaaaacatacataacattgaaacagaaggaaatgctgtggaccacagaactccaagaattgtttaaaaaaaaaaaagtgctaccctgagaaaagtactcttaatactcttgaaatctttagagcaactttaaggcttgtaaatacatagaacaaatatttaaaaaaacaaaaagaaattgactcagtactatttcttttcactttgaaaatataaagaacaaaataaagacaaacattgcaagtttaaaagaaagtaaagtgacttctcctttggacagctgctgcatgtgtgcccattcctgggggtgctgtctggctatttattgtctaattcaaatcactcctgaggggagagagataaaacgagagagagtgagagagtgtgtgtatgtgcgtgtatgcgcacgtatgtgcatgcacatgtatgtatgtatat

SEQ ID NO: 1719 - DNA, 2573 bp, Homo sapiens
cgaggctcgcgttccgccgctgcttccgtcgccggggcgggcgccgcggtgtccctgccgagcgtgagccccgaactgtcaccgcgccgagccccagcctcatccgtcggtgtccgcggtccgagctttccccgcctcgctggcggcccgcgctctcccccgccgtgcgcgttcgccgctgtggcctgtagctacctcgcctcgctgctttgtctccgctgctcttgccgtccttcccgcggccttctgcgggcggggctgtcggctgtcgctttgctgctccgcgacggcggccttgagtctcgctcccccggtgggaaacgtagaactggttactcgccaccttaggcggtggggtttgaatgagagcggtgcctcggtaggtcgtcagaaagttacagtcgcccatctgagcgtttgtaagagatggaggcaggagtggtgaggttgattcttcaccacactgaaaccattaggaaaaatccttgtggttaacagcagaggcttcagagtgtaacctgtactcgggcctagaaattatttaaaatggcgactgatacgtctcaaggtgaactcgtccatcctaaggcactcccacttatagtaggagctcagctgatccacgcggacaaaaggtagaagatagcaccatgccgattcgtcgaactgtgaattctacccgggaaactcctcccaaaagcaagcttgctgaaggggaggaagaaaagccaggtaacacaagtggcaagacagccgggaacccctaccccatccccttattcagcacatgaaataaacaaggggcatccaaatcttgcggcaacgcccccgggacatgcatcgtcccctggactctctcaaaccccttatccctctggacagaatgcaggtccaaccacgctggtataccctcaaacccctcagacaatgaattcacaacctcaaacccgttctccgtttttccagaggcctcaaatacagcctcctagagctaccatcccgaacagcagtccttccattcgtcctggtgcacagacacccactgcagtgtaccaggctaatcagcacatcatgatggttaaccatctgcccatgccgtacccagtgccccaggggcctcagtactgtataccacagtaccgtcatagtggccctccttatgttgggcccccccaacaatatccagttcaaccaccggggccaggtcctttttatcctggaccaggacctggggacttccccaatgcttatggaacgcctttttacccaagtcagccggtgtatcagtcagcacctatcatagtgcctacgcagcaacagccgcctccagccaagagagagaaaaaaactataagaattcgggatccaaaccagggaggtaaagacataacagaggagattatgtctggaggtggcagcagaaatcctactccacccataggaagacccacgtccacacctactcctcctcagcagctgcccagccaggtccccgagcacagccctgtggtttatgggactgtggagagcgctcatcttgctgccagcacccctgtcactgcagctagcgaccagaagcaagaggagaagccaaaaccagatccagtgttaaagtctccttccccagtccttaggctagtcctcagtggagagaagaaagaacaagaaggccagacatctgaaactactgcaatagtatccatagcagagcttcctctgcctccatcacctaccactgtttcttctgttgctcgaagtacaattgcagcccccacctcttctgctcttagtagccaaccaatattcaccactgctatagatgacagatgtgaactctcatccccaagagaagacacaattcctatacccagcctcacatcttgcacagaaacatcagaccctttaccaacaaatgaaaatgatgatgatatatgcaagaaaccctgtagtgtagcacctaatgatattccactggtttctagtactaacctaattaatgaaataaatggagttagcgaaaaattatcagccacggagagcattgtggaaatagtaaaacaggaagtattgccattgactcttgaattggagattctcgaaaatcccccagaagaaatgaaactggagtgtatcccagctcccatcaccccttccacagttccttcctttcctccaactcctccaactcctccagcttctcctcctcacactccagtcattgttcctgctgctgccactactgttagttctccgagtgctgccatcacagtccagagagtcctagaggaggacgagagcataagaacttgccttagtgaagatgcaaaagagattcagaacaaaatagaggtagaagcagatgggcaaacagaagagattttggattctcaaaacttaaattcaagaaggagccctgtcccagaaacatcgaatgaatgctgaaattcctagtctggtttcttcagtggtgtgtttgtgttttagtacaacctgcaaaagagttactccattgtctaaaaatgcaaatgagaatttccaaatatacaaaatgcctccaaggtatatgtcacgaa

SEQ ID NO: 1720-1795 - skipped (76 entries)

SEQ ID NO: 1796 - DNA, 571 bp, Homo sapiens
gttgctggctttttcaggagctgctcgctcgcagccagagacgctgctttttttttccgggttcggagccgttccggatgctttaggctgccggatgtctgatctccgaataactgaggcgtttctgtacatggattatctgtgttttagagcactttgctgcaagggaccaccacctgcacgaccagaatatgacctggtttgcataggcctcacaggttctggcaaaaccagtctgttgtccaaactctgcagtgaaagccccgataacgtcgtgtcgaccacaggttttagtattaaagcagtgccattccagaatgccatcttgaatgtaaaagaacttggaggatggagctatgacattgaagagaggaaggttccaaaacccaagtccaagtcttatggtgcaaacttttcttggaacaaaagaacaagagtatccacaaaataggttggcactgactatatctctgcttgactgtgaataaagtcagctgtgcagtatttatagtccatgtataataaatacatctcttaatctcctaataaattggacctttaaactacagat

SEQ ID NO: 1797 - DNA, 613 bp, Homo sapiens
gttgctggctttttcaggagctgctcgctcgcagccagagacgctgctttttttttccgggttcggagccgttccggatgctttaggctgccggatgtctgatctccgaataactgaggcgtttctgtacatggattatctggatatcactactttaactggagttccagaagagcatataaaaactagaaaagtcaggatctttgttcctgctcgcaataacatgcagtctggagtaaacaacacaaagaaatggaagatggagtttgataccagagagcgatgggaaaatcctttgatgggttgggcatcaacggctgatcccttatccaacatggttctaaccttcagtactaaagaagatgcagtttcctttgcagaaaaaaatggatggagctatgacattgaagagaggaaggttccaaaacccaagtccaagtcttatggtgcaaacttttcttggaacaaaagaacaagagtatccacaaaataggttggcactgactatatctctgcttgactgtgaataaagtcagctgtgcagtatttatagtccatgtataataaatacatctcttaatctcctaataaattggacctttaaactacagat

SEQ ID NO: 1798 - DNA, 511 bp, Homo sapiens
gttgctggctttttcaggagctgctcgctcgcagccagagacgctgctttttttttccgggttcggagccgttccggatgctttaggctgccggatgtctgatctccgaataactgaggcgtttctgtacatggattatctgtgttttagagcactttgctgcaagggaccaccacctgcacgaccagaatatgacctggtttgcataggcctcacaggttctggcaaaaccagtctgttgtccaaactctgcagtgaaagccccgataacgtcgtgtcgaccacaggatggagctatgacattgaagagaggaaggttccaaaacccaagtccaagtcttatggtgcaaacttttcttggaacaaaagaacaagagtatccacaaaataggttggcactgactatatctctgcttgactgtgaataaagtcagctgtgcagtatttatagtccatgtataataaatacatctcttaatctcctaataaattggacctttaaactacagat

SEQ ID NO: 1799 - DNA, 1027 bp, Homo sapiens
gttgctggctttttcaggagctgctcgctcgcagccagagacgctgctttttttttccgggttcggagccgttccggatgctttaggctgccggatgtctgatctccgaataactgaggcgtttctgtacatggattatctgtgttttagagcactttgctgcaagggaccaccacctgcacgaccagaatatgacctggtttgcataggcctcacaggttctggcaaaaccagtctgttgtccaaactctgcagtgaaagccccgataacgtcgtgtcgaccacaggttttagtattaaagcagtgccattccagaatgccatcttgaatgtaaaagaacttggaggggctgataacatccggaaatactggagccgctactaccaaggatctcaaggggtaatatttgtattagacagtgcctcttcagaggatgatttagaagctgctagaaatgagctgcactcagctcttcagcatccacagttatgcactttaccctttttaatattggccaatcatcaagacaagccagcagctcgctcagtacaagaggatatcactactttaactggagttccagaagagcatataaaaactagaaaagtcaggatctttgttcctgctcgcaataacatgcagtctggagtaaacaacacaaagaaatggaagatggagtttgataccagagagcgatgggaaaatcctttgatgggttgggcatcaacggctgatcccttatccaacatggttctaaccttcagtactaaagaagatgcagtttcctttgcagaaaaaaatggatggagctatgacattgaagagaggaaggttccaaaacccaagtccaagtcttatggtgcaaacttttcttggaacaaaagaacaagagtatccacaaaataggttggcactgactatatctctgcttgactgtgaataaagtcagctgtgcagtatttatagtccatgtataataaatacatctcttaatctcctaataaattggacctttaaactacagat

SEQ ID NO: 1800 - DNA, 10012 bp, Homo sapiens
ggcgaccgaacgcggcggtcggcagcgttcgcgcgggggcctgcgaagcgctgctcggggccggcactgcccgcggggaggacgcgccgccgccgccacccagcgccgccgccgccgccgcctccagccgggccgccgcgcgtcccgggggccggccccgcgagcgcaggagtaaacaccgccggagtcttggagccgctgcagaagggaataaagagagatgcagggatttgtgaggttacggcgccccagctgcaagatgcactagccggctgaacccgggatcggctgacttgttggaaccggagtgctctgcacggagagtggtggatgagttgaagttgccttcccggggctcattttccacgctgccgagaggaatccgagaggcaaggcaatcacttcgtcttgccattgattgggtatcgggagctttttttttctcccctctctctttcttttcctccgtcttgttgcatgcaagaaaattacagtccgctgctcgcccgccctgggtgcgagatattcagccccgctctctcccgtgcattgtgcaacccaaagatgaaagaccgaaggggagaaagttaaagaaatcgcccacatgcgctggatcagtccacggcttggggaaaggcatccagagaaggtgggagcggagagtttgaagtctttacaggcgggaagatggcggactggagctgaaagtgttgattgggaaacttgggtgattcttgtgtttatttacaatcctcttgacccaggcaggacacatgcaggccaaaaaacgctatttcatcctgctctcagctggctcttgtctcgcccttttgttttatttcggaggcttgcagtttagggcatcgaggagccacagccggagagaagaacacagcggtaggaatggcttgcaccaccccagtccggatcatttctggccccgcttcccggacgctctgcgccccttcgttccttgggatcaattggaaaacgaggattccagcgtgcacatttccccccggcagaagcgagatgccaactccagcatctacaaaggcaagaagtgccgcatggagtcctgcttcgatttcaccctttgcaagaaaaacggcttcaaagtctacgtatacccacagcaaaaaggggagaaaatcgccgaaagttaccaaaacattctagcggccatcgagggctccaggttctacacctcggaccccagccaggcgtgcctctttgtcctgagtctggatactttagacagagaccagttgtcacctcagtatgtgcacaatttgagatccaaagtgcagagtctccacttgtggaacaatggtaggaatcatttaatttttaatttatattccggcacttggcctgactacaccgaggacgtggggtttgacatcggccaggcgatgctggccaaagccagcatcagtactgaaaacttccgacccaactttgatgtttctattcccctcttttctaaggatcatcccaggacaggaggggagagggggtttttgaagttcaacaccatccctcctctcaggaagtacatgctggtattcaaggggaagaggtacctgacagggataggatcagacaccaggaatgccttatatcacgtccataacggggaggacgttgtgctcctcaccacctgcaagcatggcaaagactggcaaaagcacaaggattctcgctgtgacagagacaacaccgagtatgagaacatcatctgagggttctccataaacacggttagccttccaagctgctgtcctgccagttgatatgaacatggcctgttcctcacagaaagactaacccatggcactgccagaagatatccttggatcgtggacagattaactggattaactgaaaaaagcacccattcagtcaatattatgggttttggaaaaatcttgctttgctgtggatttaaaatgaggtgcataatataatgccaactcattccaagtggtcattggcagaccattagctggaaaattgcttccagttttcatcactgtgcataactcaagttccctttggggagctgtctgtgcccttcactagaagtcctgttttagcatggcaactactggattattttattatgtgtgcagatggcatgatgttttagaaaaaaaaaattacagcaattctgcaatctcagtggaagtgttcacaatattatgccctggtaggaatgtaaacacgtctcgattatgttagttatgatgtctaaaggtatactgtccaactcttaagcactttatatgagaacactacaccaagatgaatcagcacattcagcacatgtgagaaatcaagtattttctttttatttttataaatcttagtggtttttttttttccggctcagactgtccaagacaaactccactactcgcatatccccagttgtttgtggtaggttgatgtaaatatggccacaatactgttagacttcacctccagatactttattgaacaactggtttacttctagcaccaaagggaagaagaagggggtccagtgatggtgatatcttagcttgcttctttgttcacaggcactattgaccacatgaacatacaggtactcaaatacaggaggcttctatttggctcctccaagggaggagttcctccaagggaaaaaaggggatggtattcttttaatcaaagaccatggtggatggatggtaagggcaacagaatgcaattcttttgtgtggtctgacgttaacacttcggaaaaaattctaagtcaagttgaaatcgccattctctcaagagagaaacatcaagagagaaacatcaagtgaccccactatgtgcctagagaaggaaaagggtcaagtcctatactaggttccttacttagggtagaacctactagtcccttgttaatcctttctgggattatacctgtgactaatttttttttttttaactatgtcttacgacaaagcacagtcctgggaaaccagtcaacttaattattgcttgtctttgagcattagagacatgttcatattgacttgctacataacactgtagcatgttttttcctgaaaatatcaagttggttgaatggaaagctcagcaaagtatgttctgtgtgcccactgtcccagcctgggactgacgggcatcagaggctttgctttaaaatatgggtaaccagttctggaagacttccaacgcaagcaagcttggtgttttagggtgtctccagatacataagcattgtctgcctccgctcagggtctcaggaaatacacagcccattggaaaccacccacgcctgagatttggaaacctgacggaaagggaggaaggtccaaatgagtcagcagcaggatgactcaccacaagcctggcaggctgcagagccagagaagggggcttccaacaaggaactcagagaagttgcagtcaccaccaagatctggcccttcggcaggtcagcaccaggactgccaggccctctgcagaccgtaattctcttcacatctataattaggaggccaaactccagctgccaacacccttggacacaatattccagtctccactgcccatctcatgtggttcagttctaatagcaggtcttcttcttcctttcattccttcctttattcagcaagcatttgttgagcatctactatgtgccaagcattgtgcttgggcaacaacagtccacaaagcagactccccacctgcccttatgaaactgtatctcctcctccccaacattatcaccaccccaccatttccacaatgaaaactgaattcagacagcattctccattctgccagagtaacctaggaagaagaacatggcagcagacggatcctcagggaggaggcagcagagtgacagatggtaaactgcatcaggccacatatttgcacctttcagatacagccaactcttccagggcctagactgagctggttggagctccccaaagcagcattcagttgcttttccttgatatccaccctggctacctatattccctttctttatataggcacaaccattcaccactacgctggattatctaacactccaattctataactcatccaggggacacacagttgagtctgatgaagcctaagaactgccaggtgctgagatattgtaactgggaattaagatttagccaaggacattgtgagactactgctgactctcttggaaaactggacatgctttgtagtgcaaatgttcactaaatgatggtggttcattgttacttactttggcctttgcaaaatattctgaacaattcaataagtagagtttcctagtttgtttgtttttttaagtcaaaggaacgctgtgaaattattgaaagatgatgggtgaagagggacctaggagaaggcaaaatgaagaccattaaagagccccattgaagactgtatctctaaaaatgccttaatgcctggcacatattccatatttgcatatgaactactattcttttccaaactgtcaacttctgtttgaaatcattgtgggggatagtttggaaatatggtggcataaaatccaagcagtcaagagctaaaccagcaaaaaagaggaatgacttcattcacaggctttggcttctttattatgtggtggtcctctgtgatctcccatggttaacttcaactgtgctgtactttcttcccaagatgcatgtacggaatgttacctcctagaaatccagaaatagttgtggtgagttttgtttgataggaagcaagaggtggggaagtaaaggatacatatttttatgtctaaggactgtaaactgttgatgcttgacttttccttttacctacacctgtgctacacctttattaaaaggctgacacccagacttgtgcaggaaaggcactcttgggaatgaacagaaatgaataattatgagactttccatggtgccaaggggattcgcttatttccactccagaactgaatatgcagagcattgccagtcctgctagtgtgaaaagcaaattacttcaatagtttgagacgtacctaggggaagagagatcctatcaactttctttgcgggtagtggcgtaccttcaaatccttgctcaggctctgtgaggtgtgcacccgcagatttcacttctacctccggaatcctggcaaacaagccaggaatctctccagagtcacttcgcagttgctcagaaagaggctaacggtccttagtcctgaggaaattctgccatttttaacattcaaggagaaaaggcgtatcagctgtacgtgagaatatcaactaaggataaaaacctctaatggatcccccttgttacttgcaaatgctttctttgtctgcaaatgtcacataattgattttgcataggaacaacaaaagtctcaaggaattgaagtttttaataccccccttagcactttactttcaccaaaacctcctctttctagtacatgagcagttttgttctttgtgatgttttcctctacattctttagaataattttgttacttgacaactagacttgtcaatcgtcttagactcttttgaaaaatctaatctttgaaaatgacacaaattcctttattgctttaaggctgttttcattcacccctcccacagccccctccactgcacttttttgttttttgcggggatttttttctttcatctctcttcttttaacatgatgctgtgggtagttttcaagaattctataaagaactcaacaaaaagtgtatttgttacctttttccccagtcctaatatttcttcttaagcttgatcttggtgaaaatttgttgcccaaaaagcagtgaggtagggattaataacgctgaccagtcatctggaagattaattaatcccagtgcagccctgagatcaggaaggaggacaggccaggagatgtttctactccaggcaccactaaggactctatttcaaaggcagatcctgctccttagtctttttagatctgaatctaatcctgaatccagaaaattatcctatgaattctggtttatcaacgcacatgattcctggcaccattgcatagcttcaaggtaaaagagagccttgtttccattattttgctatggtggcttttgggaagacagagagcattcttttgaaagcgggaaacttaaggaaaagttggccaagtacacaggaaagttctaccacaccttaatataaagaacaaaatagatgcttctcatttggggaaagtagctaaaaggacagtaacagtactgatggccttctgtccatcaccttagctccacagggaaaattctgggtgagagcaagcactgtttctaaaatctaaattttttcaggtgaaatttaccagcaacaaatgtaaaagggaactgccatcaggcatagggctagttttatacttcctgcctaacggcaaaatgactgagacatgacttccatggaacagcagaaaatggatgccaaagatatcataaaactgaagttcaatttgccacgtaaggctatttaaaaaccctgatgcactccaagcattcttccttcagagctttcctcctacaattatatcaagcacaagaaggcaccaacagcatatacttaatgtaatgtaaaagtaaacatatgacttgtgttgaattaccattggctggttgacataataagtgtcatagatatttagacattatttctgatcatacaaaattattttcataatttcatattcttttcaattttcataaattcttttcaattttcataaattggagccaatggtttgggaggttttttgtttgtttgtttgtttggttggttggttatttgttgcgttgttgttttccaaacctcagatattttgagaagccttagaaaggctcttaagcccaggcctttttgcctcatgtgcagagtattaataacagccctactgatgtgaacctcaaggaaggaggctattaaattaatccatcactggagatactaatacctcaaacaattaaaacactgaagactctgctggttgccttccacattgtttataacctttttaaattcagtcatttggatcaagagaaataaatggttggtttcatatggcttttgccacattagcacagacacatctaccaaatgtagaagtccagactgagtggatgcatgagagcaaacagatctgtaatatgattgcatttaatcaccgccaccgcccaaattctgtaaaaatatattcaaatatgtaatgctaaaaaaaatgcaaaacaggagactcttactagatcatgctttcacttagggtaggataactgatcttgaagataacttcatagaaaaatttgctggctgaaatgccccaggcacctcagggttggtcctgtcctattccacaaactgatcatggtcttctcccatcttctcagaggagttagccttgcctctaaaatagcaaaaatgccatgaaattatctttctaacctctatagagacttcttatccaagtataattccaaaaatatgatttgagtttgagcatgcctgtggtccttgattctatgatccctaaatcagttctacttttctcactctctctctctctctctctctctctctctctctctctctatatatatatatatatatatatatatatatatatatatatatatatatatatataatctccagtattttttttcaaccacaatttagtgcatttagcgtgttaatgttgggaactgcctgctggctctatgtctacttttgacaatgcttatgtccagataccatacagtgcatttgagagaggaccaaggttatgttttcccacataccagctgctgcagaggtttcgaagtgcctgacccagttctttttcacatcaaaaaggccttcggttgcagatggaaaccttaaagatgaatgtagagtggggtaggaaattcatgtttgaatgctgaaacccttgtcttttttagttttattcaattcccacctcagatcaccagaaagggaggcctctttggtgggtgttggccctcactgggggtaaaaggggttctatttgcttaaactcatgctcgtaggcaattttagggctctctggggctctgaatggtttctccaccaccacctttcttccaccaatagaaagatgttgtccttacaaggccatgtctgagaagaccatggtttaactagtaaaagaagctcacattgcagagagctgaataataccaggctcttgactttgtactgtgtgtcacagtcatgattgggacagaaggaaccagtctgctgaaaagtcaagccagcacaaatatttggaaactaattccactgaaactcttgtatcattaaatcatactattgtagtttcagttaatgtaattatttaatatcaggcactaaattaaatagctttgcacaaaattttagaaaagatcaatcttgtaacaaaatttaatattaacagtaaaaagcacctgagaaaagaaaatatcgatctgttgtggtttatatacttgagttattcttagaactttgtggagattgacactgctctgataaaaaggaagaaaatgttttgaattcaagaatgctagactaatagaaatagcccagtctctctgggccactgctcttcagtatggggtgctctctgtccctccttagcagatggggttgtttggaggctaaaatgagctaagggaagaagctatactgtgcctccaatatcccttatgtgtaattagagtgccgatctgggctgcaggctttattcaatgattcctttcccttacttgaggctttctctgtagagctgttatttctgagcctccattctgggatttacaaaggaaacagaatgatgaagaagtaacaatcagcattttacacacacgcacacacacacacacacacacactttttctaatatatgaggctagtctgcagagtccacagcccaggtgtccatttatttccacttcttcacctcccaaagatttagagctccatgatctaccaaggtgaagactgccaatcccaggttggagaagacccgtcagagtgtggaggtgccaaactgagaggcacaggaagcagacagccacatcaaacttttttgatgaactactgcaaattggtgtttgttctaggaaagaaagaggaagaaaaattacacaatgtgaattgaacataagagcagtgctctttacagagtatgagaagggaggatgggggagaatctgattaaaaaaatgattcattccttcacagacactaacaaacatggctaaaaagcacatgtcagaacacagaagcctaggtagatggttgacatttttataacttccttaagtgagtagttaaaccagcagtcttaattctgttggtcttccaagagtgtttaattacataagtattacctgtattcatttcccacaactgttgggtttttctttctttttttttttttttttttttttcctctgtgcatcctagaaaaactcccaggactagacttaggaggaggcaatcaagttatgtggtaaaacaagagtgccttttctgttggatatccactttagtttcctggcttccagggcataagatgtttagaaactttttttctctaaacataagaattattgtgtaccacaattttgaaccaccgatttccatatcttcagcagctatcaacttgccaattccctttgggtctcctttgtatattcttatgtttccttctgtttccagttgtcctcaaaaagagttgaggggggcatgactcttataaaatggataaaaatgaaactgtacagatgtttgcctcccttgtatctgtgagcatgatctctatcaggctggaaaatctgctttatcattttgtatatttgactattttgtattcagcattacttgactccttatgtgcatggcaatgtattaaaatgtgggatttctattaccgtgtaaa

SEQ ID NO: 1801 - DNA, 3448 bp, Homo sapiens
ggcgaccgaacgcggcggtcggcagcgttcgcgcgggggcctgcgaagcgctgctcggggccggcactgcccgcggggaggacgcgccgccgccgccacccagcgccgccgccgccgccgcctccagccgggccgccgcgcgtcccgggggccggccccgcgagcgcaggagtaaacaccgccggagtcttggagccgctgcagaagggaataaagagagatgcagggatttgtgaggttacggcgccccagctgcaagatgcactagccggctgaacccgggatcggctgacttgttggaaccggagtgctctgcacggagagtggtggatgagttgaagttgccttcccggggctcattttccacgctgccgagaggaatccgagaggcaaggcaatcacttcgtcttgccattgattgggtatcgggagctttttttttctcccctctctctttcttttcctccgtcttgttgcatgcaagaaaattacagtccgctgctcgcccgccctgggtgcgagatattcagccccgctctctcccgtgcattgtgcaacccaaagatgaaagaccgaaggggagaaagttaaagaaatcgcccacatgcgctggatcagtccacggcttggggaaaggcatccagagaaggtgggagcggagagtttgaagtctttacaggcgggaagatggcggactggagctgaaagtgttgattgggaaacttgggtgattcttgtgtttatttacaatcctcttgacccaggcaggacacatgcaggccaaaaaacgctatttcatcctgctctcagctggctcttgtctcgcccttttgttttatttcggaggcttgcagtttagggcatcgaggagccacagccggagagaagaacacagcggtaggaatggcttgcaccaccccagtccggatcatttctggccccgcttcccggacgctctgcgccccttcgttccttgggatcaattggaaaacgaggattccagcgtgcacatttccccccggcagaagcgagatgccaactccagcatctacaaaggcaagaagtgccgcatggagtcctgcttcgatttcaccctttgcaagaaaaacggcttcaaagtctacgtatacccacagcaaaaaggggagaaaatcgccgaaagttaccaaaacattctagcggccatcgagggctccaggttctacacctcggaccccagccaggcgtgcctctttgtcctgagtctggatactttagacagagaccagttgtcacctcagtatgtgcacaatttgagatccaaagtgcagagtctccacttgtggaacaatggtaggaatcatttaatttttaatttatattccggcacttggcctgactacaccgaggacgtggggtttgacatcggccaggcgatgctggccaaagccagcatcagtactgaaaacttccgacccaactttgatgtttctattcccctcttttctaaggatcatcccaggacaggaggggagagggggtttttgaagttcaacaccatccctcctctcaggaagtacatgctggtattcaaggggaagaggtacctgacagggataggatcagacaccaggaatgccttatatcacgtccataacggggaggacgttgtgctcctcaccacctgcaagcatggcaaagactggcaaaagcacaaggattctcgctgtgacagagacaacaccgagtatgagaaggcgagccctgctgagacttactgacaaaaagctcgagcgaatggggattgcccaggagaacctccggcagcacatcttacaacaggtgctccagctgaaggtgcgagaagaagtcagaaatctacagttactcacacaaggtaccctattgcttcctgatgggtggatggatggggagattagaagaaagaccaccttactattaggacagacaggagtcagggagaatttgttattgtttcttcacagaatttccatcatagaaaatagtatacagatttaagattacttccctttgaaaacttttttcatagctcactagggagaaggatgcacaaataagtaatggatgagcaaacagaattacctgagctaacttcaaggtggtcacgtacagttgtatggattgtgtactgcacaaccccagagaataccagtcacatcaatcagggtacgattgcactcactagagttgtataatgtgcagcctgcacaactgtacagtccagctgtagctatcttcacctgcgccaattgtgagggcgctttagcatttgagtgattcaatagttacgatgaccagtgatataagtggagtttttgttgtatttttgttttgcttttcaccggttagtgggagaaaaacattttagatatgtattactatacatgaatgtattatacacacacactttagagattgtaagaaccccatttagcttcttgaaagtggaataatttttataatagactatagtgaatctaaaactacactgttaagagtatataattcttaacaggaattataaataacttcaatatgatgagagcacttaagatctcaataactgtggaagtgacaaaataaagctagaattcgaagaaagccttaagttacactatatgtaactgatatgtctacatgagatttggatgctatcaaccttcattggctataaactttatttgttttattttagcgtccattgtacatcgttttaaatgaaaggatgataaaatatgtgtttttgagagccttgagtatttgtcattctgcagaatattgtaattgcatgcataccgatattggagaaatctgggtcagccaagtttcatgttattgcatttagattaacctagtaatagtccatttgcctagaggaaataatgtgctccctgaaagatgactattctagaaggataaatatagatttcaagtgatcgtaaaatagtattgtttgtctcatatgcattatttgcattttgtcctcagagatttccaatggtgaatttactggtatactaagtgatttaaatttgaatgtgaaatactgataggcttttaagcttcttttaagaagtagatagaaatacgaagattatgataagaaagtctgtcacagtgctatttggaaaacggaaaatttacaagcaacctagaggtccagcaatgtgaaaagaatcaagtaattctgcttaaattcataagattcagtataatgcccagttattaaaattacatctttaaagaatacatgacaacatgggaaattacgtaagtcatacaaggtgggaggaaaggtcatgtgtaaaattgtatgcataatataagcccaattttgtaaaaaccatatattcttatatgtacagaaaaaaaggactgcaagtaaatatgccaaccattttaataaaggatctctctggattgtggg

SEQ ID NO: 1802 - DNA, 2144 bp, Homo sapiens; identical to SEQ ID NO: 1133

SEQ ID NO: 1803 - DNA, 1989 bp, Homo sapiens
tttggagataaaaatgacaaaggagaacctcctgaacagcatccagtttgcttttagctttagccatctctctgacctcagtgctgctggactcagttccaagatctaactgtcaaatgctttaggggaaacgggaagagaagtccctggagtaacccatgtgcgcagcctggcactgttttcacttgcctttggaaatgaaggtgcagaaaccatgggagagatctgaaactggacaatgtcctgttggaccacgagggtcactgtaaactggcagacttcggaatgtgcaaggaggggatttgcaatggtgtcaccacggccacattctgtggcacgccagactatatcgctccagagatcctccaggaaatgctgtacgggcctgcagtagactggtgggcaatgggcgtgttgctctatgagatgctctgtggtcacgcgccttttgaggcagagaacgaagatgacctctttgaggccatactgaatgatgaggtggtctaccctacctggctccatgaagatgccacagggatcctaaaatctttcatgaccaagaaccccaccatgcgcttgggcagcctgactcagggaggcgagcacgccatcttgagacatcctttttttaaggaaatcgactgggcccagctgaaccatcgccaaatagaaccgcctttcagacccagaatcaaatcccgagaagatgtcagtaattttgaccctgacttcataaaggaagagccagttttaactccaattgatgagggacatcttccaatgattaaccaggatgagtttagaaacttttcctatgtgtctccagaattgcaaccatagccttatggggagtgagagagagggcacgagaacccaaagggaatagagattctccaggaatttcctctatgggaccttcccagcatcagccttagaacaagaaccttaccttcaaggagcaagtgaagaactctgtgaaggatggaactttcagatatcaactatttagagtccagagggagccatggcactagaaatagttgataatgaaatgagattttatgaagtataccgctccacctatgagcgtctgtctctgtgggcttgggatgttaacaggagccaaaaggagggaaagtgtgaagaataaagtagatctgagaaattctgagccaatcaggcttcttaattcaagagacaaaccaagacgttctgtcaactgtgctgtgctcttctttaagccaatgaaccccaattcctggcagtctacaagaagtctcttaatgctaatgaagaatttaaaggtctttttaaggaaatgaagggctttccaaatagaatgatttactctgaagaaacaaacaatggtatctctgaaactcacaacctaaagcccaatcttgaaaatatgttgtgcaccaagacgactgcttcagcttcttctcttatccttactttctttaatagatatttattaaactgtccagtgaaaaggtgccacaatgcccagtattgtaaacaacaggtttgcattcatgaagctttcattcattctggagtctactaatttacctgaatggtgtttgcattctgtgaaatgcctctccacgttgcatatgtcacacttttgtctgcacataactcttttttcacaagaagggtcactgccacaacagcacagtcagcgggtgaattacaggtgcctgctgcctgcctacctgggtaatctgatcttgtctgtatcgccgtgtgctcatcactgaagaattgcaggccactcatgtcagtgaccagatttgtggcttataaacattagcagtttatttatgttttaagatgcaaagatgtgtgtttgatattcactttaataattagaaatggatcttgtaaacagggcatatatcaaagatgaccttataatatgtacccgaatatacagttcaagaattttgtctgactggaaataaatgcattttgtagcaaaaggaa

SEQ ID NO: 1804 - DNA, 958 bp, Homo sapiens
cttgaaggaagggtgttgggtgaactaacactattttctcctgccctttcccccaatctcaatccctttctctccaaacattcttccttgagcaccccactctggcactcaaaaagccatgggaatgggaaagaagtggctggaagtaaacagcctgcttactcacagcaactgaaaattttgtttcgacgattctggttccaggggcaggagctgaagattaatgcctggagtctgccccattctgagagcagcagcctggctcctggtggctccagcagcagatggggcgtccttactcccagtctttccagatgttcttcccactcctcaactgctcctggctcagaaaccctgcacacctggaagaaagtgagaaccagtttttcaacaaacacattgcacagacttattgtgaaccccgggtggaatcaagcatcggaggaagagaacgtgggtcttgctgtgtccctaggctggagtgcagtggtgcagtctcaattatgccagatggctctgaggtccaagtaaaagataatatttgcaaccaactcactggagttgaccatcaaaactcttttccaggcacactcaggcatcgcagaaaataatatgtattgtggaatccctcacttgatgaataatctagatgatcagaaatgtggcactattttggctttcaggtggaaaagcaccctgaatccagcttcctgctatgaatgaatactgagcttgggttggtggaaattgattttcgagataaagaatccagccaggactgtgaagccccagggaatggctgcacttcaagtcagaaggagcctgggtccctgaatcatcatgtggaaggctctccacccagttcaatggtgcaatggaccacaagcaggaacttaatttagaatgtgcttattttgttagattttgtaattaaaaaatggatcccactctgactgaa

SEQ ID NO: 1805 - DNA, 1021 bp, Homo sapiens
cttgaaggaagggtgttgggtgaactaacactattttctcctgccctttcccccaatctcaatccctttctctccaaacattcttccttgagcaccccactctggcactcaaaaagccatgggaatgggaaagaagtggctggaagtaaacagcctgcttactcacagcaactgaaaattttgtttcgacgattctggttccaggggcaggagctgaagattaatgcctggagtctgccccattctgagagcagcagcctggctcctggtggctccagcagcagccttcatatctgtttttttcttatgaagcttcttctggttggaaacttgtcaaatttcatcagatggggcgtccttactcccagtctttccagatgttcttcccactcctcaactgctcctggctcagaaaccctgcacacctggaagaaagtgagaaccagtttttcaacaaacacattgcacagacttattgtgaaccccgggtggaatcaagcatcggaggaagagaacgtgggtcttgctgtgtccctaggctggagtgcagtggtgcagtctcaattatgccagatggctctgaggtccaagtaaaagataatatttgcaaccaactcactggagttgaccatcaaaactcttttccaggcacactcaggcatcgcagaaaataatatgtattgtggaatccctcacttgatgaataatctagatgatcagaaatgtggcactattttggctttcaggtggaaaagcaccctgaatccagcttcctgctatgaatgaatactgagcttgggttggtggaaattgattttcgagataaagaatccagccaggactgtgaagccccagggaatggctgcacttcaagtcagaaggagcctgggtccctgaatcatcatgtggaaggctctccacccagttcaatggtgcaatggaccacaagcaggaacttaatttagaatgtgcttattttgttagattttgtaattaaaaaatggatcccactctgactgaa

SEQ ID NO: 1806 - DNA, 1507 bp, Homo sapiens
aaaacccttccctcccccgctcccccggaagtgcttttccaagattcgggccggagagaggccttgtaggcacagcggctgagactcgatctgctccaagtaggggctccagcgcgggtcggagtctgggggttcgcgcccgccgacccgcgccctgctccctctcagcacctgggcggacgggatgtgtttggccaaatgggagagtggttacaacacacgagctacaaactacaatgctggagacagaagcactgattatgggatatttcagatcaatagccgctactggtgtaatgatggcaaaaccccaggagcagttaatgcctgtcatttatcctgcagtgctttgctgcaagataacatcgctgatgctgtagcttgtgcaaagagggttgtccgtgatccacaaggcattagagcatgggtggcatggagaaatcgttgtcaaaacagagatgtccgtcagtatgttcaaggttgtggagtgtaactccagaattttccttcttcagctcattttgtctctctcacattaagggagtaggaattaagtgaaaggtcacactaccattatttccccttcaaacaaataatatttttacagaagcaggagcaaaatatggcctttcttctaagagatataatgttcactaatgtggttattttacattaagcctacaacatttttcagtttgcaaatagaactaatactggtgaaaatttacctaaaaccttggttatcaaatacatctccagtacattccgttctttttttttttgagacagtctcgctctgtcgcccaggctggagtgcagtggcgcaatctcggctcactgcaacctccacctcccgggttcacgccattctcctgcctcagcctcccgagtagctgggattacgggcgcccgccaccacgcccggctaattttttgtatttttagtagagacagggtttcaccgtgttagccaggatggtctcgatctcctgaccttgtgatccacccacctcggcctcccaaagtgctgggattacaggcgtgagccactgcgcccggccacattcagttcttatcaaagaaataacccagacttaatcttgaatgatacgattatgcccaatattaagtaaaaaatataagaaaaggttatcttaaatagatcttaggcaaaataccagctgatgaaggcatctgatgccttcatctgttcagtcatctccaaaaacagtaaaaataaccactttttgttgggcaatatgaaatttttaaaggagtagaataccaaatgatagaaacagactgcctgaattgagaattttgatttcttaaagtgtgtttctttctaaattgctgttccttaatttgattaatttaattcatgtattatgattaaatctgaggcagatgagcttacaagtattgaaataattactaattaatcacaaatgtgaagttatgcatgatgtaaaaaatacaaacattctaattaaaggctttgcaacac

SEQ ID NO: 1807 - DNA, 1603 bp, Homo sapiens
aaaacccttccctcccccgctcccccggaagtgcttttccaagattcgggccggagagaggccttgtaggcacagcggctgagactcgatctgctccaagtaggggctccagcgcgggtcggagtctgggggttcgcgcccgccgacccgcgccctgctccctctcagcacctgggcggacgaaatgaccattaagaagtagatgcccagatgcaaaagtgatgaaacagtccatttgtcataaagtaagatgcagctgtggcatgtcaaccagcttgggatgtgtttggccaaatgggagagtggttacaacacacgagctacaaactacaatgctggagacagaagcactgattatgggatatttcagatcaatagccgctactggtgtaatgatggcaaaaccccaggagcagttaatgcctgtcatttatcctgcagtgctttgctgcaagataacatcgctgatgctgtagcttgtgcaaagagggttgtccgtgatccacaaggcattagagcatgggtggcatggagaaatcgttgtcaaaacagagatgtccgtcagtatgttcaaggttgtggagtgtaactccagaattttccttcttcagctcattttgtctctctcacattaagggagtaggaattaagtgaaaggtcacactaccattatttccccttcaaacaaataatatttttacagaagcaggagcaaaatatggcctttcttctaagagatataatgttcactaatgtggttattttacattaagcctacaacatttttcagtttgcaaatagaactaatactggtgaaaatttacctaaaaccttggttatcaaatacatctccagtacattccgttctttttttttttgagacagtctcgctctgtcgcccaggctggagtgcagtggcgcaatctcggctcactgcaacctccacctcccgggttcacgccattctcctgcctcagcctcccgagtagctgggattacgggcgcccgccaccacgcccggctaattttttgtatttttagtagagacagggtttcaccgtgttagccaggatggtctcgatctcctgaccttgtgatccacccacctcggcctcccaaagtgctgggattacaggcgtgagccactgcgcccggccacattcagttcttatcaaagaaataacccagacttaatcttgaatgatacgattatgcccaatattaagtaaaaaatataagaaaaggttatcttaaatagatcttaggcaaaataccagctgatgaaggcatctgatgccttcatctgttcagtcatctccaaaaacagtaaaaataaccactttttgttgggcaatatgaaatttttaaaggagtagaataccaaatgatagaaacagactgcctgaattgagaattttgatttcttaaagtgtgtttctttctaaattgctgttccttaatttgattaatttaattcatgtattatgattaaatctgaggcagatgagcttacaagtattgaaataattactaattaatcacaaatgtgaagttatgcatgatgtaaaaaatacaaacattctaattaaaggctttgcaacac

SEQ ID NO: 1808 - DNA, 2647 bp, Homo sapiens
agggcgcgcaggcggcgcgggtgcgcggtgcggcgctggtatccagaggacgcggtcaccgcctctggcatttgtcgttctgcgcttctccgcaaggaccctctgttaggcaggcgcccaccgtaagcctcccgggccttgtgaacctgcaaacccaagtctgagagacgatccgccttcagcgctttccagcttggcagagaggctttcccggcggggatctttggttggcgctggcgatgcgcggggaagaaaggcgaggagcggcgtccaggctgggtgatgtcccagcacgagtaggcgggatgcgctcgcttggtcctccgggcgcccggtccctgcccgcgtcgcgcgcccacccctggggacgagaaggcggccgcctgaggacccccgcccgcgacctccgcgagtctggagcgcagaggacagggtctggctgctctttggccttggatggaaagtggggaattgggtggggggctgcggaccccttaacgtggattacttggtgtgtatcagctgggctcagaagacccacgacctcttctccatccgtggattgatttgttctgcttaacagctgggtcgccaagctggagagggtctcgctgttggagttggatttggggctatagaaaagacggcatctgctacctttgagagtgccaggaatttggccattggaatcgggatccagaatttccccgagggcctggctgtcagccttcccttgcgaggggcaggcttctccacctggagagctttctggtatgggcagctgagcggcatggtggagcccctggccggggtctttggtgcctttgccgtggtgctggctgagcccatcctgccctacgctctggcctttgctgccggtgccatggtctacgtggtcatggacgacatcatccccgaagcccagatcagtggtaatgggaaactggcatcctgggcctccatcctgggatttgtagtgatgatgtcactggacgttggcctgggctagggctgagacgcttcggaccccgggaaaggccatacgaagaaacagcagtggttggcttctatgggacaacaagcttctttcttcacattaaaacttttttccttcctctcttcttcatctcattatcctgattgactctgattataatagaaccatttttactttgctttgagggagatttttgatttaatggggaattttaaggtgtcatggaaatacagattctttgttttggccactgaatggactctctcttcagtgggattatcaaggaacttcagatcagggaaatctccacttcgggaccttctatctgcctcccaactcctcaaggtcacctatagaagcgagctaccaaaagacgtctcctaagcattttggtggcctagtgactcagggcagagtggccagcacacctctcatccgcccctcctgctccatcactgctgagcctctccccatctagaatgttggaactggagcatcataaagatagcaagctaccttccaaggccgagccagcccagagaggagcatgtcttcctttacctccccctaaggagatactacatgggagggggacacagaaaaagggaaggaaattggctagtctggctttttttttttttttttttaaaggcaaagattgacattattgaaggaaaggggatgaggacaactgtgaactcacagtgagccctgtggaaagaagagacagacagagtgtgggtttgttcggaggcctctgctgtcaatggattccaggagcaaggccatttgtcgcgctttccaaatttcttaggcatttattttgataagtttatagccatcatgtttctaagagacttggagacaccagcaaactgctagaactcaaactcttcaattactcaaagaaggagccatttcagttaactcaagtgaatgaaagagttttggaatctgctgtgggtccttccctgttgaccatttggtaacttataatctgacaaaaactcttgagctgcaacaggccttgccagagggctcaggatgggaaaggaagaaggggataggaaaagaagaggtaattttacatttcccctttaaagtaaattttagccaactcatcattctgaaatgtccctataaagaatgagtcgaactagaccagaagccagcctactccttcttacatagcttctccaacaggggtagcaatgacctgtccacttcaaacacagataaggcctgccatcctcattggttaaaggcacacgtgagactttcagtgggctctgctgagaaggaaggcagcccaggagtcaggtatgcaggcattgcattgtcagtgtctgctctcagagtttacacattcaattgcttccaagggtgaatctcctgctctgtgaatgctatcagaccccaaaggccaaccttgggctgggtctatgtacgttcttccgaagcactgatgatcaaaattgaagacacattcagaggtttgattggttgagattaactggtgtggtggttggtgtatgtatgttttatttttatgtctttgtatgtagttctacataatgcaaattgtgctttctgatggacaagacctcataactgtgattaatatcaataaaaaggggatgttgtggatga

SEQ ID NO: 1809 - DNA, 2577 bp, Homo sapiens
agggcgcgcaggcggcgcgggtgcgcggtgcggcgctggtatccagaggacgcggtcaccgcctctggcatttgtcgttctgcgcttctccgcaaggaccctctgttaggcaggcgcccaccgtaagcctcccgggccttgtgaacctgcaaacccaagtctgagagacgatccgccttcagcgctttccagcttggcagagaggctttcccggcggggatctttggttggcgctggcgatgcgcggggaagaaaggcgaggagcggcgtccaggctgggtgatgtcccagcacgagtaggcgggatgcgctcgcttggtcctccgggcgcccggtccctgcccgcgtcgcgcgcccacccctggggacgagaaggcggccgcctgaggacccccgcccgcgacctccgcgagtctggagcgcagaggacagggtctggctgctctttggccttggatggaaagtggggaattgggtggggggctgcggaccccttaacgtggattacttggtgtgtatcagctgggctcagaagacccacgacctcttctccatccgtggattgatttgttctgcttaacagctgggtcgccaagctggaggaatttggccattggaatcgggatccagaatttccccgagggcctggctgtcagccttcccttgcgaggggcaggcttctccacctggagagctttctggtatgggcagctgagcggcatggtggagcccctggccggggtctttggtgcctttgccgtggtgctggctgagcccatcctgccctacgctctggcctttgctgccggtgccatggtctacgtggtcatggacgacatcatccccgaagcccagatcagtggtaatgggaaactggcatcctgggcctccatcctgggatttgtagtgatgatgtcactggacgttggcctgggctagggctgagacgcttcggaccccgggaaaggccatacgaagaaacagcagtggttggcttctatgggacaacaagcttctttcttcacattaaaacttttttccttcctctcttcttcatctcattatcctgattgactctgattataatagaaccatttttactttgctttgagggagatttttgatttaatggggaattttaaggtgtcatggaaatacagattctttgttttggccactgaatggactctctcttcagtgggattatcaaggaacttcagatcagggaaatctccacttcgggaccttctatctgcctcccaactcctcaaggtcacctatagaagcgagctaccaaaagacgtctcctaagcattttggtggcctagtgactcagggcagagtggccagcacacctctcatccgcccctcctgctccatcactgctgagcctctccccatctagaatgttggaactggagcatcataaagatagcaagctaccttccaaggccgagccagcccagagaggagcatgtcttcctttacctccccctaaggagatactacatgggagggggacacagaaaaagggaaggaaattggctagtctggctttttttttttttttttttaaaggcaaagattgacattattgaaggaaaggggatgaggacaactgtgaactcacagtgagccctgtggaaagaagagacagacagagtgtgggtttgttcggaggcctctgctgtcaatggattccaggagcaaggccatttgtcgcgctttccaaatttcttaggcatttattttgataagtttatagccatcatgtttctaagagacttggagacaccagcaaactgctagaactcaaactcttcaattactcaaagaaggagccatttcagttaactcaagtgaatgaaagagttttggaatctgctgtgggtccttccctgttgaccatttggtaacttataatctgacaaaaactcttgagctgcaacaggccttgccagagggctcaggatgggaaaggaagaaggggataggaaaagaagaggtaattttacatttcccctttaaagtaaattttagccaactcatcattctgaaatgtccctataaagaatgagtcgaactagaccagaagccagcctactccttcttacatagcttctccaacaggggtagcaatgacctgtccacttcaaacacagataaggcctgccatcctcattggttaaaggcacacgtgagactttcagtgggctctgctgagaaggaaggcagcccaggagtcaggtatgcaggcattgcattgtcagtgtctgctctcagagtttacacattcaattgcttccaagggtgaatctcctgctctgtgaatgctatcagaccccaaaggccaaccttgggctgggtctatgtacgttcttccgaagcactgatgatcaaaattgaagacacattcagaggtttgattggttgagattaactggtgtggtggttggtgtatgtatgttttatttttatgtctttgtatgtagttctacataatgcaaattgtgctttctgatggacaagacctcataactgtgattaatatcaataaaaaggggatgttgtggatga

SEQ ID NO: 1810 - DNA, 517 bp, Homo sapiens
gattcctgcagggagggaggagagaagggcggcagtgggagggggaggtacctggaactgggagtgatgtcagctcccagctcggtgcctgcccggattcctgacatggtgtagtgcaggcagggtggggaaaggacggggaaggactcgtgtgctgcgagctggcggccgggccggagtgctggggctttgaactccgagaggaggtggaccagaacttttggaactagtgccggcggctctccaccccccaggaaacgtgcactgaggattttcatcatgtttgatgtcctcaccgtcactggacttttatgttacatactattttttggtgctacatttctctttgaaagggtgcttctgagaatgcttgggtgccgcaccacatgggacctacgggagatgagagagcctttcttgaatttggaagtggaagccttgttaccctcctaaagatacagaagttactgtcaccctactgactttctcaccagtaaacattgtggctgttcctgta

SEQ ID NO: 1811 - DNA, 3538 bp, Homo sapiens
ggccgcgggatggcgggcagcaggggcgcctagctgcgccgggagccggggccgccgccggagtcgttgtcgccggagcctggagccgtgaacccagccgcgccagtgaagaaaaaatgactgctgcccgcattagaaaatgccacaagtgtgggactggcctcatcaaatctgaaggctgcaaccgcatgtcttgccgctgtggtgcccagatgtgctacctctgtcgagtttctattaatggatatgaccatttctgccaacatccccgctcaccaggagccccttgccaggagtgttcaagatgctctctctggaccgatcccactgaagatgatgagaagcttattgaggaaatccagaaggaggctgaagaggaacagaaaagaaagaatggagagaacaccttcaaacgcattggacccccgctggagaagcctgtggagaaggtgcagagggtggaggccctcccgaggcccgttccgcagaacctgccacagccacagatgccaccctatgccttcgcgcacccacccttccccctgcctcccgtgcggcctgtgttcaacaacttcccactcaacatggggcctatcccagccccgtacgtgccccctctgcccaacgtgcgggtcaactatgacttcggtcccatccacatgcccctggagcacaacctgcccatgcactttggcccccagccgcggcatcgcttctgatggccccgaatccccattgagcagcacaaagcccgtttggggtaggagtgtggatggagaaccctcccccaaggctggtgtctgtaccattgcatcctaagtcagcttgaagggtaggctggttttcttcccacccctttcctagaagggctactgctcctggaagagtggacggatccataataaagacgtcccaaatggtggagttcggagagagctgcgatgtgaactgcccctcccctcgcatcccccaggccaccaacggcagtccttctgccttgtccatggcataggccatagaccaggtccctgctgctcacacctgggcctctcctcggagccgacccctgggtagcaaggcagccgagagcatctccctggaggggcccacggttgggccaagggcagagggggctgcacctgcgggcctgggaagcattgctcagggtggggggctgggaccatggcccgcagaggcactgccacagctgtgagggccaagatgctgtccccccatccaaaacccgtgcgccactgcagtgagtgttgagggcacctctcctcccctcttacacctactcagatgaggcagcagcagacccatctcgcggcgggggttttgttctgttgccgcctaactttctcatcctcggtctctggaaagtcaggctgagaaatcctttcccaggccaggccgctgcggtacactggatggttctgaagctggcccattgaaagagcctcttaaggcagctgggacagaggcctggtggccctgctgggcagcccaactgctgggggagacgtttctgccaccctgggtgatgagcagcttttcccccctggctttctgggggaggagtgggcctccttagggagacaggtgaccctgggtgccacccctgccccgtgtgtgccccgggtgttctcagtggttgctgaaggcaggtagagggtgctgtccagtatcccccatgtgaaggtcacttcccttctcatggagtcagctgagcatcagctcagccctgccatgtccccactcaccctcctcgcctcctgtccggccctgggtttctagcggtgcctgaggcatcactctggcccattgacagatgagaggtctgaagccttcctggccacaggcatcactttctcctcctcctcatgccctgccttgtccttgtcgtgttgccatggggttctgagaggctgggagttcacagacctcagacacagctgagtccgacaaccattggggtggggctgcatcagtctccggagtggcccgccacctcctgaagcagggcctggcccacccaaggtgcctggggcaggcgggcaccgtcattcgctgccattggcttctcagatgtatttcaaggactaaagtgggctctaagatctaagatggcccggcgcggtggctcccgcctgtaatcccagcactttgggaggccgaggcgggcggatgagttgaggtcgggagtttgagtccccgtctctactaaaaatacaaaattagccggacaaggtggcgcatgcctataatcccaggtactcaggaggctgaggcaggagaatcacttgaacctgggaggcagaggttgcagtgagccaagattgtgccactgcactccagcctgagcaacaaaagcaaaactctatctttaaaaaaaaaaaaaaaaaaactaagatacccattctttctgcctttgcccaggatggaggctttgaagacaggtggtcacctggacctggggtaagggtgcgcagggaggccgggcttgggggcagcctgctgctatgtccttgctggcgcccatacctgttggactgcctgaactttgctactagcctgaacgacagtgccttggaaaggcaggctccatgcggcagcaacaggattgtcttcggtaccttaaatatgctccctgtgcttccccagggaggatctctgggagcagagggcggctgtagacatcacagctgaagaggtgacctcaggccctgggagcctcagctccctctgccctgtaccctaggcacgtggctccagcaagagccccaggcaggacaaagggagcaggcagcagctgcagaaacagccctagacaggtgctggcctcaaccctggcaggggagggggagcccagagtgatgtttctcctaaggccaaaccccaggggtgggtcatttgagaggagttccagctgttctggccacactgggctggtggggaaggagcggcggcctctttccttggagggtccctgattcctgaggatcctccccgagccaggcacgggggaccacagggctgccgtgagcacccaccctggttctccaggcccctctgtccagaggcagggcctgaacctcgggctcctgcctggaccagtgacagcattggggagagaagcactgggggtcttcagaccagccagcaaggggccgtgccagtgcccagagagcaggtcagacaacaggcaaccctgaggcagctggctccctctctctgccctgcagggcttgccgcagggcgtgaggctccccagccacagccccctcttacttgccttaaaactggagagaggaatctagtatttgcacttagcaaaatatttaaaaactgaaaaaaatgtgcatgatctgtcactttgtataaaaacaagaaacgattagttcattaaactttttctttaccttctggtagtaaaaatagataaaataattccgtttcaactactgtgtgtaaaaagcctgtatcatatgtaactgggacttttgtaaataaatgtttgtgcgctctgctccctcca

SEQ ID NO: 1812 - DNA, 8519 bp, Homo sapiens
gaagaagtaggggcggggggaagtttaggagttgaggaaagaagattaaagagcgcgaggaggaagggaatttgaaggagaagaagaatatctggagatccttggcatcaccagggagcagtcaggcaaatatgagtgcaaagctgccaacgaggtctcctcggcggatgtcaaacaagtcaaggtcactgtgaactatcctcccactatcacagaatccaagagcaatgaagccaccacaggacgacaagcttcactcaaatgtgaggcctcggcagtgcctgcacctgactttgagtggtaccgggatgacactaggataaatagtgccaatggccttgagattaagagcacggagggccagtcttccctgacggtgaccaacgtcactgaggagcactacggcaactacacctgtgtggctgccaacaagctgggggtcaccaatgccagcctagtccttttcagacctgggtcggtgagaggaataaatggatccatcagtctggccgtaccactgtggctgctggcagcatctctgctctgccttctcagcaaatgttaatagaataaaaatttaaaaataatttaaaaaacacacaaaaatgcgtcacacagaatacagagagagagagacagagagagagagagagagagagatgggggagaccgtttatttcacaactttgtgtgtttatacatgaagggggaaataagaaagtgaagaagaaaatacaacatttaaaacaattttacagtccatcattaaaaatttatgtatcattcaggatggagaaggttctactgggatatgtttatatctactaagcaaatgtatgctgtgtaaagactacaccacactaaggacatctggatgctgtaaaaataagagaagaaccagatggatattaagccccccaacacacactttatccttccttccttcatcttttttcatctgtggggaagaaaataaggtcttgcctttggtgtttatatttccataaccttttaattctatttttcatttgagctgacttgtagccacttcagactatcaatggaatcttatgttgagcctttctctggctttccttcctccactatctctccaactttagagatcatcccctctccctccagtgcgttctatctcccccacacccaccctagatactcccttttcacccacctttcctccctcacctctcctcacctccaccccctccccagagcactagtcatgccgcaaatgctaggaagtgccattttcattttctccactgtgcgtgtgtgctcaagtctttcgctctcacgtgggtgtacatgtgtgtgagcgtgtgtgtgtctctctctaaagcatgccaagggaatggtccatgtgtacatagactcattgtgctgtagatactgtcctgcattgtaattgtgagatgcggctgtaacaagttgctgggggagatggcggggaaagaggcaaggagcagagtcctccctacatccatggctgtcacatggcatcagtgtgtattcaaaccaagctatgctccttccaagggcaggaccccatattcctcctagtcccatcatcagaaccgagtggggagtcactcagaatatcactgtaaatgaaagtgcctactatcgatggggtaagcaaacagcataaggaattatgacgtggacgaggtgacctaggagagaaaatttcagattttactctcatttcatgagtctgagggattcttatatttcctggcatttaacagggtaggccctgctccactgtgaaaatgagcagcatgtgttgagtaaatccccagaaacaggaaggtctccaagtgtcaactcccagtgaaagaatgatgaaccacttggagatcctaagcagccctgttttacctcctccctaatcttaaataacatttgtcccatgaattcccctgagcagagattgtttcctatttcagataaaatacagtgaaagtgagcaaggcagaaaaagtcaacagatgcccaggctcctactgtattctggagatactgtcagagctctaatacagagcactggccataatgaaaagcagttcactccttgtgctcctctgcagatgtttttcccagtgttctaggttaatgttttatttggttgcctgcataatccctgttctgtttcactgatggtgtttgcagcaccactgttcatggtggtccactgttatcctatgccagggtgctaagaattgcatgatattcatcttccctgctctatttaaatttacatctataagagtcatcttgacattaacactgaaatgtgatctaggtccttaaccaaaattgctgggcaacttgtaataaatttagacagaaattttatgagtaccacaaagcttggtgttaccacatcaccagaaggatttcttaggaaatgtcttgccgagagagctggctctctgcatatagatgtctttgtcagaaaaccaacccttgctctcacttacacagtagtaagcactgaaagtggttcagttcatgagaggacagagaattattttgagattatatttgaatgtaatcttgcagagccaaatatggtatgtcattaagttggaaccttgtaaatagctgttccatgttataaaatgagaaactttgtaactggaaaaaaagaaaggaaagaaggaaggaaggaaggaaggaaggcagggagggggggacggggaagggggggagggagggagggagggagggagggagggagggagggaggaaggaaggaaggaaggaaggaaggagaaaggaaaggaaggcaggagggagaaagatctaagtagcattgttaatttcttcaatttcttctaagggattttattgtttgttttagaagcttatcacagccttctttcatgattttgcagtttagacttgatacaaggaaaaattcagcttggggatggttaagagtgtttatagcagattctgacataggagagaaaacaaattctcatccaagaaggtagctagtaaaatatagggaaggtgagccatattcctatgcagcatcaatttattgacaatcaggtatttctcttaacagtttggtcttcttagttcaagaataaagggtatcatctttaataataagcattccccaaaaattgaagaggcagtcacacacttaagtgtgtggctttagaaaagcgcatgctaatttaaagatatacaggaagagaaaagtaggagttaagttggatgttgttagaagttggatgttagtattaccttcaggaacagatccccatggcatgtcacaggccttaattatatacctggctttcttattgtctccactttatcatgaggacaaggtcttggtttcatgggaggaacttctccattgaaataaatgtctgccatgtcagcaccgtttgttccctcagttttaatataatggaccatatattaaacataattaaacatatatttaaatgtggtgtttgcctgtgtctctagcaggatcttgaaattttaaaaatttgcttctggttcctgtttcagagaaaacattgtccccagaaatttcataggattgaaagtgttccctaagcagtgtgaacaatggaggaaaatatagtttagagaaaagtcagggaaaggtagggccagaggactgacaccaagaaatcattgaatctcaacataagacttcttggaatttagttaatcatattggaataaattccttcaagaatcttgtcccttggtaatcaaagtttgaaaccccgcactgaaaagcaccaactggttggaaataatatactgagaggagtgaaattcatcaattaatctgagtggctaatatatttaatatcctttgtatacaaagtaaaactccaccattcgtaaaaggaaatccttagacccaactttcagttaacaaaaacagaaatgactttgacccagggtgcttcctgaagaatgagaactatccagggctttacaactgcagaattgtaattatgctctgtgcaattgttgagcaaaggttttgccttgctggataaaaagtcttgtttgtttcgagacatgaaatccccatgtcttaaaagaactaaggcttatagaaaagcagatgggttttctctcaggaaggactgccccattgacctttgccttctcttccaagtcagacagacttctcgcttgccatgggcatttttttactacatagtcagactactggggctacttatagagaccttgtaaaagtactcgtgattttcacgttcttggaggaccaaacaaaaatctgtttctcctccaaaaatggacttacctcctttgcacacaaaagctaaactcctcagcatgaaattgtttgagttattactttaccaagttgtgagcttcttgaatcctccagagtcgcagattccatccctgagttggttgtggtttcactgtttctattggctattctccctgaatttttcattttgttctttgcagggctcgaattatttgtggaaaacaataatatatatgtgtgtgtattttttatctttatagatgctatatttacaataatgtatgtattataagacaaattaagaataatgttttgatcttaaaaggaagaaaagtactgaatttggttgtttagaaagaaaatctatgctcacgtagaaagacatagagccccactttttccgttttgtaattatttggcgaaaagaaatttgcttatagactatgtttaatgggattaaccatgtcctcatttttcttttcatcctcatacacttttagcctgcatttagtcttggttaccaatatcattttttaagagaaatgtaagtacagtgctatatcttacctacataaactattaatattttgaagacaaatgtgaaacacaccacaaaaatggtgagataagaaacaaaaatgcagtttaggaagcctcctccttgcttaaatgtttagaatatttcttctccaaagactgcatttgcctcagtgatgtaaattttccatcatggttggcataatatctgtaaacatctcactaaatgcaaaatggagtttacatttatgtgcatactagcagaaaagaagtaaactattctcatttgcatgtagctatgctgttcaaatgtcgccaaccaaaatttaggaaagaatttgttttcacccagcatgtacatctcacttttctcttggcaaggaagctggtgttaacgttgggtttaggtttaacatttacaccagcgaaaatgtttatgaatattatggaaaacttattttaaaccttgatttcttttgagcacatttacatgctgcgtgctgattaataaattaggcaccaatcatgtgtaaatcaatgtaaatcactagtttatgtacataatataaactatgtaaacttcatttttcatgcagtgcccaactactgctaaggtttactatgattcttaaggaaaaaaaaatcaaataaaaataaataaaaactgaaacgtttcacagttcagaatcggaagaattacgactaaagctccaaatatgaggttgccttagccaaaggaagcagacccacaggaacagttcaaggtttatatcctgctcaagtcacctctttggtctttcaggatctaagtggagattgtcccaactgttgctgtagttgtctcacccgaccccaaagcaagggaaatagagggaaaggttttaagggctatatgtctgctgtatccactcccagctatcttctttttactcctttctcaccatctaagatgtcttatttaaatagctccaaggaagtgacctaaaccttgatgagcaaaatattactcagtttttattttccattcaacaaaagcagtgggaaagcttgccatctggattctaagaaattgtgcaatataaaaaatgttatatcctcgagaaatatcttgctgagtcaccctaggaaataactaccttttatttatctggtagcctaatgtttccacacatttatcctgaatattgcaagtgagggactgaatcatttttaattgggagttatctttctcaggcatgttctcttggagtctttttgaagtgcctgacacgtgtaacaggatgacatatatatcattcctacaatatgaacaactgttacataaaaaattatcaaggagatgatttcaggaaacaagtgaactttctgcaaagacttataaaaattttaggtcaaattaacttcaggctttaaatgcactaatctacctaagagaaaaaaaaagaaaaaaaacaggaaggagttttaagggctcatgtgcctgttgtatcaacccccaagtgtcttcttggtactgcttcctcatcatctaagataaactgacaactttaaagtgaggtagaaggtgtattgaattgggagtcaggagaattgggttctaaccccaagttcagccacaaataaagctgtgagacattggcaagtcatttaactttcctgagtcttggttttctcatcctgaaagtgagggattcggctgacgtctctaaaatctctttcaactctaacctttattctgaataagaatttaatattcacttagtgctgtgcccagcactgtttgtaaacagcagctgtttgttatctctagtttggtctctgtattctcatcacttctcagaactatcattctaccgtcttcatttctaaacccaaaactgctagaatacagggactctggactgggtctgtaaattttttctgatcaaaactttatagcagtgtagagaagggacacattcaaattacactaaggacattgacatagctggggttgtttccttgtttatattataaaacctaaatgtggaactatattctaataatctttcataggaaggaaaatagccagactgggtattatgcatgtaacaaatgaggacattgtgcataagaaaggaaacattagttttctgtcatcctgggccaagtacctcattacagtaaatgtgtgtctttggaaactctttgcttgtgctgatggcggtaagcatggggtcccaggcaggttcaaaggctgaactgtaagaaatgggcaagacaatacattttgttttggaaggaatttctcatgggataagtttcccaaagcttgaattataggctatgaaataaagcaaatagatggagagaaaacaagtattgttttcaaaaagtacaagtcaattctatttaaagaagacaagctgaaaataaaacaaaaataaacacaatttaggaggttacagagttgaagacagtatgaattgttgtgaaggccaaaatcaaatgtgaaagttaggttctctgagaaaagggtaagcagaaaggatgatttctcaagcaattaataaggaattattttcttgtgccatgttctagatgcattgagcacagatcctcttgtcctaagctgtcctagaggctcaggttagcatctatccaaagttgtcctttgattttattgtctgaaagaacagaaggcatcagagtttccagtcactgaagagtagggtttgttcatcacttcccagcaatcacatcactttgtgtaggtaaggatatatgatgtgcttagattacttatgaagctctctctaagtgggagaatgacctgtccatgggacaactccccgttttcatggtcatttcagaagtacctctttttgggcagtgctcctggatctacttctacagccacattctactctgcacaatcctccctatgtaaagccaggcacagtacaaatatgcttcttgcaagtgaagaaaacccatggaagtcctagcttcatggcacgctgcagcaatcccaagctaccaggagcctcttttgaacccacttccctaagtctttgctcttcaccagagaatggaaattgttcatcctggtgaactgtggccaagttctgctccctaagtatttacttggagtagggaggttaaagggaagaaattcagggggagagaagcaaaagagaacacttccaactccctcccccatctcccaatgctccccaccttccttatcactgctctactgaagggtgtataaatcctgctcttggttagaattctccttattaacagtgttatatacatataaatatatatataaatatattccttttttcagccctgtagacatgaactgatcttcccttgaagatacaaacacatggccattttttgtttgggattttttgtttttcaaggtttttcatttttgtttattaggtggatttttttccctgggtactagctctgtgaaggagataaaaagcgcaatgtgtgttaaaaaaaaaaaattaaaattaaaatgaaaaaaagctttttttcttttctttttaaatgtatttaaattctgtttctctcttctgttactttacacgtatgaatgctctgctcttctgtgatcttaaaacaaaatgaaataaacgtgaaaaggagatgtgtcttcattgacctgtca

SEQ ID NO: 1813 - DNA, 505 bp, Homo sapiens
gacttccggcggaagaagaagccggtccggagttctggccgacagcaggcgaggagtgggtagcagcgcctatgtgaagttagctaatctgagaaggcccacttctggttccatggatgatggcggttgagcagatgccaaaaaaggattggtacagcatcctgggagcagacccatctgcaaatatatcagacctaaaacaaaaatatcaaaaactcatattaatggtgccaatgggtcatgtttggttagaaggtgacaatctacagaattctacagattccaggtgctatggacctattccatatggactaataagaggacgaatcttctttaagatttggcctctgagtgattttggatttttacgtgccagccctaatggccacagattttctgatgattagtaagcatttattcttttgacttgattattgtctccttttcatgtgaatttattactcccgttgaaaccgtgtacttaccaataaactatttgctattc

SEQ ID NO: 1814 - DNA, 6350 bp, Homo sapiens
acccgcccccatctgcccaagataattttagtttccttgggcctggaatctggacacacagggctcccccccgcctctgacttctctgtccgaagtcgggacaccctcctaccacctgtagagaagcgggagtggatctgaaataaaatccaggaatctgggggttcctagacggagccagacttcggaacgggtgtcctgctactcctgctggggctcctccaggacaagggcacacaactggttccgttaagcccctctcttgctcagacgccatggagctggatctgtctccacctcatcttagcagctctccggaagacctttgcccagcccctgggacccctcctgggactccccggccccctgatacccctctgcctgaggaggtaaagaggtcccagcctctcctcatcccaaccaccggcaggaaacttcgagaggaggagaggcgtgccacctccctcccctctatccccaaccccttccctgagctctgcagtcctccctcacagagcccaattctcgggggcccctccagtgcaagggggctgctcccccgcgatgccagccgcccccatgtagtaaaggtgtacagtgaggatggggcctgcaggtctgtggaggtggcagcaggtgccacagctcgccacgtgtgtgaaatgctggtgcagcgagctcacgccttgagcgacgagacctgggggctggtggagtgccacccccacctagcactggagcggggtttggaggaccacgagtccgtggtggaagtgcaggctgcctggcccgtgggcggagatagccgcttcgtcttccggaaaaacttcgccaagtacgaactgttcaagagctccccacactccctgttcccagaaaaaatggtctccagctgtctcgatgcacacactggtatatcccatgaagacctcatccagaacttcctgaatgctggcagctttcctgagatccagggctttctgcagctgcggggttcaggacggaagctttggaaacgctttttctgcttcttgcgccgatctggcctctattactccaccaagggcacctctaaggatccgaggcacctgcagtacgtggcagatgtgaacgagtccaacgtgtacgtggtgacgcagggccgcaagctctacgggatgcccactgacttcggtttctgtgtcaagcccaacaagcttcgaaatggccacaaggggcttcggatcttctgcagtgaagatgagcagagccgcacctgctggctggctgccttccgcctcttcaagtacggggtgcagctgtacaagaattaccagcaggcacagtctcgccatctgcatccatcttgtttgggctccccacccttgagaagtgcctcagataataccctggtggccatggacttctctggccatgctgggcgtgtcattgagaacccccgggaggctctgagtgtggccctggaggaggcccaggcctggaggaagaagacaaaccaccgcctcagcctgcccatgccagcctccggcacgagcctcagtgcagccatccaccgcacccaactctggttccacgggcgcatttcccgtgaggagagccagcggcttattggacagcagggcttggtagacggcctgttcctggtccgggagagtcagcggaacccccagggctttgtcctctctttgtgccacctgcagaaagtgaagcattatctcatcctgccgcctactcaatgtgaagatgatgaggatgaaaacctttgtgatgatccacttccacttaatgaatggtggcaaagcaaagctatattcaagaccacatgcaaagctactccctgagcaaagagtcacagataaaacgggggcaccagtagaatggccaggacaaacgcagtgcagcacagagactcagaccctggcagccatgcctgcgcaggcagtgatgagagtgacatgtactgttgtggacatgcacaaaagtgagatacttcaaagattccagaagatatgccccgggggtcctggaagccacaagtgtgcaccggcacagacatgaagctgcggctccctgccagtcccgagacccacctggacatgctccgccacctctaccagggctgccaggtggtgcagggaaacctggaactcacctacctgcccaccaatgccagcctgtccttcctgcaggatatccaggaggtgcagggctacgtgctcatcgctcacaaccaagtgaggcaggtcccactgcagaggctgcggattgtgcgaggcacccagctctttgaggacaactatgccctggccgtgctagacaatggagacccgctgaacaataccacccctgtcacaggggcctccccaggaggcctgcgggagctgcagcttcgaagcctcacagagatcttgaaaggaggggtcttgatccagcggaacccccagctctgctaccaggacacgattttgtggaaggacatcttccacaagaacaaccagctggctctcacactgatagacaccaaccgctctcgggcctgccacccctgttctccgatgtgtaagggctcccgctgctggggagagagttctgaggattgtcagagcctgacgcgcactgtctgtgccggtggctgtgcccgctgcaaggggccactgcccactgactgctgccatgagcagtgtgctgccggctgcacgggccccaagcactctgactgcctggcctgcctccacttcaaccacagtggcatctgtgagctgcactgcccagccctggtcacctacaacacagacacgtttgagtccatgcccaatcccgagggccggtatacattcggcgccagctgtgtgactgcctgtccctacaactacctttctacggacgtgggatcctgcaccctcgtctgccccctgcacaaccaagaggtgacagcagaggatggaacacagcggtgtgagaagtgcagcaagccctgtgcccgagtgtgctatggtctgggcatggagcacttgcgagaggtgagggcagttaccagtgccaatatccaggagtttgctggctgcaagaagatctttgggagcctggcatttctgccggagagctttgatggggacccagcctccaacactgccccgctccagccagagcagctccaagtgtttgagactctggaagagatcacaggttacctatacatctcagcatggccggacagcctgcctgacctcagcgtcttccagaacctgcaagtaatccggggacgaattctgcacaatggcgcctactcgctgaccctgcaagggctgggcatcagctggctggggctgcgctcactgagggaactgggcagtggactggccctcatccaccataacacccacctctgcttcgtgcacacggtgccctgggaccagctctttcggaacccgcaccaagctctgctccacactgccaaccggccagaggacgagtgtgtgggcgagggcctggcctgccaccagctgtgcgcccgagggcactgctggggtccagggcccacccagtgtgtcaactgcagccagttccttcggggccaggagtgcgtggaggaatgccgagtactgcaggggctccccagggagtatgtgaatgccaggcactgtttgccgtgccaccctgagtgtcagccccagaatggctcagtgacctgttttggaccggaggctgaccagtgtgtggcctgtgcccactataaggaccctcccttctgcgtggcccgctgccccagcggtgtgaaacctgacctctcctacatgcccatctggaagtttccagatgaggagggcgcatgccagccttgccccatcaactgcacccactcctgtgtggacctggatgacaagggctgccccgccgagcagagagccagccctctgacgtccatcatctctgcggtggttggcattctgctggtcgtggtcttgggggtggtctttgggatcctcatcaagcgacggcagcagaagatccggaagtacacgatgcggagactgctgcaggaaacggagctggtggagccgctgacacctagcggagcgatgcccaaccaggcgcagatgcggatcctgaaagagacggagctgaggaaggtgaaggtgcttggatctggcgcttttggcacagtctacaagggcatctggatccctgatggggagaatgtgaaaattccagtggccatcaaagtgttgagggaaaacacatcccccaaagccaacaaagaaatcttagacgaagcatacgtgatggctggtgtgggctccccatatgtctcccgccttctgggcatctgcctgacatccacggtgcagctggtgacacagcttatgccctatggctgcctcttagaccatgtccgggaaaaccgcggacgcctgggctcccaggacctgctgaactggtgtatgcagattgccaaggggatgagctacctggaggatgtgcggctcgtacacagggacttggccgctcggaacgtgctggtcaagagtcccaaccatgtcaaaattacagacttcgggctggctcggctgctggacattgacgagacagagtaccatgcagatgggggcaaggtgcccatcaagtggatggcgctggagtccattctccgccggcggttcacccaccagagtgatgtgtggagttatggtgtgactgtgtgggagctgatgacttttggggccaaaccttacgatgggatcccagcccgggagatccctgacctgctggaaaagggggagcggctgccccagccccccatctgcaccattgatgtctacatgatcatggtcaaatgttggatgattgactctgaatgtcggccaagattccgggagttggtgtctgaattctcccgcatggccagggacccccagcgctttgtggtcatccagaatgaggacttgggcccagccagtcccttggacagcaccttctaccgctcactgctggaggacgatgacatgggggacctggtggatgctgaggagtatctggtaccccagcagggcttcttctgtccagaccctgccccgggcgctgggggcatggtccaccacaggcaccgcagctcatctaccaggagtggcggtggggacctgacactagggctggagccctctgaagaggaggcccccaggtctccactggcaccctccgaaggggctggctccgatgtatttgatggtgacctgggaatgggggcagccaaggggctgcaaagcctccccacacatgaccccagccctctacagcggtacagtgaggaccccacagtacccctgccctctgagactgatggctacgttgcccccctgacctgcagcccccagcctgaatatgtgaaccagccagatgttcggccccagcccccttcgccccgagagggccctctgcctgctgcccgacctgctggtgccactctggaaaggcccaagactctctccccagggaagaatggggtcgtcaaagacgtttttgcctttgggggtgccgtggagaaccccgagtacttgacaccccagggaggagctgcccctcagccccaccctcctcctgccttcagcccagccttcgacaacctctattactgggaccaggacccaccagagcggggggctccacccagcaccttcaaagggacacctacggcagagaacccagagtacctgggtctggacgtgccagtgtgaaccagaaggccaagtccgcagaagccctgatgtgtcctcagggagcagggaaggcctgacttctgctggcatcaagaggtgggagggccctccgaccacttccaggggaacctgccatgccaggaacctgtcctaaggaaccttccttcctgcttgagttcccagatggctggaaggggtccagcctcgttggaagaggaacagcactggggagtctttgtggattctgaggccctgcccaatgagactctagggtccagtggatgccacagcccagcttggccctttccttccagatcctgggtactgaaagccttagggaagctggcctgagaggggaagcggccctaagggagtgtctaagaacaaaagcgacccattcagagactgtccctgaaacctagtactgccccccatgaggaaggaacagcaatggtgtcagtatccaggctttgtacagagtgcttttctgtttagtttttactttttttgttttgtttttttaaagatgaaataaagacccagggggagaatgggtgttgtatggggaggcaagtgtggggggtccttctccacacccactttgtccatttgcaaatatattttggaaaacagcta

SEQ ID NO: 1815 - DNA, 4798 bp, Homo sapiens
agttaagggcctggcgtctccctccctgaagacgtggtcccagccgggtgtcctgacgctcggggttcagtcgcaattgaagtaccacctcccgagggtgattgcttccccatgcggggtagaacctttgctgtcctgttcaccactctacctccagcacagaatttggcttatgcctactcaatgtgaagatgatgaggatgaaaacctttgtgatgatccacttccacttaatgaatggtggcaaagcaaagctatattcaagaccacatgcaaagctactccctgagcaaagagtcacagataaaacgggggcaccagtagaatggccaggacaaacgcagtgcagcacagagactcagaccctggcagccatgcctgcgcaggcagtgatgagagtgacatgtactgttgtggacatgcacaaaagtgagatacttcaaagattccagaagatatgccccgggggtcctggaagccacaagtgtgcaccggcacagacatgaagctgcggctccctgccagtcccgagacccacctggacatgctccgccacctctaccagggctgccaggtggtgcagggaaacctggaactcacctacctgcccaccaatgccagcctgtccttcctgcaggatatccaggaggtgcagggctacgtgctcatcgctcacaaccaagtgaggcaggtcccactgcagaggctgcggattgtgcgaggcacccagctctttgaggacaactatgccctggccgtgctagacaatggagacccgctgaacaataccacccctgtcacaggggcctccccaggaggcctgcgggagctgcagcttcgaagcctcacagagatcttgaaaggaggggtcttgatccagcggaacccccagctctgctaccaggacacgattttgtggaaggacatcttccacaagaacaaccagctggctctcacactgatagacaccaaccgctctcgggcctgccacccctgttctccgatgtgtaagggctcccgctgctggggagagagttctgaggattgtcagagcctgacgcgcactgtctgtgccggtggctgtgcccgctgcaaggggccactgcccactgactgctgccatgagcagtgtgctgccggctgcacgggccccaagcactctgactgcctggcctgcctccacttcaaccacagtggcatctgtgagctgcactgcccagccctggtcacctacaacacagacacgtttgagtccatgcccaatcccgagggccggtatacattcggcgccagctgtgtgactgcctgtccctacaactacctttctacggacgtgggatcctgcaccctcgtctgccccctgcacaaccaagaggtgacagcagaggatggaacacagcggtgtgagaagtgcagcaagccctgtgcccgagtgtgctatggtctgggcatggagcacttgcgagaggtgagggcagttaccagtgccaatatccaggagtttgctggctgcaagaagatctttgggagcctggcatttctgccggagagctttgatggggacccagcctccaacactgccccgctccagccagagcagctccaagtgtttgagactctggaagagatcacaggttacctatacatctcagcatggccggacagcctgcctgacctcagcgtcttccagaacctgcaagtaatccggggacgaattctgcacaatggcgcctactcgctgaccctgcaagggctgggcatcagctggctggggctgcgctcactgagggaactgggcagtggactggccctcatccaccataacacccacctctgcttcgtgcacacggtgccctgggaccagctctttcggaacccgcaccaagctctgctccacactgccaaccggccagaggacgagtgtgtgggcgagggcctggcctgccaccagctgtgcgcccgagggcactgctggggtccagggcccacccagtgtgtcaactgcagccagttccttcggggccaggagtgcgtggaggaatgccgagtactgcaggggctccccagggagtatgtgaatgccaggcactgtttgccgtgccaccctgagtgtcagccccagaatggctcagtgacctgttttggaccggaggctgaccagtgtgtggcctgtgcccactataaggaccctcccttctgcgtggcccgctgccccagcggtgtgaaacctgacctctcctacatgcccatctggaagtttccagatgaggagggcgcatgccagccttgccccatcaactgcacccactcctgtgtggacctggatgacaagggctgccccgccgagcagagagccagccctctgacgtccatcatctctgcggtggttggcattctgctggtcgtggtcttgggggtggtctttgggatcctcatcaagcgacggcagcagaagatccggaagtacacgatgcggagactgctgcaggaaacggagctggtggagccgctgacacctagcggagcgatgcccaaccaggcgcagatgcggatcctgaaagagacggagctgaggaaggtgaaggtgcttggatctggcgcttttggcacagtctacaagggcatctggatccctgatggggagaatgtgaaaattccagtggccatcaaagtgttgagggaaaacacatcccccaaagccaacaaagaaatcttagacgaagcatacgtgatggctggtgtgggctccccatatgtctcccgccttctgggcatctgcctgacatccacggtgcagctggtgacacagcttatgccctatggctgcctcttagaccatgtccgggaaaaccgcggacgcctgggctcccaggacctgctgaactggtgtatgcagattgccaaggggatgagctacctggaggatgtgcggctcgtacacagggacttggccgctcggaacgtgctggtcaagagtcccaaccatgtcaaaattacagacttcgggctggctcggctgctggacattgacgagacagagtaccatgcagatgggggcaaggtgcccatcaagtggatggcgctggagtccattctccgccggcggttcacccaccagagtgatgtgtggagttatggtgtgactgtgtgggagctgatgacttttggggccaaaccttacgatgggatcccagcccgggagatccctgacctgctggaaaagggggagcggctgccccagccccccatctgcaccattgatgtctacatgatcatggtcaaatgttggatgattgactctgaatgtcggccaagattccgggagttggtgtctgaattctcccgcatggccagggacccccagcgctttgtggtcatccagaatgaggacttgggcccagccagtcccttggacagcaccttctaccgctcactgctggaggacgatgacatgggggacctggtggatgctgaggagtatctggtaccccagcagggcttcttctgtccagaccctgccccgggcgctgggggcatggtccaccacaggcaccgcagctcatctaccaggagtggcggtggggacctgacactagggctggagccctctgaagaggaggcccccaggtctccactggcaccctccgaaggggctggctccgatgtatttgatggtgacctgggaatgggggcagccaaggggctgcaaagcctccccacacatgaccccagccctctacagcggtacagtgaggaccccacagtacccctgccctctgagactgatggctacgttgcccccctgacctgcagcccccagcctgaatatgtgaaccagccagatgttcggccccagcccccttcgccccgagagggccctctgcctgctgcccgacctgctggtgccactctggaaaggcccaagactctctccccagggaagaatggggtcgtcaaagacgtttttgcctttgggggtgccgtggagaaccccgagtacttgacaccccagggaggagctgcccctcagccccaccctcctcctgccttcagcccagccttcgacaacctctattactgggaccaggacccaccagagcggggggctccacccagcaccttcaaagggacacctacggcagagaacccagagtacctgggtctggacgtgccagtgtgaaccagaaggccaagtccgcagaagccctgatgtgtcctcagggagcagggaaggcctgacttctgctggcatcaagaggtgggagggccctccgaccacttccaggggaacctgccatgccaggaacctgtcctaaggaaccttccttcctgcttgagttcccagatggctggaaggggtccagcctcgttggaagaggaacagcactggggagtctttgtggattctgaggccctgcccaatgagactctagggtccagtggatgccacagcccagcttggccctttccttccagatcctgggtactgaaagccttagggaagctggcctgagaggggaagcggccctaagggagtgtctaagaacaaaagcgacccattcagagactgtccctgaaacctagtactgccccccatgaggaaggaacagcaatggtgtcagtatccaggctttgtacagagtgcttttctgtttagtttttactttttttgttttgtttttttaaagatgaaataaagacccagggggagaatgggtgttgtatggggaggcaagtgtggggggtccttctccacacccactttgtccatttgcaaatatattttggaaaacagcta

SEQ ID NO: 1816 - DNA, 4167 bp, Homo sapiens
acccgcccccatctgcccaagataattttagtttccttgggcctggaatctggacacacagggctcccccccgcctctgacttctctgtccgaagtcgggacaccctcctaccacctgtagagaagcgggagtggatctgaaataaaatccaggaatctgggggttcctagacggagccagacttcggaacgggtgtcctgctactcctgctggggctcctccaggacaagggcacacaactggttccgttaagcccctctcttgctcagacgccatggagctggatctgtctccacctcatcttagcagctctccggaagacctttgcccagcccctgggacccctcctgggactccccggccccctgatacccctctgcctgaggaggtaaagaggtcccagcctctcctcatcccaaccaccggcaggaaacttcgagaggaggagaggcgtgccacctccctcccctctatccccaaccccttccctgagctctgcagtcctccctcacagagcccaattctcgggggcccctccagtgcaagggggctgctcccccgcgatgccagccgcccccatgtagtaaaggtgtacagtgaggatggggcctgcaggtctgtggaggtggcagcaggtgccacagctcgccacgtgtgtgaaatgctggtgcagcgagctcacgccttgagcgacgagacctgggggctggtggagtgccacccccacctagcactggagcggggtttggaggaccacgagtccgtggtggaagtgcaggctgcctggcccgtgggcggagatagccgcttcgtcttccggaaaaacttcgccaagtacgaactgttcaagagctccccacactccctgttcccagaaaaaatggtctccagctgtctcgatgcacacactggtatatcccatgaagacctcatccagaacttcctgaatgctggcagctttcctgagatccagggctttctgcagctgcggggttcaggacggaagctttggaaacgctttttctgcttcttgcgccgatctggcctctattactccaccaagggcacctctaaggatccgaggcacctgcagtacgtggcagatgtgaacgagtccaacgtgtacgtggtgacgcagggccgcaagctctacgggatgcccactgacttcggtttctgtgtcaagcccaacaagcttcgaaatggccacaaggggcttcggatcttctgcagtgaagatgagcagagccgcacctgctggctggctgccttccgcctcttcaagtacggggtgcagctgtacaagaattaccagcaggcacagtctcgccatctgcatccatcttgtttgggctccccacccttgagaagtgcctcagataataccctggtggccatggacttctctggccatgctgggcgtgtcattgagaacccccgggaggctctgagtgtggccctggaggaggcccaggcctggaggaagaagacaaaccaccgcctcagcctgcccatgccagcctccggcacgagcctcagtgcagccatccaccgcacccaactctggttccacgggcgcatttcccgtgaggagagccagcggcttattggacagcagggcttggtagacggcctgttcctggtccgggagagtcagcggaacccccagggctttgtcctctctttgtgccacctgcagaaagtgaagcattatctcatcctgccgccctctgacgtccatcatctctgcggtggttggcattctgctggtcgtggtcttgggggtggtctttgggatcctcatcaagcgacggcagcagaagatccggaagtacacgatgcggagactgctgcaggaaacggagctggtggagccgctgacacctagcggagcgatgcccaaccaggcgcagatgcggatcctgaaagagacggagctgaggaaggtgaaggtgcttggatctggcgcttttggcacagtctacaagggcatctggatccctgatggggagaatgtgaaaattccagtggccatcaaagtgttgagggaaaacacatcccccaaagccaacaaagaaatcttagacgaagcatacgtgatggctggtgtgggctccccatatgtctcccgccttctgggcatctgcctgacatccacggtgcagctggtgacacagcttatgccctatggctgcctcttagaccatgtccgggaaaaccgcggacgcctgggctcccaggacctgctgaactggtgtatgcagattgccaaggggatgagctacctggaggatgtgcggctcgtacacagggacttggccgctcggaacgtgctggtcaagagtcccaaccatgtcaaaattacagacttcgggctggctcggctgctggacattgacgagacagagtaccatgcagatgggggcaaggtgcccatcaagtggatggcgctggagtccattctccgccggcggttcacccaccagagtgatgtgtggagttatggtgtgactgtgtgggagctgatgacttttggggccaaaccttacgatgggatcccagcccgggagatccctgacctgctggaaaagggggagcggctgccccagccccccatctgcaccattgatgtctacatgatcatggtcaaatgttggatgattgactctgaatgtcggccaagattccgggagttggtgtctgaattctcccgcatggccagggacccccagcgctttgtggtcatccagaatgaggacttgggcccagccagtcccttggacagcaccttctaccgctcactgctggaggacgatgacatgggggacctggtggatgctgaggagtatctggtaccccagcagggcttcttctgtccagaccctgccccgggcgctgggggcatggtccaccacaggcaccgcagctcatctaccaggagtggcggtggggacctgacactagggctggagccctctgaagaggaggcccccaggtctccactggcaccctccgaaggggctggctccgatgtatttgatggtgacctgggaatgggggcagccaaggggctgcaaagcctccccacacatgaccccagccctctacagcggtacagtgaggaccccacagtacccctgccctctgagactgatggctacgttgcccccctgacctgcagcccccagcctgaatatgtgaaccagccagatgttcggccccagcccccttcgccccgagagggccctctgcctgctgcccgacctgctggtgccactctggaaaggcccaagactctctccccagggaagaatggggtcgtcaaagacgtttttgcctttgggggtgccgtggagaaccccgagtacttgacaccccagggaggagctgcccctcagccccaccctcctcctgccttcagcccagccttcgacaacctctattactgggaccaggacccaccagagcggggggctccacccagcaccttcaaagggacacctacggcagagaacccagagtacctgggtctggacgtgccagtgtgaaccagaaggccaagtccgcagaagccctgatgtgtcctcagggagcagggaaggcctgacttctgctggcatcaagaggtgggagggccctccgaccacttccaggggaacctgccatgccaggaacctgtcctaaggaaccttccttcctgcttgagttcccagatggctggaaggggtccagcctcgttggaagaggaacagcactggggagtctttgtggattctgaggccctgcccaatgagactctagggtccagtggatgccacagcccagcttggccctttccttccagatcctgggtactgaaagccttagggaagctggcctgagaggggaagcggccctaagggagtgtctaagaacaaaagcgacccattcagagactgtccctgaaacctagtactgccccccatgaggaaggaacagcaatggtgtcagtatccaggctttgtacagagtgcttttctgtttagtttttactttttttgttttgtttttttaaagatgaaataaagacccagggggagaatgggtgttgtatggggaggcaagtgtggggggtccttctccacacccactttgtccatttgcaaatatattttggaaaacagcta

SEQ ID NO: 1817 - DNA, 4806 bp, Homo sapiens
acccgcccccatctgcccaagataattttagtttccttgggcctggaatctggacacacagggctcccccccgcctctgacttctctgtccgaagtcgggacaccctcctaccacctgtagagaagcgggagtggatctgaaataaaatccaggaatctgggggttcctagacggagccagacttcggaacgggtgtcctgctactcctgctggggctcctccaggacaagggcacacaactggttccgttaagcccctctcttgctcagacgccatggagctggatctgtctccacctcatcttagcagctctccggaagacctttgcccagcccctgggacccctcctgggactccccggccccctgatacccctctgcctgaggaggtaaagaggtcccagcctctcctcatcccaaccaccggcagtgtgcaccggcacagacatgaagctgcggctccctgccagtcccgagacccacctggacatgctccgccacctctaccagggctgccaggtggtgcagggaaacctggaactcacctacctgcccaccaatgccagcctgtccttcctgcaggtgaggcccgtgggcaacccagccaggccctgcctccagctgggctgagccctctgtttacaggatatccaggaggtgcagggctacgtgctcatcgctcacaaccaagtgaggcaggtcccactgcagaggctgcggattgtgcgaggcacccagctctttgaggacaactatgccctggccgtgctagacaatggagacccgctgaacaataccacccctgtcacaggggcctccccaggaggcctgcgggagctgcagcttcgaagcctcacagagatcttgaaaggaggggtcttgatccagcggaacccccagctctgctaccaggacacgattttgtggaaggacatcttccacaagaacaaccagctggctctcacactgatagacaccaaccgctctcgggcctgccacccctgttctccgatgtgtaagggctcccgctgctggggagagagttctgaggattgtcagagcctgacgcgcactgtctgtgccggtggctgtgcccgctgcaaggggccactgcccactgactgctgccatgagcagtgtgctgccggctgcacgggccccaagcactctgactgcctggcctgcctccacttcaaccacagtggcatctgtgagctgcactgcccagccctggtcacctacaacacagacacgtttgagtccatgcccaatcccgagggccggtatacattcggcgccagctgtgtgactgcctgtccctacaactacctttctacggacgtgggatcctgcaccctcgtctgccccctgcacaaccaagaggtgacagcagaggatggaacacagcggtgtgagaagtgcagcaagccctgtgcccgagtgtgctatggtctgggcatggagcacttgcgagaggtgagggcagttaccagtgccaatatccaggagtttgctggctgcaagaagatctttgggagcctggcatttctgccggagagctttgatggggacccagcctccaacactgccccgctccagccagagcagctccaagtgtttgagactctggaagagatcacaggttacctatacatctcagcatggccggacagcctgcctgacctcagcgtcttccagaacctgcaagtaatccggggacgaattctgcacaatggcgcctactcgctgaccctgcaagggctgggcatcagctggctggggctgcgctcactgagggaactgggcagtggactggccctcatccaccataacacccacctctgcttcgtgcacacggtgccctgggaccagctctttcggaacccgcaccaagctctgctccacactgccaaccggccagaggacgagtgtgtgggcgagggcctggcctgccaccagctgtgcgcccgagggcactgctggggtccagggcccacccagtgtgtcaactgcagccagttccttcggggccaggagtgcgtggaggaatgccgagtactgcaggggctccccagggagtatgtgaatgccaggcactgtttgccgtgccaccctgagtgtcagccccagaatggctcagtgacctgttttggaccggaggctgaccagtgtgtggcctgtgcccactataaggaccctcccttctgcgtggcccgctgccccagcggtgtgaaacctgacctctcctacatgcccatctggaagtttccagatgaggagggcgcatgccagccttgccccatcaactgcacccactcctgtgtggacctggatgacaagggctgccccgccgagcagagagccagccctctgacgtccatcatctctgcggtggttggcattctgctggtcgtggtcttgggggtggtctttgggatcctcatcaagcgacggcagcagaagatccggaagtacacgatgcggagactgctgcaggaaacggagctggtggagccgctgacacctagcggagcgatgcccaaccaggcgcagatgcggatcctgaaagagacggagctgaggaaggtgaaggtgcttggatctggcgcttttggcacagtctacaagggcatctggatccctgatggggagaatgtgaaaattccagtggccatcaaagtgttgagggaaaacacatcccccaaagccaacaaagaaatcttagacgaagcatacgtgatggctggtgtgggctccccatatgtctcccgccttctgggcatctgcctgacatccacggtgcagctggtgacacagcttatgccctatggctgcctcttagaccatgtccgggaaaaccgcggacgcctgggctcccaggacctgctgaactggtgtatgcagattgccaaggggatgagctacctggaggatgtgcggctcgtacacagggacttggccgctcggaacgtgctggtcaagagtcccaaccatgtcaaaattacagacttcgggctggctcggctgctggacattgacgagacagagtaccatgcagatgggggcaaggtgcccatcaagtggatggcgctggagtccattctccgccggcggttcacccaccagagtgatgtgtggagttatggtgtgactgtgtgggagctgatgacttttggggccaaaccttacgatgggatcccagcccgggagatccctgacctgctggaaaagggggagcggctgccccagccccccatctgcaccattgatgtctacatgatcatggtcaaatgttggatgattgactctgaatgtcggccaagattccgggagttggtgtctgaattctcccgcatggccagggacccccagcgctttgtggtcatccagaatgaggacttgggcccagccagtcccttggacagcaccttctaccgctcactgctggaggacgatgacatgggggacctggtggatgctgaggagtatctggtaccccagcagggcttcttctgtccagaccctgccccgggcgctgggggcatggtccaccacaggcaccgcagctcatctaccaggagtggcggtggggacctgacactagggctggagccctctgaagaggaggcccccaggtctccactggcaccctccgaaggggctggctccgatgtatttgatggtgacctgggaatgggggcagccaaggggctgcaaagcctccccacacatgaccccagccctctacagcggtacagtgaggaccccacagtacccctgccctctgagactgatggctacgttgcccccctgacctgcagcccccagcctgaatatgtgaaccagccagatgttcggccccagcccccttcgccccgagagggccctctgcctgctgcccgacctgctggtgccactctggaaaggcccaagactctctccccagggaagaatggggtcgtcaaagacgtttttgcctttgggggtgccgtggagaaccccgagtacttgacaccccagggaggagctgcccctcagccccaccctcctcctgccttcagcccagccttcgacaacctctattactgggaccaggacccaccagagcggggggctccacccagcaccttcaaagggacacctacggcagagaacccagagtacctgggtctggacgtgccagtgtgaaccagaaggccaagtccgcagaagccctgatgtgtcctcagggagcagggaaggcctgacttctgctggcatcaagaggtgggagggccctccgaccacttccaggggaacctgccatgccaggaacctgtcctaaggaaccttccttcctgcttgagttcccagatggctggaaggggtccagcctcgttggaagaggaacagcactggggagtctttgtggattctgaggccctgcccaatgagactctagggtccagtggatgccacagcccagcttggccctttccttccagatcctgggtactgaaagccttagggaagctggcctgagaggggaagcggccctaagggagtgtctaagaacaaaagcgacccattcagagactgtccctgaaacctagtactgccccccatgaggaaggaacagcaatggtgtcagtatccaggctttgtacagagtgcttttctgtttagtttttactttttttgttttgtttttttaaagatgaaataaagacccagggggagaatgggtgttgtatggggaggcaagtgtggggggtccttctccacacccactttgtccatttgcaaatatattttggaaaacagcta

SEQ ID NO: 1818 - DNA, 4446 bp, Homo sapiens
agttaagggcctggcgtctccctccctgaagacgtggtcccagccgggtgtcctgacgctcggggttcagtgtgcaccggcacagacatgaagctgcggctccctgccagtcccgagacccacctggacatgctccgccacctctaccagggctgccaggtggtgcagggaaacctggaactcacctacctgcccaccaatgccagcctgtccttcctgcaggtgaggcccgtgggcaacccagccaggccctgcctccagctgggctgagccctctgtttacaggatatccaggaggtgcagggctacgtgctcatcgctcacaaccaagtgaggcaggtcccactgcagaggctgcggattgtgcgaggcacccagctctttgaggacaactatgccctggccgtgctagacaatggagacccgctgaacaataccacccctgtcacaggggcctccccaggaggcctgcgggagctgcagcttcgaagcctcacagagatcttgaaaggaggggtcttgatccagcggaacccccagctctgctaccaggacacgattttgtggaaggacatcttccacaagaacaaccagctggctctcacactgatagacaccaaccgctctcgggcctgccacccctgttctccgatgtgtaagggctcccgctgctggggagagagttctgaggattgtcagagcctgacgcgcactgtctgtgccggtggctgtgcccgctgcaaggggccactgcccactgactgctgccatgagcagtgtgctgccggctgcacgggccccaagcactctgactgcctggcctgcctccacttcaaccacagtggcatctgtgagctgcactgcccagccctggtcacctacaacacagacacgtttgagtccatgcccaatcccgagggccggtatacattcggcgccagctgtgtgactgcctgtccctacaactacctttctacggacgtgggatcctgcaccctcgtctgccccctgcacaaccaagaggtgacagcagaggatggaacacagcggtgtgagaagtgcagcaagccctgtgcccgagtgtgctatggtctgggcatggagcacttgcgagaggtgagggcagttaccagtgccaatatccaggagtttgctggctgcaagaagatctttgggagcctggcatttctgccggagagctttgatggggacccagcctccaacactgccccgctccagccagagcagctccaagtgtttgagactctggaagagatcacaggttacctatacatctcagcatggccggacagcctgcctgacctcagcgtcttccagaacctgcaagtaatccggggacgaattctgcacaatggcgcctactcgctgaccctgcaagggctgggcatcagctggctggggctgcgctcactgagggaactgggcagtggactggccctcatccaccataacacccacctctgcttcgtgcacacggtgccctgggaccagctctttcggaacccgcaccaagctctgctccacactgccaaccggccagaggacgagtgtgtgggcgagggcctggcctgccaccagctgtgcgcccgagggcactgctggggtccagggcccacccagtgtgtcaactgcagccagttccttcggggccaggagtgcgtggaggaatgccgagtactgcaggggctccccagggagtatgtgaatgccaggcactgtttgccgtgccaccctgagtgtcagccccagaatggctcagtgacctgttttggaccggaggctgaccagtgtgtggcctgtgcccactataaggaccctcccttctgcgtggcccgctgccccagcggtgtgaaacctgacctctcctacatgcccatctggaagtttccagatgaggagggcgcatgccagccttgccccatcaactgcacccactcctgtgtggacctggatgacaagggctgccccgccgagcagagagccagccctctgacgtccatcatctctgcggtggttggcattctgctggtcgtggtcttgggggtggtctttgggatcctcatcaagcgacggcagcagaagatccggaagtacacgatgcggagactgctgcaggaaacggagctggtggagccgctgacacctagcggagcgatgcccaaccaggcgcagatgcggatcctgaaagagacggagctgaggaaggtgaaggtgcttggatctggcgcttttggcacagtctacaagggcatctggatccctgatggggagaatgtgaaaattccagtggccatcaaagtgttgagggaaaacacatcccccaaagccaacaaagaaatcttagacgaagcatacgtgatggctggtgtgggctccccatatgtctcccgccttctgggcatctgcctgacatccacggtgcagctggtgacacagcttatgccctatggctgcctcttagaccatgtccgggaaaaccgcggacgcctgggctcccaggacctgctgaactggtgtatgcagattgccaaggggatgagctacctggaggatgtgcggctcgtacacagggacttggccgctcggaacgtgctggtcaagagtcccaaccatgtcaaaattacagacttcgggctggctcggctgctggacattgacgagacagagtaccatgcagatgggggcaaggtgcccatcaagtggatggcgctggagtccattctccgccggcggttcacccaccagagtgatgtgtggagttatggtgtgactgtgtgggagctgatgacttttggggccaaaccttacgatgggatcccagcccgggagatccctgacctgctggaaaagggggagcggctgccccagccccccatctgcaccattgatgtctacatgatcatggtcaaatgttggatgattgactctgaatgtcggccaagattccgggagttggtgtctgaattctcccgcatggccagggacccccagcgctttgtggtcatccagaatgaggacttgggcccagccagtcccttggacagcaccttctaccgctcactgctggaggacgatgacatgggggacctggtggatgctgaggagtatctggtaccccagcagggcttcttctgtccagaccctgccccgggcgctgggggcatggtccaccacaggcaccgcagctcatctaccaggagtggcggtggggacctgacactagggctggagccctctgaagaggaggcccccaggtctccactggcaccctccgaaggggctggctccgatgtatttgatggtgacctgggaatgggggcagccaaggggctgcaaagcctccccacacatgaccccagccctctacagcggtacagtgaggaccccacagtacccctgccctctgagactgatggctacgttgcccccctgacctgcagcccccagcctgaatatgtgaaccagccagatgttcggccccagcccccttcgccccgagagggccctctgcctgctgcccgacctgctggtgccactctggaaaggcccaagactctctccccagggaagaatggggtcgtcaaagacgtttttgcctttgggggtgccgtggagaaccccgagtacttgacaccccagggaggagctgcccctcagccccaccctcctcctgccttcagcccagccttcgacaacctctattactgggaccaggacccaccagagcggggggctccacccagcaccttcaaagggacacctacggcagagaacccagagtacctgggtctggacgtgccagtgtgaaccagaaggccaagtccgcagaagccctgatgtgtcctcagggagcagggaaggcctgacttctgctggcatcaagaggtgggagggccctccgaccacttccaggggaacctgccatgccaggaacctgtcctaaggaaccttccttcctgcttgagttcccagatggctggaaggggtccagcctcgttggaagaggaacagcactggggagtctttgtggattctgaggccctgcccaatgagactctagggtccagtggatgccacagcccagcttggccctttccttccagatcctgggtactgaaagccttagggaagctggcctgagaggggaagcggccctaagggagtgtctaagaacaaaagcgacccattcagagactgtccctgaaacctagtactgccccccatgaggaaggaacagcaatggtgtcagtatccaggctttgtacagagtgcttttctgtttagtttttactttttttgttttgtttttttaaagatgaaataaagacccagggggagaatgggtgttgtatggggaggcaagtgtggggggtccttctccacacccactttgtccatttgcaaatatattttggaaaacagcta

SEQ ID NO: 1819 - DNA, 4794 bp, Homo sapiens
acccgcccccatctgcccaagataattttagtttccttgggcctggaatctggacacacagggctcccccccgcctctgacttctctgtccgaagtcgggacaccctcctaccacctgtagagaagcgggagtggatctgaaataaaatccaggaatctgggggttcctagacggagccagacttcggaacgggtgtcctgctactcctgctggggctcctccaggacaagggcacacaactggttccgttaagcccctctcttgctcagacgccatggagctggatctgtctccacctcatcttagcagctctccggaagacctttgcccagcccctgggacccctcctgggactccccggccccctgatacccctctgcctgaggaggtaaagaggtcccagcctctcctcatcccaaccaccggcagatacttcaaagattccagaagatatgccccgggggtcctggaagccacaagtgtgcaccggcacagacatgaagctgcggctccctgccagtcccgagacccacctggacatgctccgccacctctaccagggctgccaggtggtgcagggaaacctggaactcacctacctgcccaccaatgccagcctgtccttcctgcaggatatccaggaggtgcagggctacgtgctcatcgctcacaaccaagtgaggcaggtcccactgcagaggctgcggattgtgcgaggcacccagctctttgaggacaactatgccctggccgtgctagacaatggagacccgctgaacaataccacccctgtcacaggggcctccccaggaggcctgcgggagctgcagcttcgaagcctcacagagatcttgaaaggaggggtcttgatccagcggaacccccagctctgctaccaggacacgattttgtggaaggacatcttccacaagaacaaccagctggctctcacactgatagacaccaaccgctctcgggcctgccacccctgttctccgatgtgtaagggctcccgctgctggggagagagttctgaggattgtcagagcctgacgcgcactgtctgtgccggtggctgtgcccgctgcaaggggccactgcccactgactgctgccatgagcagtgtgctgccggctgcacgggccccaagcactctgactgcctggcctgcctccacttcaaccacagtggcatctgtgagctgcactgcccagccctggtcacctacaacacagacacgtttgagtccatgcccaatcccgagggccggtatacattcggcgccagctgtgtgactgcctgtccctacaactacctttctacggacgtgggatcctgcaccctcgtctgccccctgcacaaccaagaggtgacagcagaggatggaacacagcggtgtgagaagtgcagcaagccctgtgcccgagtgtgctatggtctgggcatggagcacttgcgagaggtgagggcagttaccagtgccaatatccaggagtttgctggctgcaagaagatctttgggagcctggcatttctgccggagagctttgatggggacccagcctccaacactgccccgctccagccagagcagctccaagtgtttgagactctggaagagatcacaggttacctatacatctcagcatggccggacagcctgcctgacctcagcgtcttccagaacctgcaagtaatccggggacgaattctgcacaatggcgcctactcgctgaccctgcaagggctgggcatcagctggctggggctgcgctcactgagggaactgggcagtggactggccctcatccaccataacacccacctctgcttcgtgcacacggtgccctgggaccagctctttcggaacccgcaccaagctctgctccacactgccaaccggccagaggacgagtgtgtgggcgagggcctggcctgccaccagctgtgcgcccgagggcactgctggggtccagggcccacccagtgtgtcaactgcagccagttccttcggggccaggagtgcgtggaggaatgccgagtactgcaggggctccccagggagtatgtgaatgccaggcactgtttgccgtgccaccctgagtgtcagccccagaatggctcagtgacctgttttggaccggaggctgaccagtgtgtggcctgtgcccactataaggaccctcccttctgcgtggcccgctgccccagcggtgtgaaacctgacctctcctacatgcccatctggaagtttccagatgaggagggcgcatgccagccttgccccatcaactgcacccactcctgtgtggacctggatgacaagggctgccccgccgagcagagagccagccctctgacgtccatcatctctgcggtggttggcattctgctggtcgtggtcttgggggtggtctttgggatcctcatcaagcgacggcagcagaagatccggaagtacacgatgcggagactgctgcaggaaacggagctggtggagccgctgacacctagcggagcgatgcccaaccaggcgcagatgcggatcctgaaagagacggagctgaggaaggtgaaggtgcttggatctggcgcttttggcacagtctacaagggcatctggatccctgatggggagaatgtgaaaattccagtggccatcaaagtgttgagggaaaacacatcccccaaagccaacaaagaaatcttagacgaagcatacgtgatggctggtgtgggctccccatatgtctcccgccttctgggcatctgcctgacatccacggtgcagctggtgacacagcttatgccctatggctgcctcttagaccatgtccgggaaaaccgcggacgcctgggctcccaggacctgctgaactggtgtatgcagattgccaaggggatgagctacctggaggatgtgcggctcgtacacagggacttggccgctcggaacgtgctggtcaagagtcccaaccatgtcaaaattacagacttcgggctggctcggctgctggacattgacgagacagagtaccatgcagatgggggcaaggtgcccatcaagtggatggcgctggagtccattctccgccggcggttcacccaccagagtgatgtgtggagttatggtgtgactgtgtgggagctgatgacttttggggccaaaccttacgatgggatcccagcccgggagatccctgacctgctggaaaagggggagcggctgccccagccccccatctgcaccattgatgtctacatgatcatggtcaaatgttggatgattgactctgaatgtcggccaagattccgggagttggtgtctgaattctcccgcatggccagggacccccagcgctttgtggtcatccagaatgaggacttgggcccagccagtcccttggacagcaccttctaccgctcactgctggaggacgatgacatgggggacctggtggatgctgaggagtatctggtaccccagcagggcttcttctgtccagaccctgccccgggcgctgggggcatggtccaccacaggcaccgcagctcatctaccaggagtggcggtggggacctgacactagggctggagccctctgaagaggaggcccccaggtctccactggcaccctccgaaggggctggctccgatgtatttgatggtgacctgggaatgggggcagccaaggggctgcaaagcctccccacacatgaccccagccctctacagcggtacagtgaggaccccacagtacccctgccctctgagactgatggctacgttgcccccctgacctgcagcccccagcctgaatatgtgaaccagccagatgttcggccccagcccccttcgccccgagagggccctctgcctgctgcccgacctgctggtgccactctggaaaggcccaagactctctccccagggaagaatggggtcgtcaaagacgtttttgcctttgggggtgccgtggagaaccccgagtacttgacaccccagggaggagctgcccctcagccccaccctcctcctgccttcagcccagccttcgacaacctctattactgggaccaggacccaccagagcggggggctccacccagcaccttcaaagggacacctacggcagagaacccagagtacctgggtctggacgtgccagtgtgaaccagaaggccaagtccgcagaagccctgatgtgtcctcagggagcagggaaggcctgacttctgctggcatcaagaggtgggagggccctccgaccacttccaggggaacctgccatgccaggaacctgtcctaaggaaccttccttcctgcttgagttcccagatggctggaaggggtccagcctcgttggaagaggaacagcactggggagtctttgtggattctgaggccctgcccaatgagactctagggtccagtggatgccacagcccagcttggccctttccttccagatcctgggtactgaaagccttagggaagctggcctgagaggggaagcggccctaagggagtgtctaagaacaaaagcgacccattcagagactgtccctgaaacctagtactgccccccatgaggaaggaacagcaatggtgtcagtatccaggctttgtacagagtgcttttctgtttagtttttactttttttgttttgtttttttaaagatgaaataaagacccagggggagaatgggtgttgtatggggaggcaagtgtggggggtccttctccacacccactttgtccatttgcaaatatattttggaaaacagcta

SEQ ID NO: 1820 - DNA, 4589 bp, Homo sapiens
acccgcccccatctgcccaagataattttagtttccttgggcctggaatctggacacacagggctcccccccgcctctgacttctctgtccgaagtcgggacaccctcctaccacctgtagagaagcgggagtggatctgaaataaaatccaggaatctgggggttcctagacggagccagacttcggaacgggtgtcctgctactcctgctggggctcctccagatacttcaaagattccagaagatatgccccgggggtcctggaagccacaagtgtgcaccggcacagacatgaagctgcggctccctgccagtcccgagacccacctggacatgctccgccacctctaccagggctgccaggtggtgcagggaaacctggaactcacctacctgcccaccaatgccagcctgtccttcctgcaggatatccaggaggtgcagggctacgtgctcatcgctcacaaccaagtgaggcaggtcccactgcagaggctgcggattgtgcgaggcacccagctctttgaggacaactatgccctggccgtgctagacaatggagacccgctgaacaataccacccctgtcacaggggcctccccaggaggcctgcgggagctgcagcttcgaagcctcacagagatcttgaaaggaggggtcttgatccagcggaacccccagctctgctaccaggacacgattttgtggaaggacatcttccacaagaacaaccagctggctctcacactgatagacaccaaccgctctcgggcctgccacccctgttctccgatgtgtaagggctcccgctgctggggagagagttctgaggattgtcagagcctgacgcgcactgtctgtgccggtggctgtgcccgctgcaaggggccactgcccactgactgctgccatgagcagtgtgctgccggctgcacgggccccaagcactctgactgcctggcctgcctccacttcaaccacagtggcatctgtgagctgcactgcccagccctggtcacctacaacacagacacgtttgagtccatgcccaatcccgagggccggtatacattcggcgccagctgtgtgactgcctgtccctacaactacctttctacggacgtgggatcctgcaccctcgtctgccccctgcacaaccaagaggtgacagcagaggatggaacacagcggtgtgagaagtgcagcaagccctgtgcccgagtgtgctatggtctgggcatggagcacttgcgagaggtgagggcagttaccagtgccaatatccaggagtttgctggctgcaagaagatctttgggagcctggcatttctgccggagagctttgatggggacccagcctccaacactgccccgctccagccagagcagctccaagtgtttgagactctggaagagatcacaggttacctatacatctcagcatggccggacagcctgcctgacctcagcgtcttccagaacctgcaagtaatccggggacgaattctgcacaatggcgcctactcgctgaccctgcaagggctgggcatcagctggctggggctgcgctcactgagggaactgggcagtggactggccctcatccaccataacacccacctctgcttcgtgcacacggtgccctgggaccagctctttcggaacccgcaccaagctctgctccacactgccaaccggccagaggacgagtgtgtgggcgagggcctggcctgccaccagctgtgcgcccgagggcactgctggggtccagggcccacccagtgtgtcaactgcagccagttccttcggggccaggagtgcgtggaggaatgccgagtactgcaggggctccccagggagtatgtgaatgccaggcactgtttgccgtgccaccctgagtgtcagccccagaatggctcagtgacctgttttggaccggaggctgaccagtgtgtggcctgtgcccactataaggaccctcccttctgcgtggcccgctgccccagcggtgtgaaacctgacctctcctacatgcccatctggaagtttccagatgaggagggcgcatgccagccttgccccatcaactgcacccactcctgtgtggacctggatgacaagggctgccccgccgagcagagagccagccctctgacgtccatcatctctgcggtggttggcattctgctggtcgtggtcttgggggtggtctttgggatcctcatcaagcgacggcagcagaagatccggaagtacacgatgcggagactgctgcaggaaacggagctggtggagccgctgacacctagcggagcgatgcccaaccaggcgcagatgcggatcctgaaagagacggagctgaggaaggtgaaggtgcttggatctggcgcttttggcacagtctacaagggcatctggatccctgatggggagaatgtgaaaattccagtggccatcaaagtgttgagggaaaacacatcccccaaagccaacaaagaaatcttagacgaagcatacgtgatggctggtgtgggctccccatatgtctcccgccttctgggcatctgcctgacatccacggtgcagctggtgacacagcttatgccctatggctgcctcttagaccatgtccgggaaaaccgcggacgcctgggctcccaggacctgctgaactggtgtatgcagattgccaaggggatgagctacctggaggatgtgcggctcgtacacagggacttggccgctcggaacgtgctggtcaagagtcccaaccatgtcaaaattacagacttcgggctggctcggctgctggacattgacgagacagagtaccatgcagatgggggcaaggtgcccatcaagtggatggcgctggagtccattctccgccggcggttcacccaccagagtgatgtgtggagttatggtgtgactgtgtgggagctgatgacttttggggccaaaccttacgatgggatcccagcccgggagatccctgacctgctggaaaagggggagcggctgccccagccccccatctgcaccattgatgtctacatgatcatggtcaaatgttggatgattgactctgaatgtcggccaagattccgggagttggtgtctgaattctcccgcatggccagggacccccagcgctttgtggtcatccagaatgaggacttgggcccagccagtcccttggacagcaccttctaccgctcactgctggaggacgatgacatgggggacctggtggatgctgaggagtatctggtaccccagcagggcttcttctgtccagaccctgccccgggcgctgggggcatggtccaccacaggcaccgcagctcatctaccaggagtggcggtggggacctgacactagggctggagccctctgaagaggaggcccccaggtctccactggcaccctccgaaggggctggctccgatgtatttgatggtgacctgggaatgggggcagccaaggggctgcaaagcctccccacacatgaccccagccctctacagcggtacagtgaggaccccacagtacccctgccctctgagactgatggctacgttgcccccctgacctgcagcccccagcctgaatatgtgaaccagccagatgttcggccccagcccccttcgccccgagagggccctctgcctgctgcccgacctgctggtgccactctggaaaggcccaagactctctccccagggaagaatggggtcgtcaaagacgtttttgcctttgggggtgccgtggagaaccccgagtacttgacaccccagggaggagctgcccctcagccccaccctcctcctgccttcagcccagccttcgacaacctctattactgggaccaggacccaccagagcggggggctccacccagcaccttcaaagggacacctacggcagagaacccagagtacctgggtctggacgtgccagtgtgaaccagaaggccaagtccgcagaagccctgatgtgtcctcagggagcagggaaggcctgacttctgctggcatcaagaggtgggagggccctccgaccacttccaggggaacctgccatgccaggaacctgtcctaaggaaccttccttcctgcttgagttcccagatggctggaaggggtccagcctcgttggaagaggaacagcactggggagtctttgtggattctgaggccctgcccaatgagactctagggtccagtggatgccacagcccagcttggccctttccttccagatcctgggtactgaaagccttagggaagctggcctgagaggggaagcggccctaagggagtgtctaagaacaaaagcgacccattcagagactgtccctgaaacctagtactgccccccatgaggaaggaacagcaatggtgtcagtatccaggctttgtacagagtgcttttctgtttagtttttactttttttgttttgtttttttaaagatgaaataaagacccagggggagaatgggtgttgtatggggaggcaagtgtggggggtccttctccacacccactttgtccatttgcaaatatattttggaaaacagcta

SEQ ID NO: 1821 - DNA, 4953 bp, Homo sapiens
acccgcccccatctgcccaagataattttagtttccttgggcctggaatctggacacacagggctcccccccgcctctgacttctctgtccgaagtcgggacaccctcctaccacctgtagagaagcgggagtggatctgaaataaaatccaggaatctgggggttcctagacggagccagacttcggaacgggtgtcctgctactcctgctggggctcctccagtcgcaattgaagtaccacctcccgagggtgattgcttccccatgcggggtagaacctttgctgtcctgttcaccactctacctccagcacagaatttggcttatgcctactcaatgtgaagatgatgaggatgaaaacctttgtgatgatccacttccacttaatgaatggtggcaaagcaaagctatattcaagaccacatgcaaagctactccctgagcaaagagtcacagataaaacgggggcaccagtagaatggccaggacaaacgcagtgcagcacagagactcagaccctggcagccatgcctgcgcaggcagtgatgagagtgacatgtactgttgtggacatgcacaaaagtgagatacttcaaagattccagaagatatgccccgggggtcctggaagccacaagtgtgcaccggcacagacatgaagctgcggctccctgccagtcccgagacccacctggacatgctccgccacctctaccagggctgccaggtggtgcagggaaacctggaactcacctacctgcccaccaatgccagcctgtccttcctgcaggatatccaggaggtgcagggctacgtgctcatcgctcacaaccaagtgaggcaggtcccactgcagaggctgcggattgtgcgaggcacccagctctttgaggacaactatgccctggccgtgctagacaatggagacccgctgaacaataccacccctgtcacaggggcctccccaggaggcctgcgggagctgcagcttcgaagcctcacagagatcttgaaaggaggggtcttgatccagcggaacccccagctctgctaccaggacacgattttgtggaaggacatcttccacaagaacaaccagctggctctcacactgatagacaccaaccgctctcgggcctgccacccctgttctccgatgtgtaagggctcccgctgctggggagagagttctgaggattgtcagagcctgacgcgcactgtctgtgccggtggctgtgcccgctgcaaggggccactgcccactgactgctgccatgagcagtgtgctgccggctgcacgggccccaagcactctgactgcctggcctgcctccacttcaaccacagtggcatctgtgagctgcactgcccagccctggtcacctacaacacagacacgtttgagtccatgcccaatcccgagggccggtatacattcggcgccagctgtgtgactgcctgtccctacaactacctttctacggacgtgggatcctgcaccctcgtctgccccctgcacaaccaagaggtgacagcagaggatggaacacagcggtgtgagaagtgcagcaagccctgtgcccgagtgtgctatggtctgggcatggagcacttgcgagaggtgagggcagttaccagtgccaatatccaggagtttgctggctgcaagaagatctttgggagcctggcatttctgccggagagctttgatggggacccagcctccaacactgccccgctccagccagagcagctccaagtgtttgagactctggaagagatcacaggttacctatacatctcagcatggccggacagcctgcctgacctcagcgtcttccagaacctgcaagtaatccggggacgaattctgcacaatggcgcctactcgctgaccctgcaagggctgggcatcagctggctggggctgcgctcactgagggaactgggcagtggactggccctcatccaccataacacccacctctgcttcgtgcacacggtgccctgggaccagctctttcggaacccgcaccaagctctgctccacactgccaaccggccagaggacgagtgtgtgggcgagggcctggcctgccaccagctgtgcgcccgagggcactgctggggtccagggcccacccagtgtgtcaactgcagccagttccttcggggccaggagtgcgtggaggaatgccgagtactgcaggggctccccagggagtatgtgaatgccaggcactgtttgccgtgccaccctgagtgtcagccccagaatggctcagtgacctgttttggaccggaggctgaccagtgtgtggcctgtgcccactataaggaccctcccttctgcgtggcccgctgccccagcggtgtgaaacctgacctctcctacatgcccatctggaagtttccagatgaggagggcgcatgccagccttgccccatcaactgcacccactcctgtgtggacctggatgacaagggctgccccgccgagcagagagccagccctctgacgtccatcatctctgcggtggttggcattctgctggtcgtggtcttgggggtggtctttgggatcctcatcaagcgacggcagcagaagatccggaagtacacgatgcggagactgctgcaggaaacggagctggtggagccgctgacacctagcggagcgatgcccaaccaggcgcagatgcggatcctgaaagagacggagctgaggaaggtgaaggtgcttggatctggcgcttttggcacagtctacaagggcatctggatccctgatggggagaatgtgaaaattccagtggccatcaaagtgttgagggaaaacacatcccccaaagccaacaaagaaatcttagacgaagcatacgtgatggctggtgtgggctccccatatgtctcccgccttctgggcatctgcctgacatccacggtgcagctggtgacacagcttatgccctatggctgcctcttagaccatgtccgggaaaaccgcggacgcctgggctcccaggacctgctgaactggtgtatgcagattgccaaggggatgagctacctggaggatgtgcggctcgtacacagggacttggccgctcggaacgtgctggtcaagagtcccaaccatgtcaaaattacagacttcgggctggctcggctgctggacattgacgagacagagtaccatgcagatgggggcaaggtgcccatcaagtggatggcgctggagtccattctccgccggcggttcacccaccagagtgatgtgtggagttatggtgtgactgtgtgggagctgatgacttttggggccaaaccttacgatgggatcccagcccgggagatccctgacctgctggaaaagggggagcggctgccccagccccccatctgcaccattgatgtctacatgatcatggtcaaatgttggatgattgactctgaatgtcggccaagattccgggagttggtgtctgaattctcccgcatggccagggacccccagcgctttgtggtcatccagaatgaggacttgggcccagccagtcccttggacagcaccttctaccgctcactgctggaggacgatgacatgggggacctggtggatgctgaggagtatctggtaccccagcagggcttcttctgtccagaccctgccccgggcgctgggggcatggtccaccacaggcaccgcagctcatctaccaggagtggcggtggggacctgacactagggctggagccctctgaagaggaggcccccaggtctccactggcaccctccgaaggggctggctccgatgtatttgatggtgacctgggaatgggggcagccaaggggctgcaaagcctccccacacatgaccccagccctctacagcggtacagtgaggaccccacagtacccctgccctctgagactgatggctacgttgcccccctgacctgcagcccccagcctgaatatgtgaaccagccagatgttcggccccagcccccttcgccccgagagggccctctgcctgctgcccgacctgctggtgccactctggaaaggcccaagactctctccccagggaagaatggggtcgtcaaagacgtttttgcctttgggggtgccgtggagaaccccgagtacttgacaccccagggaggagctgcccctcagccccaccctcctcctgccttcagcccagccttcgacaacctctattactgggaccaggacccaccagagcggggggctccacccagcaccttcaaagggacacctacggcagagaacccagagtacctgggtctggacgtgccagtgtgaaccagaaggccaagtccgcagaagccctgatgtgtcctcagggagcagggaaggcctgacttctgctggcatcaagaggtgggagggccctccgaccacttccaggggaacctgccatgccaggaacctgtcctaaggaaccttccttcctgcttgagttcccagatggctggaaggggtccagcctcgttggaagaggaacagcactggggagtctttgtggattctgaggccctgcccaatgagactctagggtccagtggatgccacagcccagcttggccctttccttccagatcctgggtactgaaagccttagggaagctggcctgagaggggaagcggccctaagggagtgtctaagaacaaaagcgacccattcagagactgtccctgaaacctagtactgccccccatgaggaaggaacagcaatggtgtcagtatccaggctttgtacagagtgcttttctgtttagtttttactttttttgttttgtttttttaaagatgaaataaagacccagggggagaatgggtgttgtatggggaggcaagtgtggggggtccttctccacacccactttgtccatttgcaaatatattttggaaaacagcta

SEQ ID NO: 1822 - DNA, 4693 bp, Homo sapiens
agttaagggcctggcgtctccctccctgaagacgtggtcccagccgggtgtcctgacgctcggggttcagcctactcaatgtgaagatgatgaggatgaaaacctttgtgatgatccacttccacttaatgaatggtggcaaagcaaagctatattcaagaccacatgcaaagctactccctgagcaaagagtcacagataaaacgggggcaccagtagaatggccaggacaaacgcagtgcagcacagagactcagaccctggcagccatgcctgcgcaggcagtgatgagagtgacatgtactgttgtggacatgcacaaaagtgagatacttcaaagattccagaagatatgccccgggggtcctggaagccacaagtgtgcaccggcacagacatgaagctgcggctccctgccagtcccgagacccacctggacatgctccgccacctctaccagggctgccaggtggtgcagggaaacctggaactcacctacctgcccaccaatgccagcctgtccttcctgcaggatatccaggaggtgcagggctacgtgctcatcgctcacaaccaagtgaggcaggtcccactgcagaggctgcggattgtgcgaggcacccagctctttgaggacaactatgccctggccgtgctagacaatggagacccgctgaacaataccacccctgtcacaggggcctccccaggaggcctgcgggagctgcagcttcgaagcctcacagagatcttgaaaggaggggtcttgatccagcggaacccccagctctgctaccaggacacgattttgtggaaggacatcttccacaagaacaaccagctggctctcacactgatagacaccaaccgctctcgggcctgccacccctgttctccgatgtgtaagggctcccgctgctggggagagagttctgaggattgtcagagcctgacgcgcactgtctgtgccggtggctgtgcccgctgcaaggggccactgcccactgactgctgccatgagcagtgtgctgccggctgcacgggccccaagcactctgactgcctggcctgcctccacttcaaccacagtggcatctgtgagctgcactgcccagccctggtcacctacaacacagacacgtttgagtccatgcccaatcccgagggccggtatacattcggcgccagctgtgtgactgcctgtccctacaactacctttctacggacgtgggatcctgcaccctcgtctgccccctgcacaaccaagaggtgacagcagaggatggaacacagcggtgtgagaagtgcagcaagccctgtgcccgagtgtgctatggtctgggcatggagcacttgcgagaggtgagggcagttaccagtgccaatatccaggagtttgctggctgcaagaagatctttgggagcctggcatttctgccggagagctttgatggggacccagcctccaacactgccccgctccagccagagcagctccaagtgtttgagactctggaagagatcacaggttacctatacatctcagcatggccggacagcctgcctgacctcagcgtcttccagaacctgcaagtaatccggggacgaattctgcacaatggcgcctactcgctgaccctgcaagggctgggcatcagctggctggggctgcgctcactgagggaactgggcagtggactggccctcatccaccataacacccacctctgcttcgtgcacacggtgccctgggaccagctctttcggaacccgcaccaagctctgctccacactgccaaccggccagaggacgagtgtgtgggcgagggcctggcctgccaccagctgtgcgcccgagggcactgctggggtccagggcccacccagtgtgtcaactgcagccagttccttcggggccaggagtgcgtggaggaatgccgagtactgcaggggctccccagggagtatgtgaatgccaggcactgtttgccgtgccaccctgagtgtcagccccagaatggctcagtgacctgttttggaccggaggctgaccagtgtgtggcctgtgcccactataaggaccctcccttctgcgtggcccgctgccccagcggtgtgaaacctgacctctcctacatgcccatctggaagtttccagatgaggagggcgcatgccagccttgccccatcaactgcacccactcctgtgtggacctggatgacaagggctgccccgccgagcagagagccagccctctgacgtccatcatctctgcggtggttggcattctgctggtcgtggtcttgggggtggtctttgggatcctcatcaagcgacggcagcagaagatccggaagtacacgatgcggagactgctgcaggaaacggagctggtggagccgctgacacctagcggagcgatgcccaaccaggcgcagatgcggatcctgaaagagacggagctgaggaaggtgaaggtgcttggatctggcgcttttggcacagtctacaagggcatctggatccctgatggggagaatgtgaaaattccagtggccatcaaagtgttgagggaaaacacatcccccaaagccaacaaagaaatcttagacgaagcatacgtgatggctggtgtgggctccccatatgtctcccgccttctgggcatctgcctgacatccacggtgcagctggtgacacagcttatgccctatggctgcctcttagaccatgtccgggaaaaccgcggacgcctgggctcccaggacctgctgaactggtgtatgcagattgccaaggggatgagctacctggaggatgtgcggctcgtacacagggacttggccgctcggaacgtgctggtcaagagtcccaaccatgtcaaaattacagacttcgggctggctcggctgctggacattgacgagacagagtaccatgcagatgggggcaaggtgcccatcaagtggatggcgctggagtccattctccgccggcggttcacccaccagagtgatgtgtggagttatggtgtgactgtgtgggagctgatgacttttggggccaaaccttacgatgggatcccagcccgggagatccctgacctgctggaaaagggggagcggctgccccagccccccatctgcaccattgatgtctacatgatcatggtcaaatgttggatgattgactctgaatgtcggccaagattccgggagttggtgtctgaattctcccgcatggccagggacccccagcgctttgtggtcatccagaatgaggacttgggcccagccagtcccttggacagcaccttctaccgctcactgctggaggacgatgacatgggggacctggtggatgctgaggagtatctggtaccccagcagggcttcttctgtccagaccctgccccgggcgctgggggcatggtccaccacaggcaccgcagctcatctaccaggagtggcggtggggacctgacactagggctggagccctctgaagaggaggcccccaggtctccactggcaccctccgaaggggctggctccgatgtatttgatggtgacctgggaatgggggcagccaaggggctgcaaagcctccccacacatgaccccagccctctacagcggtacagtgaggaccccacagtacccctgccctctgagactgatggctacgttgcccccctgacctgcagcccccagcctgaatatgtgaaccagccagatgttcggccccagcccccttcgccccgagagggccctctgcctgctgcccgacctgctggtgccactctggaaaggcccaagactctctccccagggaagaatggggtcgtcaaagacgtttttgcctttgggggtgccgtggagaaccccgagtacttgacaccccagggaggagctgcccctcagccccaccctcctcctgccttcagcccagccttcgacaacctctattactgggaccaggacccaccagagcggggggctccacccagcaccttcaaagggacacctacggcagagaacccagagtacctgggtctggacgtgccagtgtgaaccagaaggccaagtccgcagaagccctgatgtgtcctcagggagcagggaaggcctgacttctgctggcatcaagaggtgggagggccctccgaccacttccaggggaacctgccatgccaggaacctgtcctaaggaaccttccttcctgcttgagttcccagatggctggaaggggtccagcctcgttggaagaggaacagcactggggagtctttgtggattctgaggccctgcccaatgagactctagggtccagtggatgccacagcccagcttggccctttccttccagatcctgggtactgaaagccttagggaagctggcctgagaggggaagcggccctaagggagtgtctaagaacaaaagcgacccattcagagactgtccctgaaacctagtactgccccccatgaggaaggaacagcaatggtgtcagtatccaggctttgtacagagtgcttttctgtttagtttttactttttttgttttgtttttttaaagatgaaataaagacccagggggagaatgggtgttgtatggggaggcaagtgtggggggtccttctccacacccactttgtccatttgcaaatatattttggaaaacagcta

SEQ ID NO: 1823 - DNA, 4848 bp, Homo sapiens
acccgcccccatctgcccaagataattttagtttccttgggcctggaatctggacacacagggctcccccccgcctctgacttctctgtccgaagtcgggacaccctcctaccacctgtagagaagcgggagtggatctgaaataaaatccaggaatctgggggttcctagacggagccagacttcggaacgggtgtcctgctactcctgctggggctcctccagcctactcaatgtgaagatgatgaggatgaaaacctttgtgatgatccacttccacttaatgaatggtggcaaagcaaagctatattcaagaccacatgcaaagctactccctgagcaaagagtcacagataaaacgggggcaccagtagaatggccaggacaaacgcagtgcagcacagagactcagaccctggcagccatgcctgcgcaggcagtgatgagagtgacatgtactgttgtggacatgcacaaaagtgagatacttcaaagattccagaagatatgccccgggggtcctggaagccacaagtgtgcaccggcacagacatgaagctgcggctccctgccagtcccgagacccacctggacatgctccgccacctctaccagggctgccaggtggtgcagggaaacctggaactcacctacctgcccaccaatgccagcctgtccttcctgcaggatatccaggaggtgcagggctacgtgctcatcgctcacaaccaagtgaggcaggtcccactgcagaggctgcggattgtgcgaggcacccagctctttgaggacaactatgccctggccgtgctagacaatggagacccgctgaacaataccacccctgtcacaggggcctccccaggaggcctgcgggagctgcagcttcgaagcctcacagagatcttgaaaggaggggtcttgatccagcggaacccccagctctgctaccaggacacgattttgtggaaggacatcttccacaagaacaaccagctggctctcacactgatagacaccaaccgctctcgggcctgccacccctgttctccgatgtgtaagggctcccgctgctggggagagagttctgaggattgtcagagcctgacgcgcactgtctgtgccggtggctgtgcccgctgcaaggggccactgcccactgactgctgccatgagcagtgtgctgccggctgcacgggccccaagcactctgactgcctggcctgcctccacttcaaccacagtggcatctgtgagctgcactgcccagccctggtcacctacaacacagacacgtttgagtccatgcccaatcccgagggccggtatacattcggcgccagctgtgtgactgcctgtccctacaactacctttctacggacgtgggatcctgcaccctcgtctgccccctgcacaaccaagaggtgacagcagaggatggaacacagcggtgtgagaagtgcagcaagccctgtgcccgagtgtgctatggtctgggcatggagcacttgcgagaggtgagggcagttaccagtgccaatatccaggagtttgctggctgcaagaagatctttgggagcctggcatttctgccggagagctttgatggggacccagcctccaacactgccccgctccagccagagcagctccaagtgtttgagactctggaagagatcacaggttacctatacatctcagcatggccggacagcctgcctgacctcagcgtcttccagaacctgcaagtaatccggggacgaattctgcacaatggcgcctactcgctgaccctgcaagggctgggcatcagctggctggggctgcgctcactgagggaactgggcagtggactggccctcatccaccataacacccacctctgcttcgtgcacacggtgccctgggaccagctctttcggaacccgcaccaagctctgctccacactgccaaccggccagaggacgagtgtgtgggcgagggcctggcctgccaccagctgtgcgcccgagggcactgctggggtccagggcccacccagtgtgtcaactgcagccagttccttcggggccaggagtgcgtggaggaatgccgagtactgcaggggctccccagggagtatgtgaatgccaggcactgtttgccgtgccaccctgagtgtcagccccagaatggctcagtgacctgttttggaccggaggctgaccagtgtgtggcctgtgcccactataaggaccctcccttctgcgtggcccgctgccccagcggtgtgaaacctgacctctcctacatgcccatctggaagtttccagatgaggagggcgcatgccagccttgccccatcaactgcacccactcctgtgtggacctggatgacaagggctgccccgccgagcagagagccagccctctgacgtccatcatctctgcggtggttggcattctgctggtcgtggtcttgggggtggtctttgggatcctcatcaagcgacggcagcagaagatccggaagtacacgatgcggagactgctgcaggaaacggagctggtggagccgctgacacctagcggagcgatgcccaaccaggcgcagatgcggatcctgaaagagacggagctgaggaaggtgaaggtgcttggatctggcgcttttggcacagtctacaagggcatctggatccctgatggggagaatgtgaaaattccagtggccatcaaagtgttgagggaaaacacatcccccaaagccaacaaagaaatcttagacgaagcatacgtgatggctggtgtgggctccccatatgtctcccgccttctgggcatctgcctgacatccacggtgcagctggtgacacagcttatgccctatggctgcctcttagaccatgtccgggaaaaccgcggacgcctgggctcccaggacctgctgaactggtgtatgcagattgccaaggggatgagctacctggaggatgtgcggctcgtacacagggacttggccgctcggaacgtgctggtcaagagtcccaaccatgtcaaaattacagacttcgggctggctcggctgctggacattgacgagacagagtaccatgcagatgggggcaaggtgcccatcaagtggatggcgctggagtccattctccgccggcggttcacccaccagagtgatgtgtggagttatggtgtgactgtgtgggagctgatgacttttggggccaaaccttacgatgggatcccagcccgggagatccctgacctgctggaaaagggggagcggctgccccagccccccatctgcaccattgatgtctacatgatcatggtcaaatgttggatgattgactctgaatgtcggccaagattccgggagttggtgtctgaattctcccgcatggccagggacccccagcgctttgtggtcatccagaatgaggacttgggcccagccagtcccttggacagcaccttctaccgctcactgctggaggacgatgacatgggggacctggtggatgctgaggagtatctggtaccccagcagggcttcttctgtccagaccctgccccgggcgctgggggcatggtccaccacaggcaccgcagctcatctaccaggagtggcggtggggacctgacactagggctggagccctctgaagaggaggcccccaggtctccactggcaccctccgaaggggctggctccgatgtatttgatggtgacctgggaatgggggcagccaaggggctgcaaagcctccccacacatgaccccagccctctacagcggtacagtgaggaccccacagtacccctgccctctgagactgatggctacgttgcccccctgacctgcagcccccagcctgaatatgtgaaccagccagatgttcggccccagcccccttcgccccgagagggccctctgcctgctgcccgacctgctggtgccactctggaaaggcccaagactctctccccagggaagaatggggtcgtcaaagacgtttttgcctttgggggtgccgtggagaaccccgagtacttgacaccccagggaggagctgcccctcagccccaccctcctcctgccttcagcccagccttcgacaacctctattactgggaccaggacccaccagagcggggggctccacccagcaccttcaaagggacacctacggcagagaacccagagtacctgggtctggacgtgccagtgtgaaccagaaggccaagtccgcagaagccctgatgtgtcctcagggagcagggaaggcctgacttctgctggcatcaagaggtgggagggccctccgaccacttccaggggaacctgccatgccaggaacctgtcctaaggaaccttccttcctgcttgagttcccagatggctggaaggggtccagcctcgttggaagaggaacagcactggggagtctttgtggattctgaggccctgcccaatgagactctagggtccagtggatgccacagcccagcttggccctttccttccagatcctgggtactgaaagccttagggaagctggcctgagaggggaagcggccctaagggagtgtctaagaacaaaagcgacccattcagagactgtccctgaaacctagtactgccccccatgaggaaggaacagcaatggtgtcagtatccaggctttgtacagagtgcttttctgtttagtttttactttttttgttttgtttttttaaagatgaaataaagacccagggggagaatgggtgttgtatggggaggcaagtgtggggggtccttctccacacccactttgtccatttgcaaatatattttggaaaacagcta

SEQ ID NO: 1824 - DNA, 4601 bp, Homo sapiens
acccgcccccatctgcccaagataattttagtttccttgggcctggaatctggacacacagggctcccccccgcctctgacttctctgtccgaagtcgggacaccctcctaccacctgtagagaagcgggagtggatctgaaataaaatccaggaatctgggggttcctagacggagccagacttcggaacgggtgtcctgctactcctgctggggctcctccagtgtgcaccggcacagacatgaagctgcggctccctgccagtcccgagacccacctggacatgctccgccacctctaccagggctgccaggtggtgcagggaaacctggaactcacctacctgcccaccaatgccagcctgtccttcctgcaggtgaggcccgtgggcaacccagccaggccctgcctccagctgggctgagccctctgtttacaggatatccaggaggtgcagggctacgtgctcatcgctcacaaccaagtgaggcaggtcccactgcagaggctgcggattgtgcgaggcacccagctctttgaggacaactatgccctggccgtgctagacaatggagacccgctgaacaataccacccctgtcacaggggcctccccaggaggcctgcgggagctgcagcttcgaagcctcacagagatcttgaaaggaggggtcttgatccagcggaacccccagctctgctaccaggacacgattttgtggaaggacatcttccacaagaacaaccagctggctctcacactgatagacaccaaccgctctcgggcctgccacccctgttctccgatgtgtaagggctcccgctgctggggagagagttctgaggattgtcagagcctgacgcgcactgtctgtgccggtggctgtgcccgctgcaaggggccactgcccactgactgctgccatgagcagtgtgctgccggctgcacgggccccaagcactctgactgcctggcctgcctccacttcaaccacagtggcatctgtgagctgcactgcccagccctggtcacctacaacacagacacgtttgagtccatgcccaatcccgagggccggtatacattcggcgccagctgtgtgactgcctgtccctacaactacctttctacggacgtgggatcctgcaccctcgtctgccccctgcacaaccaagaggtgacagcagaggatggaacacagcggtgtgagaagtgcagcaagccctgtgcccgagtgtgctatggtctgggcatggagcacttgcgagaggtgagggcagttaccagtgccaatatccaggagtttgctggctgcaagaagatctttgggagcctggcatttctgccggagagctttgatggggacccagcctccaacactgccccgctccagccagagcagctccaagtgtttgagactctggaagagatcacaggttacctatacatctcagcatggccggacagcctgcctgacctcagcgtcttccagaacctgcaagtaatccggggacgaattctgcacaatggcgcctactcgctgaccctgcaagggctgggcatcagctggctggggctgcgctcactgagggaactgggcagtggactggccctcatccaccataacacccacctctgcttcgtgcacacggtgccctgggaccagctctttcggaacccgcaccaagctctgctccacactgccaaccggccagaggacgagtgtgtgggcgagggcctggcctgccaccagctgtgcgcccgagggcactgctggggtccagggcccacccagtgtgtcaactgcagccagttccttcggggccaggagtgcgtggaggaatgccgagtactgcaggggctccccagggagtatgtgaatgccaggcactgtttgccgtgccaccctgagtgtcagccccagaatggctcagtgacctgttttggaccggaggctgaccagtgtgtggcctgtgcccactataaggaccctcccttctgcgtggcccgctgccccagcggtgtgaaacctgacctctcctacatgcccatctggaagtttccagatgaggagggcgcatgccagccttgccccatcaactgcacccactcctgtgtggacctggatgacaagggctgccccgccgagcagagagccagccctctgacgtccatcatctctgcggtggttggcattctgctggtcgtggtcttgggggtggtctttgggatcctcatcaagcgacggcagcagaagatccggaagtacacgatgcggagactgctgcaggaaacggagctggtggagccgctgacacctagcggagcgatgcccaaccaggcgcagatgcggatcctgaaagagacggagctgaggaaggtgaaggtgcttggatctggcgcttttggcacagtctacaagggcatctggatccctgatggggagaatgtgaaaattccagtggccatcaaagtgttgagggaaaacacatcccccaaagccaacaaagaaatcttagacgaagcatacgtgatggctggtgtgggctccccatatgtctcccgccttctgggcatctgcctgacatccacggtgcagctggtgacacagcttatgccctatggctgcctcttagaccatgtccgggaaaaccgcggacgcctgggctcccaggacctgctgaactggtgtatgcagattgccaaggggatgagctacctggaggatgtgcggctcgtacacagggacttggccgctcggaacgtgctggtcaagagtcccaaccatgtcaaaattacagacttcgggctggctcggctgctggacattgacgagacagagtaccatgcagatgggggcaaggtgcccatcaagtggatggcgctggagtccattctccgccggcggttcacccaccagagtgatgtgtggagttatggtgtgactgtgtgggagctgatgacttttggggccaaaccttacgatgggatcccagcccgggagatccctgacctgctggaaaagggggagcggctgccccagccccccatctgcaccattgatgtctacatgatcatggtcaaatgttggatgattgactctgaatgtcggccaagattccgggagttggtgtctgaattctcccgcatggccagggacccccagcgctttgtggtcatccagaatgaggacttgggcccagccagtcccttggacagcaccttctaccgctcactgctggaggacgatgacatgggggacctggtggatgctgaggagtatctggtaccccagcagggcttcttctgtccagaccctgccccgggcgctgggggcatggtccaccacaggcaccgcagctcatctaccaggagtggcggtggggacctgacactagggctggagccctctgaagaggaggcccccaggtctccactggcaccctccgaaggggctggctccgatgtatttgatggtgacctgggaatgggggcagccaaggggctgcaaagcctccccacacatgaccccagccctctacagcggtacagtgaggaccccacagtacccctgccctctgagactgatggctacgttgcccccctgacctgcagcccccagcctgaatatgtgaaccagccagatgttcggccccagcccccttcgccccgagagggccctctgcctgctgcccgacctgctggtgccactctggaaaggcccaagactctctccccagggaagaatggggtcgtcaaagacgtttttgcctttgggggtgccgtggagaaccccgagtacttgacaccccagggaggagctgcccctcagccccaccctcctcctgccttcagcccagccttcgacaacctctattactgggaccaggacccaccagagcggggggctccacccagcaccttcaaagggacacctacggcagagaacccagagtacctgggtctggacgtgccagtgtgaaccagaaggccaagtccgcagaagccctgatgtgtcctcagggagcagggaaggcctgacttctgctggcatcaagaggtgggagggccctccgaccacttccaggggaacctgccatgccaggaacctgtcctaaggaaccttccttcctgcttgagttcccagatggctggaaggggtccagcctcgttggaagaggaacagcactggggagtctttgtggattctgaggccctgcccaatgagactctagggtccagtggatgccacagcccagcttggccctttccttccagatcctgggtactgaaagccttagggaagctggcctgagaggggaagcggccctaagggagtgtctaagaacaaaagcgacccattcagagactgtccctgaaacctagtactgccccccatgaggaaggaacagcaatggtgtcagtatccaggctttgtacagagtgcttttctgtttagtttttactttttttgttttgtttttttaaagatgaaataaagacccagggggagaatgggtgttgtatggggaggcaagtgtggggggtccttctccacacccactttgtccatttgcaaatatattttggaaaacagcta

SEQ ID NO: 1825 - DNA, 528 bp, Homo sapiens
ccttttctcggggcgcccgagaggccagctcagacctcccggctcgacaggcggcgcgggcggcgcaaaaaatcaccatgtaccaacctatccaaacttatccatggatgaatctatccagaagacgggagttccgatgcttgtcttgctctgaatgtctgcttgtcacctgcttagggttatcgactgtgattctgggactcattgttgttctacaggacccctctgactctgtggttttctctactggattaacaatgatagccataggtgctttttttgttgtcctcactggagtgacagccctgtgtacggttacagtcgacgagaacttgcagaaaaccacgaggctaagactaggagtgatacgaaaaagcggaagtctccaaggaactacagagccttccatgactcactcaataatcgctagcacctcgctgtagttgtacattgaaccctggcatcttcgtctttggaactaagtctcctgagcattgtttttaaatagaaataaaatctggcttttaa

SEQ ID NO: 1826 - DNA, 598 bp, Homo sapiens
ccttttctcggggcgcccgagaggccagctcagacctcccggctcgacaggcggcgcgggcggcgagggtgtctggctgttttggggaaactattcctgaccttattttgactaaaaagttgcctgctgtaccagcaaaaaatcaccatgtaccaacctatccaaacttatccatggatgaatctatccagaagacgggagttccgatgcttgtcttgctctgaatgtctgcttgtcacctgcttagggttatcgactgtgattctgggactcattgttgttctacaggacccctctgactctgtggttttctctactggattaacaatgatagccataggtgctttttttgttgtcctcactggagtgacagccctgtgtacggttacagtcgacgagaacttgcagaaaaccacgaggctaagactaggagtgatacgaaaaagcggaagtctccaaggaactacagagccttccatgactcactcaataatcgctagcacctcgctgtagttgtacattgaaccctggcatcttcgtctttggaactaagtctcctgagcattgtttttaaatagaaataaaatctggcttttaa

SEQ ID NO: 1827 - DNA, 592 bp, Homo sapiens
gaggatgggtaacatgcccgaaggcacagagagtgtcttggtctgtccggacgcgtctgtagagttacaggaagagaagggccgccctccagagggccgggagcgccccagcgcgggtccggggtcgagcaaaaaatcaccatgtaccaacctatccaaacttatccatggatgaatctatccagaagacgggagttccgatgcttgtcttgctctgaatgtctgcttgtcacctgcttagggttatcgactgtgattctgggactcattgttgttctacaggacccctctgactctgtggttttctctactggattaacaatgatagccataggtgctttttttgttgtcctcactggagtgacagccctgtgtacggttacagtcgacgagaacttgcagaaaaccacgaggctaagactaggagtgatacgaaaaagcggaagtctccaaggaactacagagccttccatgactcactcaataatcgctagcacctcgctgtagttgtacattgaaccctggcatcttcgtctttggaactaagtctcctgagcattgtttttaaatagaaataaaatctggcttttaa

SEQ ID NO: 1828 - DNA, 691 bp, Homo sapiens
gtttctctccctgcccccgcgacttcgcgcaagatccgggaaggacacccgaggcccctgggagaccctggggaggtgaaaatcagagagcgaagcgggccgtggcccctaggcctgacccctccccgcggggtaaggcgggcaccccgcgagcgcaggggtcctcttactgctgatggcacccagctctgggcccagacgccgctcaccgtccaccgccggtgctggcaaaaaatcaccatgtaccaacctatccaaacttatccatggatgaatctatccagaagacgggagttccgatgcttgtcttgctctgaatgtctgcttgtcacctgcttagggttatcgactgtgattctgggactcattgttgttctacaggacccctctgactctgtggttttctctactggattaacaatgatagccataggtgctttttttgttgtcctcactggagtgacagccctgtgtacggttacagtcgacgagaacttgcagaaaaccacgaggctaagactaggagtgatacgaaaaagcggaagtctccaaggaactacagagccttccatgactcactcaataatcgctagcacctcgctgtagttgtacattgaaccctggcatcttcgtctttggaactaagtctcctgagcattgtttttaaatagaaataaaatctggcttttaa

SEQ ID NO: 1829 - DNA, 1446 bp, Homo sapiens
ggccagtgcccggcgcgagtgggagtggcgcgcgcgcccctagccgccccccgcctctccccgctgcgctccctcgctccttccctgagctcccgggctccggcagcgggctggcggggcgccgcattgcacactctgggggcgccgcagtgttcgtgggatggggcagcgggctgcagctggcggccggaatccgcgcgcagcccggatatgccacacttctgcctgctgttggcaaccctcctggactaggctgctcttgttaatcacatggatgttgctgattactctgagtgcaaaccttttcactgttccagagaggagcctgacaaccacattctccttctcaagatataagagttcggaccgcccagcacacaaggtcagcatgctgctcctctgtcacgctctcgctatagctgttgtccagatcgttatcttctcagaaagctgggcatttgccaagaacatcaacttctataatgtgaggcctcctctcgaccctacaccatttccaaatagcttcaagtgctttacttgtgaaaacgcaggggataattataactgcaatcgatgggcagaagacaaatggtgtccacaaaatacacagtactgtttgacagttcatcacttcaccagccacggaagaagcacatccatcaccaaaaagtgtgcctccagaagtgaatgtcattttgtcggttgccaccacagccgagattctgaacatacggagtgtaggtcttgctgtgaaggaatgatctgcaatgtagaattacccaccaatcacactaatgcagtgtttgccgtaatgcacgctcagagaacatctggcagcagtgcccccacactctacctaccagtgcttgcctgggtctttgtgcttccattgctgtgatgccaccattcctaggagaggcagagaccagcctctaaagcacaagccaaaaactgtgtgaacggtgaactttggagtgaagatcaatcttgcacttggtgaagagtgcacattggacctcaaggcgaaagccagtggtttgcttggataaaatgttcccgcatgaggccacaggactgaggatgggaatttggcagggcctgagaagatggtctgacttccaggcttcctggtcaaagagagctacgtttgggcagttctgcagagaggatcctggcaactagtcccacctgactaggcctttagctgaaaggatttcttgacctccttgactgcctcagaggctgccaggtcaaaccctcttgtttatgtgattagctcagagcatctctatgaaatctaacccttcccctcatgagaaagcagttttccccaccaacagcatagtcaatgagaaaggcaactgtacgaagaaaacttccagtggaactaatatgaaatctatttgcaaattatggggggaaataaagcttttaaattatacaatg

SEQ ID NO: 1830 - DNA, 1303 bp, Homo sapiens
ggccagtgcccggcgcgagtgggagtggcgcgcgcgcccctagccgccccccgcctctccccgctgcgctccctcgctccttccctgagctcccgggctccggcagcgggctggcggggcgccgcattgcacactctgggggcgccgcagtgttcgtgggatggggcagcgggctgcagctggcggccggaatccgcgcgcagcccggatataagagttcggaccgcccagcacacaaggtcagcatgctgctcctctgtcacgctctcgctatagctgttgtccagatcgttatcttctcagaaagctgggcatttgccaagaacatcaacttctataatgtgaggcctcctctcgaccctacaccatttccaaatagcttcaagtgctttacttgtgaaaacgcaggggataattataactgcaatcgatgggcagaagacaaatggtgtccacaaaatacacagtactgtttgacagttcatcacttcaccagccacggaagaagcacatccatcaccaaaaagtgtgcctccagaagtgaatgtcattttgtcggttgccaccacagccgagattctgaacatacggagtgtaggtcttgctgtgaaggaatgatctgcaatgtagaattacccaccaatcacactaatgcagtgtttgccgtaatgcacgctcagagaacatctggcagcagtgcccccacactctacctaccagtgcttgcctgggtctttgtgcttccattgctgtgatgccaccattcctaggagaggcagagaccagcctctaaagcacaagccaaaaactgtgtgaacggtgaactttggagtgaagatcaatcttgcacttggtgaagagtgcacattggacctcaaggcgaaagccagtggtttgcttggataaaatgttcccgcatgaggccacaggactgaggatgggaatttggcagggcctgagaagatggtctgacttccaggcttcctggtcaaagagagctacgtttgggcagttctgcagagaggatcctggcaactagtcccacctgactaggcctttagctgaaaggatttcttgacctccttgactgcctcagaggctgccaggtcaaaccctcttgtttatgtgattagctcagagcatctctatgaaatctaacccttcccctcatgagaaagcagttttccccaccaacagcatagtcaatgagaaaggcaactgtacgaagaaaacttccagtggaactaatatgaaatctatttgcaaattatggggggaaataaagcttttaaattatacaatg

SEQ ID NO: 1831 - DNA, 1435 bp, Homo sapiens
ggccagtgcccggcgcgagtgggagtggcgcgcgcgcccctagccgccccccgcctctccccgctgcgctccctcgctccttccctgagctcccgggctccggcagcgggctggcggggcgccgcattgcacactctgggggcgccgcagtgttcgtgggatggggcagcgggctgcagctggcggccggaatccgcgcgcagcccggattatcgcggaacacctgcccattaatcttgaccctgttaaaacaataactgcctatccagatatgccacacttctgcctgctgttggcaaccctcctggactaggctgctcttgttaatcacatggatgttatataagagttcggaccgcccagcacacaaggtcagcatgctgctcctctgtcacgctctcgctatagctgttgtccagatcgttatcttctcagaaagctgggcatttgccaagaacatcaacttctataatgtgaggcctcctctcgaccctacaccatttccaaatagcttcaagtgctttacttgtgaaaacgcaggggataattataactgcaatcgatgggcagaagacaaatggtgtccacaaaatacacagtactgtttgacagttcatcacttcaccagccacggaagaagcacatccatcaccaaaaagtgtgcctccagaagtgaatgtcattttgtcggttgccaccacagccgagattctgaacatacggagtgtaggtcttgctgtgaaggaatgatctgcaatgtagaattacccaccaatcacactaatgcagtgtttgccgtaatgcacgctcagagaacatctggcagcagtgcccccacactctacctaccagtgcttgcctgggtctttgtgcttccattgctgtgatgccaccattcctaggagaggcagagaccagcctctaaagcacaagccaaaaactgtgtgaacggtgaactttggagtgaagatcaatcttgcacttggtgaagagtgcacattggacctcaaggcgaaagccagtggtttgcttggataaaatgttcccgcatgaggccacaggactgaggatgggaatttggcagggcctgagaagatggtctgacttccaggcttcctggtcaaagagagctacgtttgggcagttctgcagagaggatcctggcaactagtcccacctgactaggcctttagctgaaaggatttcttgacctccttgactgcctcagaggctgccaggtcaaaccctcttgtttatgtgattagctcagagcatctctatgaaatctaacccttcccctcatgagaaagcagttttccccaccaacagcatagtcaatgagaaaggcaactgtacgaagaaaacttccagtggaactaatatgaaatctatttgcaaattatggggggaaataaagcttttaaattatacaatg

SEQ ID NO: 1832 - DNA, 1804 bp, Homo sapiens
gggcatgaaagaccaaccactctgtaaatgcacataaagaacaacctccttgagcaatctcaagcaagagaaagaagaggcttccgagctccagcaaaacaatgggaaaaaacatacccttatcttttccttctcattttcaaaggtaccgtgaatataagtagaagaaagacaccgtctcttcctttaaggaacttacagtcttatggaagagacacagatggaagtgcacaattaccgaatatcatcaaaaagcctgagaaaaagttatgcaaaagctactgtgtgagcacagaggctgtaaacctaatcctaagttgcagggtgagcaacaaggcactattttggaagcagagaacagccctcaccagacacggaatctgctggtgccctgatcttggaattcccaccgtctagaactgtgcaagttctctcctgttgccctgagtgcccactcccaggccctctgtatgagtgacacttcagtctgccatggaacctggccctgctctggcctggctcctgctcctgagcctgctggcggattgtctgaaagctgctcagtcccgagacttcacagtgaaagacattatctacctccatccttcaaccacaccatatcctggtggatttaaatgtttcacctgtgaaaaggcagcagacaattatgagtgcaaccgatgggctccagacatctactgccctcgagatataagagttcggaccgcccagcacacaaggtcagcatgctgctcctctgtcacgctctcgctatagctgttgtccagatcgttatcttctcagaaagctgggcatttgccaagaacatcaacttctataatgtgaggcctcctctcgaccctacaccatttccaaatagcttcaagtgctttacttgtgaaaacgcaggggataattataactgcaatcgatgggcagaagacaaatggtgtccacaaaatacacagtactgtttgacagttcatcacttcaccagccacggaagaagcacatccatcaccaaaaagtgtgcctccagaagtgaatgtcattttgtcggttgccaccacagccgagattctgaacatacggagtgtaggtcttgctgtgaaggaatgatctgcaatgtagaattacccaccaatcacactaatgcagtgtttgccgtaatgcacgctcagagaacatctggcagcagtgcccccacactctacctaccagtgcttgcctgggtctttgtgcttccattgctgtgatgccaccattcctaggagaggcagagaccagcctctaaagcacaagccaaaaactgtgtgaacggtgaactttggagtgaagatcaatcttgcacttggtgaagagtgcacattggacctcaaggcgaaagccagtggtttgcttggataaaatgttcccgcatgaggccacaggactgaggatgggaatttggcagggcctgagaagatggtctgacttccaggcttcctggtcaaagagagctacgtttgggcagttctgcagagaggatcctggcaactagtcccacctgactaggcctttagctgaaaggatttcttgacctccttgactgcctcagaggctgccaggtcaaaccctcttgtttatgtgattagctcagagcatctctatgaaatctaacccttcccctcatgagaaagcagttttccccaccaacagcatagtcaatgagaaaggcaactgtacgaagaaaacttccagtggaactaatatgaaatctatttgcaaattatggggggaaataaagcttttaaattatacaatg

SEQ ID NO: 1833 - DNA, 1313 bp, Homo sapiens
actgcaaacgtcaagtggtctccgccttccctgggttcggagcttcacttgctcttgagctctgcggtccggcggatttcgcggggcccaggggatggcggggagtgagatttggccagggtcatttcacactgccgggcctgcagccacgcacgcagctgctggcccggctgaggctggcggctagggagaggcgccagggggtcgcgcacaggaagatataagagttcggaccgcccagcacacaaggtcagcatgctgctcctctgtcacgctctcgctatagctgttgtccagatcgttatcttctcagaaagctgggcatttgccaagaacatcaacttctataatgtgaggcctcctctcgaccctacaccatttccaaatagcttcaagtgctttacttgtgaaaacgcaggggataattataactgcaatcgatgggcagaagacaaatggtgtccacaaaatacacagtactgtttgacagttcatcacttcaccagccacggaagaagcacatccatcaccaaaaagtgtgcctccagaagtgaatgtcattttgtcggttgccaccacagccgagattctgaacatacggagtgtaggtcttgctgtgaaggaatgatctgcaatgtagaattacccaccaatcacactaatgcagtgtttgccgtaatgcacgctcagagaacatctggcagcagtgcccccacactctacctaccagtgcttgcctgggtctttgtgcttccattgctgtgatgccaccattcctaggagaggcagagaccagcctctaaagcacaagccaaaaactgtgtgaacggtgaactttggagtgaagatcaatcttgcacttggtgaagagtgcacattggacctcaaggcgaaagccagtggtttgcttggataaaatgttcccgcatgaggccacaggactgaggatgggaatttggcagggcctgagaagatggtctgacttccaggcttcctggtcaaagagagctacgtttgggcagttctgcagagaggatcctggcaactagtcccacctgactaggcctttagctgaaaggatttcttgacctccttgactgcctcagaggctgccaggtcaaaccctcttgtttatgtgattagctcagagcatctctatgaaatctaacccttcccctcatgagaaagcagttttccccaccaacagcatagtcaatgagaaaggcaactgtacgaagaaaacttccagtggaactaatatgaaatctatttgcaaattatggggggaaataaagcttttaaattatacaatg

SEQ ID NO: 1834 - DNA, 1848 bp, Homo sapiens; identical to SEQ ID NO: 1062

SEQ ID NO: 1835 - DNA, 1947 bp, Homo sapiens
gggcatgaaagaccaaccactctgtaaatgcacataaagaacaacctccttgagcaatctcaagcaagagaaagaagaggcttccgagctccagcaaaacaatgggaaaaaacatacccttatcttttccttctcattttcaaaggtaccgtgaatataagtagaagaaagacaccgtctcttcctttaaggaacttacagtcttatggaagagacacagatggaagtgcacaattaccgaatatcatcaaaaagcctgagaaaaagttatgcaaaagctactgtgtgagcacagaggctgtaaacctaatcctaagttgcagggtgagcaacaaggcactattttggaagcagagaacagccctcaccagacacggaatctgctggtgccctgatcttggaattcccaccgtctagaactgtgcaagttctctcctgttgccctgagtgcccactcccaggccctctgtatgagtgacacttcagtctgccatggaacctggccctgctctggcctggctcctgctcctgagcctgctggcggattgtctgaaagctgctcagtcccgagacttcacagtgaaagacattatctacctccatccttcaaccacaccatatcctggtggatttaaatgtttcacctgtgaaaaggcagcagacaattatgagtgcaaccgatgggctccagacatctactgccctcgagatatgccacacttctgcctgctgttggcaaccctcctggactaggctgctcttgttaatcacatggatgttgctgattactctgagtgcaaaccttttcactgttccagagaggagcctgacaaccacattctccttctcaagatataagagttcggaccgcccagcacacaaggtcagcatgctgctcctctgtcacgctctcgctatagctgttgtccagatcgttatcttctcagaaagctgggcatttgccaagaacatcaacttctataatgtgaggcctcctctcgaccctacaccatttccaaatagcttcaagtgctttacttgtgaaaacgcaggggataattataactgcaatcgatgggcagaagacaaatggtgtccacaaaatacacagtactgtttgacagttcatcacttcaccagccacggaagaagcacatccatcaccaaaaagtgtgcctccagaagtgaatgtcattttgtcggttgccaccacagccgagattctgaacatacggagtgtaggtcttgctgtgaaggaatgatctgcaatgtagaattacccaccaatcacactaatgcagtgtttgccgtaatgcacgctcagagaacatctggcagcagtgcccccacactctacctaccagtgcttgcctgggtctttgtgcttccattgctgtgatgccaccattcctaggagaggcagagaccagcctctaaagcacaagccaaaaactgtgtgaacggtgaactttggagtgaagatcaatcttgcacttggtgaagagtgcacattggacctcaaggcgaaagccagtggtttgcttggataaaatgttcccgcatgaggccacaggactgaggatgggaatttggcagggcctgagaagatggtctgacttccaggcttcctggtcaaagagagctacgtttgggcagttctgcagagaggatcctggcaactagtcccacctgactaggcctttagctgaaaggatttcttgacctccttgactgcctcagaggctgccaggtcaaaccctcttgtttatgtgattagctcagagcatctctatgaaatctaacccttcccctcatgagaaagcagttttccccaccaacagcatagtcaatgagaaaggcaactgtacgaagaaaacttccagtggaactaatatgaaatctatttgcaaattatggggggaaataaagcttttaaattatacaatg

SEQ ID NO: 1836 - DNA, 2614 bp, Homo sapiens
ggtccgtgaggcgcgggcggcggcgaccgcggcgccagtgagggggccctggggcccgggcggctccgggccggggccccgccgcgggacggaccatgctacgctccactggcttcttccgggccattgactgcccctattggtctggggcgcccggggggccctgccggcggccctactgccacttccggcaccgcggggcccggggctccggcgcgcccggtgacggcggagaggcgccccccgcagcaggggaacgcccttttgcttgtgactggcagggctgcgacaagaagttcgcccgctccgacgagctggcccgccaccaccggacgcacacgggcgagaagcgcttctcctgccctctgtgctccaagcgcttcacccgcagtgaccacctggccaagcacgcccgccgccaccccggcttccacccggacctgctccggcgccctggtgcccgcagtacctcccccagcgactcgctgccctgcagcctggccgggagccctgcgcccagccccgcgcccagcccagcccccgcaggcctgtagggccctcgtgcagcccaccctgaccgccaggatgcttctgccatccaggggtgtagtgaggacccacggggagcctgggccccttccagccgtgggcaaaccctgaagacacccctgcccccctccagagagtgaggagggggcctgagactggacctgggtctgcctgacctcagaggtggctctcaggatgggtgacgggggcttgtgtctgtaaatagccatgatactaactttcttcccatctgtgcaacggggcccccccagggcagctaggaggtcctcccctctcctctccaccaccccctgctgcccccctcccggggtggggtttgggggggtggagtggacttctgggagccggcccggggaaagcaccccctgccccatccctgcagattgggatgaagtgttcagacagccatagaggagtcgggggttgacacggcccctgcctctccccaccccacccccaccccaccgaaagccatgggagtagttcagggaaatgggggtgcagcccagccaccccccattcgggtactcaatctcaggtgtccacaagttctgcccacggtaggggctgcctggccccccagacctcgggggtagagccaggagtggggcagcgttaggatgcccggaggggctccaggtgttgcttctgagacctgggatggggagggaggggacctctgggttcttccaaagaacatttgactcagtggggtcgggagggaatcctggcttatttattttcctctgtcctcgggtgtgggggccctagctcgccctctctgggtgggtgggtgagagaggctgcaggggaggctggcaccgggcttgggcctccagtccctgccttgctgactttggccgttgcggtatcacgtgacaatcaactctcccttaacgacgactgcggctgttgggctgcgctgccctccctggcctgcaggtggggccgtggagcccatgcccgccggggttgcaggctcttccgggcctgggctgcagcctggcccggccctgcttccctggcctcccctccttctcctgggtgcttggaagaggtgggtcctggcccgtggttgaggtcttgcctcgtggactggaagcagagggctggctgtgcagcctcctggggtagctcgttttttttgcaccgggtagaatattttttcaggcacggattcctttttttctgggcccccatgggtggtccggcatcctcagggggtgtgagtgtgtgtggggggtctctgagctgaacttgggtggggtggggacttgttcctcgggggccacctttgtgtccttgtcagcggtcgtcctgctgtggcctgggttgcatttcctcttggggggggtattgaggacccccagcctggaatgagaagggtccccggttccatgtcagacccagaaaggtggatccccccactgttggctgcaggaggtttttggtacccccttttgttccagaaccgtcctgcctctcgcttggggacaggggggctttggatggcactggtgtgcacctggacccagccccggcctggcaggatccagggatgggtgcctgggatcctggggggagggaggcaggggacgcccttctggagctgggctcggagggtcctgccccatccagccctcggctctctgtgttctctgtccctagcctcaaaccctcttctggcagcgctagtgagatgccttagtctgtgggggtgggtgggggactggggccccgttttcctttgtgagtcttggttggccccagccctggcaggggcctgtctggagcaggggtaggtagggctgtgggttccagaactctataactgggcccctctccagtgtccaggggcttggagagacctgcgcccacccctccactctcccaggagtcgctgatcactgggacctggttccagccgtttgcaggggaggcggctccgagaggcgtgtgctttccgtgggtggcgcccctcccccgccctgcctggcctcatccttgtatttaattaattaaacaagcccctttttaaacccta

SEQ ID NO: 1837 - DNA, 1525 bp, Homo sapiens
aaaccttggcttcagcccggccgccgccaggcgttggcatcgccggggagagccttccggactccgggcggcggctggctgggggcgcgttccgaggcgccctcaggcagggcgcgggggcagagcctcgcctgggttctggaggctgcggggccatcgctccagatgcgaaagccatggagttgagctgcagcgaagcacctctttacgggcagatgatgatctatgcgaagtttgacaaaaatgtgtatcttcctgaagatgctgagttttactttacttatgacggatctcatcagcgacatgtcatgattgcagagcgcatcgaggataacgttctccagtccagcgtcccaggccatgggcttcaggagacggtgacggtatctgtgtgcctctgctcggaaggttactctccggtgaccatgggctctggctcagtgacctacgtggacaacatggcttgcaggctggctcgtctgctggtgacgcaggccaatcgcctcacagcctgcagccaccagaccctgctgaccccatttgccttgacggcaggagcactgcctgccttggatgaggagctcgtgctggctctgacccatctggaattgcctctagagtggactgtgttgggaagttcttcacttgaagatgaaagaaacaatcatgaaccaggaaaaactcgccaaactgcaggcacaagtgcgcattggtgggaaaggaactgctcgcagaaagaagaaggtggttcatagaacagccacagcagatgacaaaaaacttcagttctccttaaagaagttaggggtaaacaatatctctggtattgaagaggtgaatatgtttacaaaccaaggaacagtgatccactttaacaaccctaaagttcaggcatctctggcagcgaacactttcaccattacaggccatgctgagacaaagcagctgacagaaatgctacccagcatcttaaaccagcttggtgcggatagtctgactagtttaaggagactggccgaagctctgcccaaacaatctgtggatggaaaagcaccacttgctactggagaggatgatgatgatgaagttccagatcttgtggagaattttgatgaggcttccaagaatgaggcaaactgaattgagtcaacttctgaagataaaacctgaagaagttactgggagctgctattttatattatgactgctttttaagaaatttttgtttatggatctgataaaatctagatctctaatatttttaagcccaagccccttggacactgcagctcttttcagtttttgcttatacacaattcattctttgcagctaattaagccgaagaagcctgggaatcaagtttgaaacaaagattaataaagttctttgcctagtatacagttttatttttttatttcattgacaccgatctgtacacagtaaaaaaaattgcttatagaaagctaatcatggcatgtaatatggctgataacctttggaatttgattaaagatttaaaatcac

SEQ ID NO: 1838 - DNA, 1014 bp, Homo sapiens
aaaccttggcttcagcccggccgccgccaggcgttggcatcgccggggagagccttccggactccgggcggcggctggctgggggcgcgttccgaggcgccctcaggcagggcgcgggggcagagcctcgcctgggttctggaggctgcggggccatcgctccagatgcgaaagccatggagttgagctgcagcgaagcacctctttacggaactgctcgcagaaagaagaaggtggttcatagaacagccacagcagatgacaaaaaacttcagttctccttaaagaagttaggggtaaacaatatctctggtattgaagaggtgaatatgtttacaaaccaaggaacagtgatccactttaacaaccctaaagttcaggcatctctggcagcgaacactttcaccattacaggccatgctgagacaaagcagctgacagaaatgctacccagcatcttaaaccagcttggtgcggatagtctgactagtttaaggagactggccgaagctctgcccaaacaatctgtggatggaaaagcaccacttgctactggagaggatgatgatgatgaagttccagatcttgtggagaattttgatgaggcttccaagaatgaggcaaactgaattgagtcaacttctgaagataaaacctgaagaagttactgggagctgctattttatattatgactgctttttaagaaatttttgtttatggatctgataaaatctagatctctaatatttttaagcccaagccccttggacactgcagctcttttcagtttttgcttatacacaattcattctttgcagctaattaagccgaagaagcctgggaatcaagtttgaaacaaagattaataaagttctttgcctagtatacagttttatttttttatttcattgacaccgatctgtacacagtaaaaaaaattgcttatagaaagctaatcatggcatgtaatatggctgataacctttggaatttgattaaagatttaaaatcac

SEQ ID NO: 1839 - DNA, 1039 bp, Homo sapiens
aaaccttggcttcagcccggccgccgccaggcgttggcatcgccggggagagccttccggactccgggcggcggctggctgggggcgcgttccgaggcgccctcaggcagggcgcgggggcagagcctcgcctgggttctggaggctgcggggccatcgctccagatgaaagaaacaatcatgaaccaggaaaaactcgccaaactgcaggcacaagtgcgcattggtgggaaaggaactgctcgcagaaagaagaaggtggttcatagaacagccacagcagatgacaaaaaacttcagttctccttaaagaagttaggggtaaacaatatctctggtattgaagaggtgaatatgtttacaaaccaaggaacagtgatccactttaacaaccctaaagttcaggcatctctggcagcgaacactttcaccattacaggccatgctgagacaaagcagctgacagaaatgctacccagcatcttaaaccagcttggtgcggatagtctgactagtttaaggagactggccgaagctctgcccaaacaatctgtggatggaaaagcaccacttgctactggagaggatgatgatgatgaagttccagatcttgtggagaattttgatgaggcttccaagaatgaggcaaactgaattgagtcaacttctgaagataaaacctgaagaagttactgggagctgctattttatattatgactgctttttaagaaatttttgtttatggatctgataaaatctagatctctaatatttttaagcccaagccccttggacactgcagctcttttcagtttttgcttatacacaattcattctttgcagctaattaagccgaagaagcctgggaatcaagtttgaaacaaagattaataaagttctttgcctagtatacagttttatttttttatttcattgacaccgatctgtacacagtaaaaaaaattgcttatagaaagctaatcatggcatgtaatatggctgataacctttggaatttgattaaagatttaaaatcac

SEQ ID NO: 1840 - DNA, 1083 bp, Homo sapiens
aaaccttggcttcagcccggccgccgccaggcgttggcatcgccggggagagccttccggactccgggcggcggctggctgggggcgcgttccgaggcgccctcaggcagggcgcgggggcagagcctcgcctgggttctggaggctgcggggccatcgctccagatgcgaaagccatggagttgagctgcagcgaagcacctctttacatgaaagaaacaatcatgaaccaggaaaaactcgccaaactgcaggcacaagtgcgcattggtgggaaaggaactgctcgcagaaagaagaaggtggttcatagaacagccacagcagatgacaaaaaacttcagttctccttaaagaagttaggggtaaacaatatctctggtattgaagaggtgaatatgtttacaaaccaaggaacagtgatccactttaacaaccctaaagttcaggcatctctggcagcgaacactttcaccattacaggccatgctgagacaaagcagctgacagaaatgctacccagcatcttaaaccagcttggtgcggatagtctgactagtttaaggagactggccgaagctctgcccaaacaatctgtggatggaaaagcaccacttgctactggagaggatgatgatgatgaagttccagatcttgtggagaattttgatgaggcttccaagaatgaggcaaactgaattgagtcaacttctgaagataaaacctgaagaagttactgggagctgctattttatattatgactgctttttaagaaatttttgtttatggatctgataaaatctagatctctaatatttttaagcccaagccccttggacactgcagctcttttcagtttttgcttatacacaattcattctttgcagctaattaagccgaagaagcctgggaatcaagtttgaaacaaagattaataaagttctttgcctagtatacagttttatttttttatttcattgacaccgatctgtacacagtaaaaaaaattgcttatagaaagctaatcatggcatgtaatatggctgataacctttggaatttgattaaagatttaaaatcac

SEQ ID NO: 1841 - DNA, 581 bp, Homo sapiens; identical to SEQ ID NO: 1533

SEQ ID NO: 1842 - DNA, 731 bp, Homo sapiens; identical to SEQ ID NO: 1532

SEQ ID NO: 1843 - DNA, 3379 bp, Homo sapiens
cgggacggccgcgggaaaaggcgcgcggaaggggtcctgccaccgcgccacttggcctgcctccgtcccgccgcgccacttggcctgcctccgtcccgccgcgccacttcgcctgcctccgtcccccgcccgccgcgccatgcctgtggccggctcggagctgccgcgccggcccttgccccccgccgcacaggagcgggacgccgagccgcgtccgccgcacggggagctgcagtacctggggcagatccaacacatcctccgctgcggcgtcaggaaggacgaccgcacgggcaccggcaccctgtcggtattcggcatgcaggcgcgctacagcctgagagatgaattccctctgctgacaaccaaacgtgtgttctggaagggtgttttggaggagttgctgtggtttatcaagggatccacaaatgctaaagagctgtcttccaagggagtgaaaatctgggatgccaatggatcccgagactttttggacagcctgggattctccaccagagaagaaggggacttgggcccagtttatggcttccagtggaggcattttggggcagaatacagagatatggaatcagggcagagcggcttgggtaaatccaccttaatcaacaccctcttcaaatccaaaatcagccggaagtcggtgcagcccacctcagaggagcgcatccccaagaccatcgagatcaagtccatcacgcacgatattgaggagaaaggcgtccggatgaagctgacagtgattgacacaccagggttcggggaccacatcaacaacgagaactgctggcagcccatcatgaagttcatcaatgaccagtacgagaaatacctgcaggaggaggtcaacatcaaccgcaagaagcgcatcccggacacccgcgtccactgctgcctctacttcatccccgccaccggccactccctcaggcccctggacatcgagtttatgaaacgcctgagcaaggtggtcaacatcgtccctgtcatcgccaaggcggacacactcaccctggaggagagggtccacttcaaacagcggatcaccgcagacctgctgtccaacggcatcgacgtgtacccccagaaggaatttgatgaggactcggaggaccggctggtgaacgagaagttccgggagatgatcccatttgctgtggtgggcagtgaccacgagtaccaggtcaacggcaagaggatccttgggaggaagaccaagtggggtaccatcgaagttgaaaacaccacacactgtgagtttgcctacctgcgggaccttctcatcaggacgcacatgcagaacatcaaggacatcaccagcagcatccacttcgaggcgtaccgtgtgaagcgcctcaacgagggcagcagcgccatggccaacggcatggaggagaaggagccagaagccccggagatgtagacgccaccctgcccacccccgggatcctgcccccaagtcatttccgtccccccccaggccctcccaccaccccattttattttatatgattttctccatttgtcatcgttccccaccccttcgacatgctgccaggaaacaagggaaggggcctccctccgagtgagtcagtgatgaggccgcggcctccccgaggttgtggggaggctgcactggagccacaggcaggggtgagagcacccactgaattgacatgaccctctgtccccaggcctggctccccgagggctcagaagagcagcttcggtgtgcagatcatccgtctgtgtggggttctcagtgccggaggccttggggtgggggccaggcctcgcacttgcagaggagcccagtgggctgcacgctcccctccatccccatcggccctgtcccctggagtgtgtcagagcccaggggagaatgcagcccaccaggagcacctggaccccctgcccgccacatggtgtggccatcactcagcccctacccctgccctgctcctaagggtagaaaactccagggtcccctgccaccgactgcccagccactccaagccccctggcagctgcccctcctggagcagaaagtgcctttatctcagccatccgcagactgcttggccagatgcggggacaggctggaatgagggaggcgtcttcatctccctgccatccccctctcacgccacccccgcccccaccgggctgcaggtgctgctgatgcgctgggatctgattgaggataaaaaggaaggagagatgacccctaccccctcatcccccagttttgaaaaggtctaagcaagtgagtctggtggaggagctgagggagggagccatggaaggtgccagaaggaaggttggcgggggcacgtgtgggccgtggcttgggctggtcagagtggcgtgagctgcccggcgcctgccctgcccaagtgaccagggaagtgtgtgtgtgtccatgtgtatgcgtgtccgtctgtctgtctagtgtctgggtttggcccaagactgggctgtagttacattaatgcccagccagccacccctgccactcacccttcctggcccaggccttgctgactctctgagctggggaggtgggaggccaggcgagcctgactctgttgatctacccgtgcctgggcccctcccctcagagcccatggtaacgaacccctagaaaggagagaacgggcgtcaggggtgcacagtccacagctgaagagcaaggtttcgtggcagcacggcccggcccctcaccctctgtccccacgaggggacccatgggggctgtctttgcagggcacagatgaccaaagtcccttcctgcttcctgttacctgtcttgctcctggggagaaagaggggcctgatgagactccactcaggtgcacacatcaccaggtgcatctgcaggcaccgggctggctgcttgcagccaggagaaggtcagcgagaaggagtgtatgagtgtgagtgtgtgtgcatggaagttggggcactgggcgtctgactccctccccacccaagagaggaaggacccctcaccacccccactggtgagacagtttactttgccaacttgccatgtttttgccaaaaccaagattttgaaggaaatgagtggccagcgccagggcccaggccatgtggcctgcccagcctcaatgtcacttggtggcggggtggggtgggggtgggcagcagcatcccagccttgagatgcttcactttccttctctgtaaccagactttgaaaaattgttcgtttcatcaggctctgttcctcaatggccttttgctacgtgcctcccgagaaatttgtctttttgtataaatgacaaagtgttgaaaatgtatttcctgaaataaatgtttcaaatgcagaaacccagaa

SEQ ID NO: 1844 - DNA, 939 bp, Homo sapiens
gcccagggcggggaatcgcgtaatggcggacacaggcagggcgagcgcggctgggggcgtagcgcgctgagggggtccggccgtttggcagcccgcgaggcggtccgcgggagcacactctgtgcggagactgggcggccggccgacccttcctgtcgctgacggcgactgcgggaggccaggtctagtgacggagcccgcgcgcggcgccaccatgcggcagaaggcggtatcgcttttcttgtgctacctgctgctcttcacttgcagtggggtggaggcaggtgagaatgcgggtaagaaaaagtgctcggagagctcggacagcggctccgggttctggaaggccctgaccttcatggccgtcggaggaggactcgcagtcgccgggctgcccgcgctgggcttcaccggcgccggcatcgcggccaactcggtggctgcctcgctgatgagctggtctgcgatcctgaatgggggcggcgtgcccgccggggggctagtggccacgctgcagagcctcggggctggtggcagcagcgtcgtcataggtaatattggtgccctgatgggctacgccacccacaagtatctcgatagtgaggaggatgaggagtagccagcagctcccagaacctcttcttccttcttggcctaactcttccagttaggatctagaactttgcctttttttttttttttttttttttgagatgggttctcactatattgtccaggctagagtgcagtggctattcacagatgcgaacatagtacactgcagcctccaactcctagcctcaagtgatcctcctgtctcaacctcccaagtaggattacaagcatgcgccgacgatgcccagaatccagaactttgtctatcactctccccaacaacctagatgtgaaaacagaataaacttcacccagaaaacactt

SEQ ID NO: 1845-2000 - skipped (156 entries)

SEQ ID NO: 2001 - RNA, 1356 nt, Homo sapiens
uuaugaggucgugccugauuuauagacaaaaugccauaaugaaaucuggaucaugaugagaagaagcguccagacuugaaguuccauugaagaauuagaggcucugcagcucuugccguccuccugcaggguuccuguuacacagcugcagagaggcccauccacccggcucgugcaaaucugcucacacccuccauuguccucacaccaguccagccuuuuucuccuaauaggucccacugaaaugaucuguucuuugggcucuuuuguguaaucuguggcaauccuggaauugugugggcaagugauuuuacaggaguacuuuucugagucgcagagugacacugcacagugaaggugaacuucgucguaauccccuaugaauuuaaagacggugacgugaaagcgacaggucagggagacugcauucuccucgaugccaaugguguuaucuuugagguucugacaccaagaaaaggacuugacauguuccugaaucaugauccaggucuggccaaagucaucugacuuccacagcugcuuguuggggugggaccugucaaagcccaagagaagguuggaggccuuacuguguaggaggagaucagcugcccgaaaugggauggaaaagccuugaagaguguugcagaagucaaacgugauccagagguacugggcauaagcgucugcaaagauguaccgcuuguuguccgcagggcugugguagaacugggcgauaacagcuucacuccuauuucccaagccaaaguuuaacuugucugaaauuuucuugaaugauuuuccauagucguaagacacguacacaucacugcucuugggccucgccaaugccaggcuaucucgggccaaggccacgaucacguugcuuuucucuccagcccagugcaccaccaucugauugugggaaucauucagacuaaccuguccguacaccuugaugggcucgggcugcagggcagcgcuccguuuccuccggagcggcuucucguccgcgcggcucgccccccuggcauccccgcgcgcccacagccgcagcucgcgcgggucgcccugcaccacgaggaagccccgguccuggggcaagggcgcgcugccgccgugcagccucugcguccagacuucgcagagagcuccgggcggcagcagugcgaccagggugaauaggaacgggagucgcgacucccuccugcugcuccgugucgccauguucgggcgaacgcuacugcagguggcgccgccgccaggagagaaugugcagcgcgaggccaggagagccgcugggccgggaccgcgcgcgccgcucccggggcuccaggccgcccgcgccgcuccggg

SEQ ID NO: 2002 - RNA, 2283 nt, Homo sapiens
uuaugaggucgugccugauuuauagacaaaaugccauaaugaaaucuggaucaugaugagaagaagcguccagacuugaaguuccauugaagaauuagaggcucugcagcucuugccguccuccugcaggguuccuguuacacagcugcagagaggcccauccacccggcucgugcaaaucugcucacacccuccauuguccucacaccaguccagccuuuuucuccuaauaggucccacugaaaugaucuguucuuugggcucuuuuguguaaucuguggcaauccuggaauugugugggcaagugauuuuacaggaguacuuuucugagucgcagagugacacugcacagugaaggugaacuucgucguaauccccuaugaauuuaaagacggugacgugaaagcgacaggucagggagacugcauucuccucgaugccaaugguguuaucuuugagguucugacacuuuagcucguugguuuccaugcccugggcaauagccgugaugauuccgccguggucuccccauguguaguagugagguccaggaagugccucucgccaccuggcuccagcacugcuagagauguacacguuugucuugcuagccaaguucuuucccacugagccaguggcgaugaugaggccuggagccgacuccuuggacaggaugggcauucuccggagcuggagguugaggagcugacugaggcgcugagccagaugaagggaacagcccugggaaagcucacaauugauuuucucuccauaucccgugaaggcuggagccugaagaaacucccagguucccccuuugucaaaggugaugaccgaucucauguucuccucauucauagaaccauuaaucagaguagcaauguagacuccuugcaauccuuccacucgguggaagucagcaaaugguucauuugcaaaauaccucaccaaggugucacugccggccccuccugggcuguaauagagcacguucuccaaggacagggagaacuucagccccucugccucugagauguauaaauuggugcgguuguuacuguggcugacacacacaaacaccugguccucggaggcaucugcgauguaauauucauuaauaggaugucuugugacaaacugggcugcucucaugggcuuccggccaaaggagacccagagcuggacagaagacugcuguucacugcccaagagaugcaccaccuuuguagcaaacauguacuugucccgaagcugaaaaucucucacuuccucaaggaucacuuccugguuuucccgggacuggaagaaaucuguacuucggaagacaguggaguagccagaggguucaugucguucaauguagaugguauuugguuugucauagggaucaauuccccaagaaaaggacuugacauguuccugaaucaugauccaggucuggccaaagucaucugacuuccacagcugcuuguuggggugggaccugucaaagcccaagagaagguuggaggccuuacuguguaggaggagaucagcugcccgaaaugggauggaaaagccuugaagaguguugcagaagucaaacgugauccagagguacugggcauaagcgucugcaaagauguaccgcuuguuguccgcagggcugugguagaacugggcgauaacagcuucacuccuauuucccaagccaaaguuuaacuugucugaaauuuucuugaaugauuuuccauagucguaagacacguacacaucacugcucuugggccucgccaaugccaggcuaucucgggccaaggccacgaucacguugcuuuucucuccagcccagugcaccaccaucugauugugggaaucauucagacuaaccuguccguacaccuugaugggcucgggcugcagggcagcgcuccguuuccuccggagcggcuucucguccgcgcggcucgccccccuggcauccccgcgcgcccacagccgcagcucgcgcgggucgcccugcaccacgaggaagccccgguccuggggcaagggcgcgcugccgccgugcagccucugcguccagacuucgcagagagcuccgggcggcagcagugcgaccagggugaauaggaacgggagucgcgacucccuccugcugcuccgugucgccauguucgggcgaacgcuacugcagguggcgccgccgccaggagagaaugugcagcgcgaggccaggagagccgcugggccgggaccgcgcgcgccgcucccggggcuccaggccgcccgcgccgcuccggg

SEQ ID NO: 2003 - RNA, 6927 nt, Homo sapiens
uuaugaggucgugccugauuuauagacaaaaugccauaaugaaaucuggaucaugaugagaagaagcguccagacuugaaguuccauugaagaauuagaggcucugcagcucuugccguccuccugcaggguuccuguuacacagcugcagagaggcccauccacccggcucgugcaaaucugcucacacccuccauuguccucacaccaguccagccuuuuucuccuaauaggucccacugaaaugaucuguucuuugggcucuuuuguguaaucuguggcaauccuggaauugugugggcaagugauuuuacaggaguacuuuucugagucgcagagugacacugcacagugaaggugaacuucgucguaauccccuaugaauuuaaagacggugacgugaaagcgacaggucagggagacugcauucuccucgaugccaaugguguuaucuuugagguucugacacccuccuucaaugaugaaauaucggagcuuaucauugcuaucucggguggguguggcauagcauuuguugaguguuaggauuaaauguguggcgucagcuccaaccacaaaaaccccuacauacagcacaucucgagucgucaacacuacuucacccuggcgguaaggauguuuguaggaggcguuuuuguagagagccaucuuggugaugaagcugccuucuuggguuggaacugucagguuaauuacacuuagcauaggcuucacaacagaauccaaggagaucuugauauccagcucauaagcacaugaaaauuccacauugaucgugcggucccuggugaugauguugccaguguuguuggcgcuuucgauccagaguguguuuuuauacaugauaugcgugccauuggacugcacaauguuuccacaauucccuuugguguuguugaucugaaaggagauaaaaucuucccccucgaugccggugcacugucugucauugauccucacgcccucccucucaaaaccgagcuggaagagcuugcacuuagauauggacacuuccauuugggcugcuuugcaggucaccucugcaucgauaaugucaugugaguuauuuccauagggggguggcucgaugcagccacacagcucccugccauugcccagcucgcaaguucgguugggacaguccgcccccacacagggaucuucaaccacuccugagcaauucuccuucucaauccacucggugcuaaggaucccgaaggagcggcaggccuccccguaggcggccagggagccgcacagcuggaacuucuuguggcuguagcagccguccagguagcaggacucguagaaugggaggggaucgagaagcccauagcagggcuggaagaagcccuucaugucggugagcuucaggcaguagccaucacccugcaucuucuggaugugcacauugucacacauggcugcauacugugagaacugcagcucguugcagcugggggcaagaggucucuucugcaugccauugguuuuccagcucugggccagcaccacgcugcuuaccaccggcuucccucgcaaggucacauaaucaucuguuagguccccguugaaguugccacagagaccgcacacuuuguucugcagccucucgcugaugcugauuuuaaugacguugaaaccauuguaguauaucuggaugucugggcuggugucaaucaccagaaaccccucacugcuguagauuuugguugccaaaccaguuauaaauggaacauucacuugugugccauucaccuugaccguguuccggucguugaugagaaucugcucuucguuaauguagaaguagacgggcgaaaugauggugagguugggggccgaccacuugucgaaguugaugauaagcuggaaggagaugucgggcaguuucuggcagaugguggacagcacgaaggcgcaguuggcugggaagcgcaggaaggcgccgucgaaggugcggaagacgccgccgccggccgccaggcaguaggaggucuuggugcugaagcagccgcgcaccccguugcgcagcgcacacuccucgucugacuugcauuggcgcgggucgcacugaaucacguugcgacggaaacagcggcagcgccgcgugcagucgcuguuccaaaauagcugcuugggcucguaauauuugccaucggaguagcagccgcagcuguggggcaggaugcagcucuugccguugaggacguagccagcgucgcagugacagcccuccacgcaguaguggcugcagucacucuucaggcggauggcggcgcagcggggcuggcagacacucacgcagcucucguaauggcuguuuggagggcaggugacagugcaggacguguaauuccuccagccagucaccguaauccccugagucuggcaggugcuggcguaguucugcagccagcugcaggcggucugcaccgcgcccccaucgaugcaagagucaaacaggcaguucuuauagaagaaggugggguuaacuuugcugugacacuuggagaaggcagcguucugguuggggaucaggcugcacagcugcugcacuuuggagaaaccuuccaccuuggcacaggacggacagcgguccccacagcccaccuggcagaaggugucccucuucacccagcucugcccaaacucauugacacucgaugcaagcagacccaugggcaucuccaggucaucaucaggguugccguuguagcggccacacagaccauaggugcuguucugcaugcuccgagggacugugauggacaggaaggucuuccagucauauacaaccuucaggccaaaaucaguuuccaccaccacguggaagccaaaggaaaagauauuuaucuucccuugccccagcuucaggggcagauagagccguucacuguugaccagcacagugugcuuguaagcucgguggaucacgaugcuguagccaaacacggucacguccaccugcuuaacccacaaggccagugacgggucccgguccucauucuuggcugugacaacaaacuuggggaaagagucugagcuuggccugcuuccuguggugcacaggaugagugggcagcuggucuggaagucaaaggggaagccaucaaaggugagguaguggccguagccugagacgaugcaggaggcgucggugcgggcuuggcaguaguacaggccaccuuccuccaugcaguacucaucauccuugcagggaauggucucgcaguggacccuguugucugugccacugcaauagcagaagaucuggcaguccagguccacccagaaggucucauugguggcaaguuggugccccucaaaguugcagccacacucacuccgcgugacacacuggcugcccaguagagcauagcccucaucacacugacaucccucagagcagcuauccacgcagauggggcccaggguaagggucucacaggucucuguacaugugaugcacuccucaaaguggcuguucucugggcacuccagugggcagaagucauagguccgccagggccccaccuccacguccgcauucuugcaggcgcuugcauaccgggccacagagucacagagcucugacucauugcccccacucuggcacaggcggaaaaggcaggugcgguaauaggcagugacguucaccaccccauggcacuccaggaaggagcuguuggaggggucguugaugaugccgcaccuggagcggcuucgauaaaacuugagcagcuccgagucauuguugcaggccuucagcagguccccacacucuccauugcagaucuccucgaaaguuguccagcuuuccaggaacacugccagguuguccgugcacuugccguuggggagacagaacucgucacuggcguuggcauuguagaagccgcacaagcccccugugcaauugaaguaugugguggacagccggauguacaauagaccuaugucugaguacuggacagucaccacgcccuuggacuccacugucguacuguuuuuguuucgauaaauuuccagcuuccccgaaggauggaaaaaaggcaauuccacuuccugaccauucaacuugacuuccgaagccccgaugccuccuaucuugaccuccuggucggccaccaggauccgaaguccccgcagccaagcagguccugcaucgggcuucuucuuguugaugucgauuuccaaguacucugggcgcucagggcaggucuucaggaggguguaggagaacucggaggggaaggcguaggaggcgccgucaaaggugugcagcaccugguucuggcugagcaggcacacggucucccgcuuggggaagcagcccugguagccguccuccacggcgcacaccuccccgcugccgcaggucuuguugaagcaguagacguccccgcccuccucgcacaggcauugcacagugcaguuggccguggcccagaagaacucccccaugguguaguaguggccgucgaagucgcagccgcacuugugcagagggacgcacuggcuggugcugaggacgaagcccugguugcacucgcagcccucugugcacggcguggcgcaguuccgcgaggccgucaggucggagcaugugucggggcagcugcuugugcacacggaguaguggcugaagcucgggcacugcacuguggacacacacccagucuggguucgccagucuccaauuggaaugccaagggcuuggcacacaagagcauaggccuggauggcuuggcagaggagcgugccauugucccucacacugcacaggucauacacgcagcugugcacaaaagcagugggguccacgacagugccacacucccacagagggccgucugucuuguugaggaagccgcaguagucagagccaaaguagagggcuucaguggcagcgucgcacugggugcaguugucgacgcagccggagucgcacuuccagucugcgugguacacacgccagcucucucccagauccaggacagacauggccggccugccauccgggcggaggaagucauccaguggguuuuuauuauaguuuccacagaguccacagguggaguuuauauaggagccugggacggaaauggaggcguagugcuggccaucaaaagucacuaagagcccaaaaucuguuuccacggcaguagauaugccacucugguagauuuucacuguccccaagucuaaggugacaggcaaagaagucacuaggucauuaaccuugacucuuccauagcuuccuuuggggaugagaaucuuguagccauucaccuccacugagagcuccuucacccaggagacggcugaaccucugcgguguucauucuuggccuccacacugaagaaagggaggcuggaagucugcaaacacugucgggccagcaaguaggcacaggagccuuggaaguggaagaggaagccgucaaaagugugguaguguggcuccccaaacaccacgcaugugcuggucuccacagcgcugcaguagaagaauuugccuuuggguucgcacaccucguaggggcuacaggaagccuccuggcaguagaucucauuguugaaauccagacagcggcacuugacggugcaguucaagucaucccaaaacaccuccccucgccgaaggaauuguccccuugaggugcagccauuggcugggucaauuuccuuuccaucaacuuuaaaugcccagcggccuggaacauugacguuuguggucuccuggauauucacgaucucggggguucuugaccccgggaggcugaagaaauuggugagguuuccaccauuaaauccugccugugccaucacuccaccaagaccugucagggggucgccgccacucgccguccccgugguccaguugauuucguaauaauugaagagggugaauguauaggagccaucggacacuaggacggccuggaagguguucacagguguggugcugcugccuccauaaaacgugacuuccucccaugucacaaugaaaacccaaguggcagagaagguugccaugucuuugaaguacuuccugauguccuugguggcucuuuucaagauggcaggcuccauggucucucuguaauagaucucgccucgaauuccauugugcacaucugcccaaaauggggcgacgaaggcucucccaucugucaggggaaaggauucuggcgugaacuggcucacuagcacauugaaggaaacaacuccguuguuauugacccgcuuguuguccgcagggcugugguagaacugggcgauaacagcuucacuccuauuucccaagccaaaguuuaacuugucugaaauuuucuugaaugauuuuccauagucguaagacacguacacaucacugcucuugggccucgccaaugccaggcuaucucgggccaaggccacgaucacguugcuuuucucuccagcccagugcaccaccaucugauugugggaaucauucagacuaaccuguccguacaccuugaugggcucgggcugcagggcagcgcuccguuuccuccggagcggcuucucguccgcgcggcucgccccccuggcauccccgcgcgcccacagccgcagcucgcgcgggucgcccugcaccacgaggaagccccgguccuggggcaagggcgcgcugccgccgugcagccucugcguccagacuucgcagagagcuccgggcggcagcagugcgaccagggugaauaggaacgggagucgcgacucccuccugcugcuccgugucgccauguucgggcgaacgcuacugcagguggcgccgccgccaggagagaaugugcagcgcgaggccaggagagccgcugggccgggaccgcgcgcgccgcucccggggcuccaggccgcccgcgccgcuccggg

SEQ ID NO: 2004 - RNA, 6639 nt, Homo sapiens
uuaugaggucgugccugauuuauagacaaaaugccauaaugaaaucuggaucaugaugagaagaagcguccagacuugaaguuccauugaagaauuagaggcucugcagcucuugccguccuccugcaggguuccuguuacacagcugcagagaggcccauccacccggcucgugcaaaucugcucacacccuccauuguccucacaccaguccagccuuuuucuccuaauaggucccacugaaaugaucuguucuuugggcucuuuuguguaaucuguggcaauccuggaauugugugggcaagugauuuuacaggaguacuuuucugagucgcagagugacacugcacagugaaggugaacuucgucguaauccccuaugaauuuaaagacggugacgugaaagcgacaggucagggagacugcauucuccucgaugccaaugguguuaucuuugagguucugacacccuccuucaaugaugaaauaucggagcuuaucauugcuaucucggguggguguggcauagcauuuguugaguguuaggauuaaauguguggcgucagcuccaaccacaaaaaccccuacauacagcacaucucgagucgucaacacuacuucacccuggcgguaaggauguuuguaggaggcguuuuuguagagagccaucuuggugaugaagcugccuucuuggguuggaacugucagguuaauuacacuuagcauaggcuucacaacagaauccaaggagaucuugauauccagcucauaagcacaugaaaauuccacauugaucgugcggucccuggugaugauguugccaguguuguuggcgcuuucgauccagaguguguuuuuauacaugauaugcgugccauuggacugcacaauguuuccacaauucccuuugguguuguugaucugaaaggagauaaaaucuucccccucgaugccggugcacugucugucauugauccucacgcccucccucucaaaaccgagcuggaagagcuugcacuuagauauggacacuuccauuugggcugcuuugcaggucaccucugcaucgauaaugucaugugaguuauuuccauagggggguggcucgaugcagccacacagcucccugccauugcccagcucgcaaguucgguugggacaguccgcccccacacagggaucuucaaccacuccugagcaauucuccuucucaauccacucggugcuaaggaucccgaaggagcggcaggccuccccguaggcggccagggagccgcacagcuggaacuucuuguggcuguagcagccguccagguagcaggacucguagaaugggaggggaucgagaagcccauagcagggcuggaagaagcccuucaugucggugagcuucaggcaguagccaucacccugcaucuucuggaugugcacauugucacacauggcugcauacugugagaacugcagcucguugcagcugggggcaagaggucucuucugcaugccauugguuuuccagcucugggccagcaccacgcugcuuaccaccggcuucccucgcaaggucacauaaucaucuguuagguccccguugaaguugccacagagaccgcacacuuuguucugcagccucucgcugaugcugauuuuaaugacguugaaaccauuguaguauaucuggaugucugggcuggugucaaucaccagaaaccccucacugcuguagauuuugguugccaaaccaguuauaaauggaacauucacuugugugccauucaccuugaccguguuccggucguugaugagaaucugcucuucguuaauguagaaguagacgggcgaaaugauggugagguugggggccgaccacuugucgaaguugaugauaagcuggaaggagaugucgggcaguuucuggcagaugguggacagcacgaaggcgcaguuggcugggaagcgcaggaaggcgccgucgaaggugcggaagacgccgccgccggccgccaggcaguaggaggucuuggugcugaagcagccgcgcaccccguugcgcagcgcacacuccucgucugacuugcauuggcgcgggucgcacugaaucacguugcgacggaaacagcggcagcgccgcgugcagucgcuguuccaaaauagcugcuugggcucguaauauuugccaucggaguagcagccgcagcuguggggcaggaugcagcucuugccguugaggacguagccagcgucgcagugacagcccuccacgcaguaguggcugcagucacucuucaggcggauggcggcgcagcggggcuggcagacacucacgcagcucucguaauggcuguuuggagggcaggugacagugcaggacguguaauuccuccagccagucaccguaauccccugagucuggcaggugcuggcguaguucugcagccagcugcaggcggucugcaccgcgcccccaucgaugcaagagucaaacaggcaguucuuauagaagaaggugggguuaacuuugcugugacacuuggagaaggcagcguucugguuggggaucaggcugcacagcugcugcacuuuggagaaaccuuccaccuuggcacaggacggacagcgguccccacagcccaccuggcagaaggugucccucuucacccagcucugcccaaacucauugacacucgaugcaagcagacccaugggcaucuccaggucaucaucaggguugccguuguagcggccacacagaccauaggugcuguucugcaugcuccgagggacugugauggacaggaaggucuuccagucauauacaaccuucaggccaaaaucaguuuccaccaccacguggaagccaaaggaaaagauauuuaucuucccuugccccagcuucaggggcagauagagccguucacuguugaccagcacagugugcuuguaagcucgguggaucacgaugcuguagccaaacacggucacguccaccugcuuaacccacaaggccagugacgggucccgguccucauucuuggcugugacaacaaacuuggggaaagagucugagcuuggccugcuuccuguggugcacaggaugagugggcagcuggucuggaagucaaaggggaagccaucaaaggugagguaguggccguagccugagacgaugcaggaggcgucggugcgggcuuggcaguaguacaggccaccuuccuccaugcaguacucaucauccuugcagggaauggucucgcaguggacccuguugucugugccacugcaauagcagaagaucuggcaguccagguccacccagaaggucucauugguggcaaguuggugccccucaaaguugcagccacacucacuccgcgugacacacuggcugcccaguagagcauagcccucaucacacugacaucccucagagcagcuauccacgcagauggggcccaggguaagggucucacaggucucuguacaugugaugcacuccucaaaguggcuguucucugggcacuccagugggcagaagucauagguccgccagggccccaccuccacguccgcauucuugcaggcgcuugcauaccgggccacagagucacagagcucugacucauugcccccacucuggcacaggcggaaaaggcaggugcgguaauaggcagugacguucaccaccccauggcacuccaggaaggagcuguuggaggggucguugaugaugccgcaccuggagcggcuucgauaaaacuugagcagcuccgagucauuguugcaggccuucagcagguccccacacucuccauugcagaucuccucgaaaguuguccagcuuuccaggaacacugccagguuguccgugcacuugccguuggggagacagaacucgucacuggcguuggcauuguagaagccgcacaagcccccugugcaauugaaguaugugguggacagccggauguacaauagaccuaugucugaguacuggacagucaccacgcccuuggacuccacugucguacuguuuuuguuucgauaaauuuccagcuuccccgaaggauggaaaaaaggcaauuccacuuccugaccauucaacuugacuuccgaagccccgaugccuccuaucuugaccuccuggucggccaccaggauccgaaguccccgcagccaagcagguccugcaucgggcuucuucuuguugaugucgauuuccaaguacucugggcgcucagggcaggucuucaggaggguguaggagaacucggaggggaaggcguaggaggcgccgucaaaggugugcagcaccugguucuggcugagcaggcacacggucucccgcuuggggaagcagcccugguagccguccuccacggcgcacaccuccccgcugccgcaggucuuguugaagcaguagacguccccgcccuccucgcacaggcauugcacagugcaguuggccguggcccagaagaacucccccaugguguaguaguggccgucgaagucgcagccgcacuugugcagagggacgcacuggcuggugcugaggacgaagcccugguugcacucgcagcccucugugcacggcguggcgcaguuccgcgaggccgucaggucggagcaugugucggggcagcugcuugugcacacggaguaguggcugaagcucgggcacugcacuguggacacacacccagucuggguucgccagucuccaauuggaaugccaagggcuuggcacacaagagcauaggccuggauggcuuggcagaggagcgugccauugucccucacacugcacaggucauacacgcagcugugcacaaaagcagugggguccacgacagugccacacucccacagagggccgucugucuuguugaggaagccgcaguagucagagccaaaguagagggcuucaguggcagcgucgcacugggugcaguugucgacgcagccggagucgcacuuccagucugcgugguacacacgccagcucucucccagauccaggacagacauggccggccugccauccgggcggaggaagucauccaguggguuuuuauuauaguuuccacagaguccacagguggaguuuauauaggagccugggacggaaauggaggcguagugcuggccaucaaaagucacuaagagcccaaaaucuguuuccacggcaguagauaugccacucugguagauuuucacuguccccaagucuaaggugacaggcaaagaagucacuaggucauuaaccuugacucuuccauagcuuccuuuggggaugagaaucuuguagccauucaccuccacugagagcuccuucacccaggagacggcugaaccucugcgguguucauucuuggccuccacacugaagaaagggaggcuggaagucugcaaacacugucgggccagcaaguaggcacaggagccuuggaaguggaagaggaagccgucaaaagugugguaguguggcuccccaaacaccacgcaugugcuggucuccacagcgcugcaguagaagaauuugccuuuggguucgcacaccucguaggggcuacaggaagccuccuggcaguagaucucauuguugaaauccagacagcggcacuugacggugcaguucaagucaucccaaaacaccuccccucgccgaaggaauuguccccuugaggugcagccauuggcugggucaauuuccuuuccaucaacuuuaaaugcccagcggccuggaacauugacguuuguggucuccuggauauucacgaucucggggguucuugaccccgggaggcugaagaaauuggugagguuuccaccauuaaauccugccugugccaucacuccaccaagaccugucagggggucgccgccacucgccguccccgugguccaguugauuucguaauaauugaagagggugaauguauaggagccaucggacacuaggacggccuggaagguguucacccgcuuguuguccgcagggcugugguagaacugggcgauaacagcuucacuccuauuucccaagccaaaguuuaacuugucugaaauuuucuugaaugauuuuccauagucguaagacacguacacaucacugcucuugggccucgccaaugccaggcuaucucgggccaaggccacgaucacguugcuuuucucuccagcccagugcaccaccaucugauugugggaaucauucagacuaaccuguccguacaccuugaugggcucgggcugcagggcagcgcuccguuuccuccggagcggcuucucguccgcgcggcucgccccccuggcauccccgcgcgcccacagccgcagcucgcgcgggucgcccugcaccacgaggaagccccgguccuggggcaagggcgcgcugccgccgugcagccucugcguccagacuucgcagagagcuccgggcggcagcagugcgaccagggugaauaggaacgggagucgcgacucccuccugcugcuccgugucgccauguucgggcgaacgcuacugcagguggcgccgccgccaggagagaaugugcagcgcgaggccaggagagccgcugggccgggaccgcgcgcgccgcucccggggcuccaggccgcccgcgccgcuccggg

SEQ ID NO: 2005 - RNA, 1809 nt, Homo sapiens
uuaugaggucgugccugauuuauagacaaaaugccauaaugaaaucuggaucaugaugagaagaagcguccagacuugaaguuccauugaagaauuagaggcucugcagcucuugccguccuccugcaggguuccuguuacacagcugcagagaggcccauccacccggcucgugcaaaucugcucacacccuccauuguccucacaccaguccagccuuuuucuccuaauaggucccacugaaaugaucuguucuuugggcucuuuuguguaaucuguggcaauccuggaauugugugggcaagugauuuuacaggaguacuuuucugagucgcagagugacacugcacagugaaggugaacuucgucguaauccccuaugaauuuaaagacggugacgugaaagcgacaggucagggagacugcauucuccucgaugccaaugguguuaucuuugagguucugacaccucaccaaggugucacugccggccccuccugggcuguaauagagcacguucuccaaggacagggagaacuucagccccucugccucugagauguauaaauuggugcgguuguuacuguggcugacacacacaaacaccugguccucggaggcaucugcgauguaauauucauuaauaggaugucuugugacaaacugggcugcucucaugggcuuccggccaaaggagacccagagcuggacagaagacugcuguucacugcccaagagaugcaccaccuuuguagcaaacauguacuugucccgaagcugaaaaucucucacuuccucaaggaucacuuccugguuuucccgggacuggaagaaaucuguacuucggaagacaguggaguagccagaggguucaugucguucaauguagaugguauuugguuugucauagggaucaauuccccaagaaaaggacuugacauguuccugaaucaugauccaggucuggccaaagucaucugacuuccacagcugcuuguuggggugggaccugucaaagcccaagagaagguuggaggccuuacuguguaggaggagaucagcugcccgaaaugggauggaaaagccuugaagaguguugcagaagucaaacgugauccagagguacugggcauaagcgucugcaaagauguaccgcuuguuguccgcagggcugugguagaacugggcgauaacagcuucacuccuauuucccaagccaaaguuuaacuugucugaaauuuucuugaaugauuuuccauagucguaagacacguacacaucacugcucuugggccucgccaaugccaggcuaucucgggccaaggccacgaucacguugcuuuucucuccagcccagugcaccaccaucugauugugggaaucauucagacuaaccuguccguacaccuugaugggcucgggcugcagggcagcgcuccguuuccuccggagcggcuucucguccgcgcggcucgccccccuggcauccccgcgcgcccacagccgcagcucgcgcgggucgcccugcaccacgaggaagccccgguccuggggcaagggcgcgcugccgccgugcagccucugcguccagacuucgcagagagcuccgggcggcagcagugcgaccagggugaauaggaacgggagucgcgacucccuccugcugcuccgugucgccauguucgggcgaacgcuacugcagguggcgccgccgccaggagagaaugugcagcgcgaggccaggagagccgcugggccgggaccgcgcgcgccgcucccggggcuccaggccgcccgcgccgcuccggg

SEQ ID NO: 2006 - RNA, 7382 nt, Homo sapiens
aaacaaguuuuauuuugagaacauuuuaaaauacagaaaaaguacacagggucauaccauacccagcugcucagaauugacaauuguucauuaccauuucuuuuuuuuaaguugaaacagggucucauuauguugcccaggcuggucuugaacuccugggcucaagcaaucugccugucucggccuccaaaagugcugggaguacaggcuugagccaccgcaccuggccuauuuuaucauucuuuuccaacccuuuucuaccuuggcuucuccacaggcuccagggaggucuagcuuggcuggucaaaacggaggugacauugacagaaagugagugauuaaagguugggugucagagucggacagaucuggguuuuuuuuggagacagagucuuacucugucgcucaggcuggaaugcaguggcacgaucuaggcucacugcaaccaccaccuccuggguucaagugauucuccugccucagccaccugaguagcugggauuacgggugugugccaccacgcccagcuaauuuuuguauuuuugguagagacgggguuuugccauuguuggccaggcuugaacuccuggccacaggagaucugcuggccucagucucccaaagggcugggauuauaggugugagccaccuugcccagugacagaucuggguuugagucccgaaaacucuuuguggucacggacaaaucacuuaaccucaagccucaguuucaucuucugugaaaugggaauaauacaucuuccgugaggacucaguaugaugauguaugucaagcacaaugccagugccuggcauauaccccuugcucacugaagaguagccaauaugaauauuugcagcuaugggccugggacccacccaaaagcaugggcaacacccuccugugaccgaaagggagggacugugagaaugaccccuccucagccuucauuucuccucauuucccacccguccucaauucuggguacaucugucuccaguuuauacucugaagacagcagggcugugaguuacagguugcccagggcauuuuuguggaggcagagaguuuagagcugaugacagccugggagagcucuggggaggcuuccaaaccaaaguggauggaggggaacuggggaggagggaucugagugagguuagucccggcuaaccucacucaguucuaacuacccugggcugguccuggggcuucucacagccucaguagcaccccccguccccuuauucacuggucucggauacucuagaccuguggccuggcuugcuaggacaggggcuuucaggcuuugccagacucagccucucuagacuugggccuacaagccucacacccaccggguguuggcaugcacgucuguuuggaggaggaccgacagcugggaaguggcagaggcugggcuggaagggugagaggguugguggucuccagggaagcgggaaguaaacucgugcccuucuguacuuugcccggugcccuggaccauggaggguuucguuggggugugaauaacagaaaccuaagugagcagggccuaaaugaaacaguguauccaucucucacuuagccccacguccagagguggguguagguuggucugaagucaggguugaggacucguccguucuccagguuuuucucucauggucgcaagauguuggcuucagcugcugccgucacauuugugcagaggcaggaggaaggaagaaguuccagagaguugaguuuccacacagcaacucccaauuucauuuccuuggccagacugugacacggccaccccuagcucuagucuuccaaggugguugagucuuucugaauggguugccuuugcauuggaaucuggcccagggaugaugccacuguuuuuggugacugguucuuguguuugaagccgcugacaugagcuugguacuguucuauggaguucagcacuaucuuacauguuuugcagggguagcccuuuccagcuggaaagucagugacagcaggguccgccagccgcccauagcgugccauuaguuugagcuuggucuccuguuuucuguguuucuugcccacauaauguuguugagccaugacagggucguugaaaguugcauggcagaggcugcagaacuugucugggucuaucaucucucuauucuggugcaaggcuuccaccuuaguggacugcugcuucagcuuuaaguucuuugcgugggucuuccccagguagugcgacugggccacgacaggggaggaaaaggucauguuacagauggggcagcacugguucuugucuuugcuucugcugcucuucugaucugagucuagcuucuucguuucccccuuuaaugucuccauuccauggauugcuagguaucucuucacuuuguuggcauguuuuuugcucugguaaugugccagcuucugggacucagaaauaagcaaggcgcagcaaaccuuacacuggguguuggugaagagacauugguucuucuggaucaugugcuccacuuuuuuauaugucccauccacuccuuugcccaucuuauccuugcugcucacgucacccuccauguaagggaagacucgggccuggugaguccacaaauagucauuagauccaaaaaagaggacugggaacucucccacaucaugucucaucuuaucaauguuggaaggaacagcucgaggauggcagaucucagcuggccaccaccuguaucguccaacuuuuacccagacaaucucccuguaguguggcuuuuugccugcuuuacagucauugcaauaccaguuuccuucagggauaucaauguucaggcauucacgaugaaaagcagcagggcaagaaucacagcacagaaggcugccuccuucugagcacacaaagcaccagcuaacauuaacaugcucaugauuucggcagccccgccuagggguaaagugauuagggcagaugauacuauuagaugcaaggaucuuugacccagcagccaggcaaaagucauuggcgugguaugccacaggacagcggacacagcgcaucaaccgaccuuuagaugcagaaacauuggcuggauuagcagcaugacagguuauacagauguggagggagcaccggaagcccuuguucugcauaacaguggguggguacuucuggacacacucuucaugguaaaacuuuccacacaaggguagaaggcaccuuuuaacaucuuccccacucugcuuacauacaaaacagguauggauuccugugcgacauucauugcagauaaauuuuccucuuggcaucucagucaauccaaggcacuccagguggaaagccccacagcacugagccucacauaacagcagcucacccaauuuuucacaauucugacagacauucuccuugagugcagcuccuccaccgcguucacccugcauuuuuuuagaggcaggcaucccgggaucguguucuacaccuuccucaacagucuccuuggggcuuguggccguccugugaggcauuaguucucccucugagccuggaaucucuuuugacgagucaucauuuuucacuuuuuuacacugcaucuuggcugcagcaugccucugucguuuucgcuuccuuggcuugucaaauaucuugguagugccuccaccaaaaucuuuugaauaagauguggcacaagauucaguuaugccauucuccaggugaccagcuucauagcacuuuuuagaaaggccaaggucccccuucuugggcauaaauccagggucuaaaucauuggauucaagaaguuucuuaguugguuuucuuugacguuuacuuucauaauuuccuggcguuuuaacuagcaauuccucagacucaagggcaggccguggagagacuuccggagccacaggcacagacaaggucagcugcggcaacucagcauguccaccuccaaguucugacugagccaaggggcccuccaaaaacggagccucccuuucaagaacuggaggcucuucuuugguugaaaucaaagaauucucguccaccugcuuguucugagcacuagaucgaccucgggcuagaaggcuuuccucuucacagcgggaacuuaccuugugcaccugcuccuguaccuucuuuuguuuuuucuuaggagcaaauaucugaucauauucuucuguauauuccaaaagccacuugcuuggcuuccuaaggcguuucuucucugaccgcacagcugguucagggagcucagccuguggugucaaacugggaauuccuggcuccuuuuccaugucaccaaugcuggcacuggauuuaucacaaacauuuaaccguggcccagcugaaucuaagcagucagcaugauuuugcucugucagugguuccucaaguaugcuugcugaaggaguucuaugcucuggaaacucaucccgccccuccugcacagggucacuaggaaguaagacccuaaaggcacacucagaguuuucuuucucuuuaaaucuguucaugcgcuuacgagguuuagugcgccuuugguuuaaacgcugccaccgcuuuuuaggcaccacuugauuuacaccauugaguucaucauucucacuguucauuacagaguccagcucugggccuuuuccguuuucaaaagagaguccuuuuucagaaauuuuaccaggaucagauugcuuaaccuugcuaucgaaaugcacaucagaaaaauggucaccaucuucacuuguuaaguggcccauuaucugaaggggauccucuuuacuaggaucuucugccccaccucucaaugaaccuccacguucucggucucccugcaguacagcaucaagagucacacuuggaagcugauucaguuuucuuuugcgcucggucuuuaaggcuuuacgguucacuguguucuuuaccauuugggcugaaaaagcaucucgcaauuuggaugaaggcuuugaucguccacaguugcgccuaguaacacagucugaacgacuuuuaccagaagcagggaggucucucuugucggacaguaagccagguagggaagcagacaacucgccagauaaugcagagucacccccacuagggcuaggauuggcggaguucugagugccaucucccuuuuucucugaauuguguguggagccuccugaaaccaaaaccuuagagacuccuacaggacuauuaguagaacaguccccacgaccaggacuccgguaagagaccagguuuugagcagucaucaaccgcugcuccuucgucuuacuaucaugcauaucuuucaacaucauuagcaauguacugaauuuguagucugguucaauagguaugugauucugacuagaagcagaagagaaaaguaaugguuuugauggcuuugauguuccagagucacugacauccucaccuaaggaucuguaagagaguuccuucaacucggauaaaacauguuucaccacugcuguuucuaugucacuugaaucccugguuuucucaugcauauuguucaguaguuuuagaccauccacuuucccacuuuuagaaaugcuggccaaaggagagccuuugguaucagaagagcagcauuucaaacugcacuccucauuuauaacuggggguucugccauaacuggauuuucuuuguguuugcacuuuauacuucggaacuugggcuguuugcuuuucgaauguaauagagcuugauuugcugccccacccuuuauuaacgaguucucacuggauaugcuugaugacagguugaauuuuggagagagagcaucauuuguaaaaucugacugggguuugugaacaagaguagaugccuucagaucagagagauuaaccugagacgucucgguuccaggcucugcacucuuaguacaacccauuaaguggucuguaugugaguuacuaaugagaggcuucuguuuugcuuuuacccuaguguuuguggcagcaaaccuagaauacuuuaucuuuucauuuuucugcauagauaacauguucucuguucuaucgaaagcaucuggaauuucaaggacacuguuaucagacucugagcuguguucuaugggauccaggucacugcuuccaucaucagaagugguacagauacuaauggaaucacuucgcuuuuccucaucaccugcuccaauauagcagagcuucacuuuugaaccacacaccaggcuucguugggguuuauucuucucucgagaacacuuugagaucaaagcacccucaggcaagcccaauaaagagucaccauuugaagucucaaauucuuucuuugcaguguuuuuuccacaggaagaaaacagaaaacuuccuggggcaguguuggacccugugaggcuauuugcuauccuggaaaguucauuagaggccugcguaucagauauauccccagagauaaaguuuaggccaagguucucuggaaucuuuccccuccguucaucuuuaugugcuucaaauuguauguggcccuuuuucacacuaguccuuuuuggauuaucagagcucuuucuggcucgagauuuagcgcaaggcuuuuccuucucaucugcagaauguucagaaucaaaagccagugauuucaaacagccauuaagcaacaggucauguucugacucaggaucauuugugcagucuucaaauggcauaucuucuucacuguccaacuugauugaaccaggaauacauuuucgguucuuugaccccuugggaacaucauacuguucugcaaguccaacacuggcuucccauuuacucaaaauuuucugaggaaccuuaugccuauauccuuuuucuuucuguuucccucuucuccuaaggacagguagcucuucgaauugaugucugccuucaaacaugacgauugcuuuuccagccacccaggcucucucagaaggaucuccaaaagccuccacguaguacugccgauagggccuccgguuggaaacuuucauuuuugaauguguguuaaucaacggaucagaacaaauccugcagggccaccaugggcgucucuugaauuuugcccagaugagaucuccaacuucauacuucaguggcguagacuuuuucuuagguugacaaaauggcaauuccugugaaguagaugaugaugaaguuccagguaauucuagcauguuuccuaauguacugguacuggaaucuggaucauccgaaagggcuguccuugucuucaggggcaucuaaauucacuggauuggaaaagggcagcagacaauuucuucuggguaguucacaggucugauccauccugggccggcaucaaccugggggcuugggcuggggucuucgaggccucaggccccgagcagacgcggccgcaggcgaacccccuacccggcc

SEQ ID NO: 2007 - RNA, 3454 nt, Homo sapiens
uuagauagagucuuguuauguugcccuggcuggagugcagugguuauucacaggcaugaucacagcauacuucaggcuggaacuccugggcuugaauggucuuucugccuuagccuccugagcagcugggacuauaggugcaugacgccgcaccuggccauaacacuccuucucagcucauuuuugagucaugaaaaaugcucuuucaagaaucaccaggccuaugauaagucccauggaacaaaccuaucacuguguaagagcugagcaggagaaaaccaucucuccucauacaccucauuuguucauucaauaaaaauucaugacacaccacuauggacaucaggaaguagagaugaauaaggcugggucucugcccuaagugauuagccuggaaagccauacuggacacaguguccauacuggccuccuugucuccuuuccugccccucccugcacuccuuuacauaacagccagaacaguucucucaaacauaaagcagauccccagcuuaaacccuuuaaagaccuucaugaggcccuaugugacaggagaagcaggagaaggugguggaugagaagaugaggcuguacugaguucagggcaccugaacucaagggagacuuucacagggugcucgacucugucccaacuccuaaagugacuacuggggacuacugaggucugaauggggugggggugaggggucaagacagacauacuagauccaauggcaauauggcucaaaacccuaggucuguuaaguuguagucuggcccaugagggaaauucuuuauuuggaugcuucagugaccaagagacagagcauuaggcacacacagaagcacacacauacacacaaacacacacacacacacacacacauccacacacaauaugcaaagcaaaggcauuucacaggugaagggauagggagugggggaaggaggccacgagagcagcuaggggcuucuuugacacaaugaagagaagccucugauggugacacuccuuggaauucucgucucaagguuacaaggaaaaaucuauccguguggacucagucccaggccauaaaacacagcaaagauagagaaaucuggguguggggccugggaaacgccuguuccucacuguagaaaccugcaucagcucucucuuucuuucccugggacccagaaaucacccgguggaugauggggaaggcuagcaccacagcaaacugggcaagugguccgcugcacaagggggaagagagggcuaguagggccgaggguagcaaugaaccucacagcuagcgggcaugaggcagucugccuuuaggggcagaacccucagggagacuugcauguggggcacuuucccguguaaccuagggucagagcaccucugauggaggaggggaaaggucccauccccauuggaguguccuaugaucucaguggacauggaggccgcccccagccccagcucguugccaacugcugcagauccuuagcaccauucaggaacuguggagggggcagcggggguagcaaugcuccgccaagauugugucacugcuccaggaggauacuucacaguuggcagaaaccugcgcaacuggccauaucuggucuaagacucaggaaagccugcaccuucugggggaaggcagagugucguauuagcuccaagcucccauguugcagccauuuccucuguuuccugcccugccccagguuuggcaugaaaguuccagguuuugcuggaaaugucuagggcccagagagaucucugcucuuuaguugcaagaacuggcccaaaacugaccuuuagaggaaagacagguggcaggggccucagcaccuaaggcccagagggguugggaaauggggaaagccacccuccaaacuaccaccccgcgagaccccgagucucucaauacccuugccuccccugucaugaccuacaggaccccugccaaaggggagcagcaggagugaauuagcccggaccaaugagaggcugucuguggcccaauccugccucaggcccguguacuuuccuggugagaacaacgagcaagagggagccaagggcugagcagucacgggaagcuggcucauggcuggcccaauaugggaugcugggcagaaucaccucuagucuuccaaggugguugagucuuucugaauggguugccuuugcauuggaaucuggcccagggaugaugccacuguuuuuggugacugguucuuguguuugaagccgcugacaugagcuugguacuguucuauggaguucagcacuaucuuacauguuuugcagggguagcccuuuccagcuggaaagucagugacagcaggguccgccagccgcccauagcgugccauuaguuugagcuuggucuccuguuuucuguguuucuugcccacauaauguuguugagccaugacagggucguugaaaguugcauggcagaggcugcagaacuugucugggucuaucaucucucuauucuggugcaaggcuuccaccuuaguggacugcugcuucagcuuuaaguucuuugcgugggucuuccccagguagugcgacugggccacgacaggggaggaaaaggucauguuacagauggggcagcacugguucuugucuuugcuucugcugcucugguaaugugccagcuucugggacucagaaauaagcaaggcgcagcaaaccuuacacuggguguuggugaagagacauugguucuucuggaucaugugcuccacuuucauuuuugaauguguguuaaucaacggaucagaacaaauccugcagggccaccaugggcgucucuugaauuuugcccagaugagaucuccaacuucauacuucaguggcguagacuuuuucuuagguugacacccucacaaccuuacaagacagcauuaucucgauuuugcagauaaagaaacugaggcucaaaaagguuaagucacaggcugggugcgguggcucaugccuguaaucccagcacuuugggaggccaaggugggagaaucacuggaggucaggaguucaagaccagccuggcaaacauggugaaaccccaucucuacuaaaaauacaaagauuagccgagcaugguggugugugccuguaaucccagcuacuugggagguugaggcagaagaaucgcuugaaccugggaggcggagguugcagugagccaagaucuuaccacugcauuccagccugggcaacggagugagauuccagaaauggcaauuccugugaaguagaugaugaugaaguuccagguaauucuagcauguuuccuaauguacugguacuggaaucuggaucauccgaaagggcuguccuugucuucaggggcaucuaaauucacuggauuggaaaagggcagcagacaauuucuucuggguaguucacaggucugauccauccugggccggcaucaac

(The sequence listing continues in the following parts.)

1. An fusion transcript encoded by a nucleic acid molecule comprising a general structure A-B, wherein structure A is a portion of a gene listed in Column A of Table 1 and structure B is a portion of a gene listed in Column B of Table 1, wherein the gene listed in Column A and the gene listed in Column B are listed in the same row of Table 1, wherein structure B is located immediately 3′ to structure A.

2. The fusion transcript of claim 1, comprising a nucleotide sequence which is the reverse complement RNA of any one of SEQ ID NOs: 1 to 799 or the reverse complement of any one of SEQ ID NOs: 1001 to 1799.

3. The fusion transcript of claim 2, comprising a nucleotide sequence of any one of SEQ ID NOs: 2001 to 2799.

4. The fusion transcript of claim 1, comprising a nucleotide sequence which is the reverse complement RNA of any one of SEQ ID NOs: 800-844 or the reverse complement of any one of SEQ ID NOs: 1800 to 1844.

5. The fusion transcript of claim 4, comprising a nucleotide sequence of any one of SEQ ID NOs: 2800-2844.

6. The fusion transcript of claim 1, wherein the gene listed in Column A and the gene listed in Column B are listed in the same row of Table 1 and the row is marked with an asterisk in the 2^{nd} column from the left of Table 1.

7. The fusion transcript of claim 1, wherein the gene listed in Column A and the gene listed in Column B are listed in the same row of Table 1 and the row is not marked with “#” in the 3^{rd} column from the left of Table 1.

8. The fusion transcript of claim 1, wherein the gene listed in Column A and the gene listed in Column B are listed in the same row of Table 1 and the row is not marked with “̂” in the 4^{th} column from the left of Table 1.

9. The fusion transcript of claim 1, wherein structure A is a portion of a gene listed in Column A of Table 2 and structure B is a portion of a gene listed in Column B of Table 2, wherein the gene listed in Column A and the gene listed in Column B are listed in the same row of Table 2, wherein structure B is located immediately 3′ to structure A.

10. The fusion transcript of claim 1, wherein structure A is a portion of a gene listed in Column A of Table 3 and structure B is a portion of a gene listed in Column B of Table 3, wherein the gene listed in Column A and the gene listed in Column B are listed in the same row of Table 3, wherein structure B is located immediately 3′ to structure A.

11. The fusion transcript of claim 1, wherein structure A is a portion of a gene listed in Column A of Table 4 and structure B is a portion of a gene listed in Column B of Table 4, wherein the gene listed in Column A and the gene listed in Column B are listed in the same row of Table 4, wherein structure B is located immediately 3′ to structure A.

12. The fusion transcript of claim 1, having a junction as described in Table 5.

13.-23. (canceled)

24. A binding agent that specifically binds to DI a fusion transcript of claim 1 or (ii) a nucleic acid encoding the fusion transcript or (iii) a polypeptide encoded by the fusion transcript.

25. The binding agent of claim 24, which binds to a junction of the fusion transcript or the cDNA thereof.

26. A kit comprising a binding agent of claim 24.

27.-36. (canceled)

37. The method of claim 39, comprising
(i) contacting a binding agent that binds to a fusion transcript or a nucleic acid molecule encoding the fusion transcript with a sample obtained from the subject, wherein the binding agent specifically binds to a fusion transcript, and
(ii) determining
(a) the structure of the molecule bound to the binding agent or
(b) the presence or absence of a double stranded nucleic acid molecule comprising the binding agent and the fusion transcript, when the binding agent binds to a junction the fusion transcript,
wherein a cancer or tumor is detected in the subject, when the structure of the molecule is the structure of the fusion transcript or when the double stranded nucleic acid molecule is determined as present.

38. The method of claim 39, comprising
(i) generating a population of cDNAs from total cellular RNA isolated from cells of a sample obtained from the subject,
(ii) combining a binding agent that binds to a fusion transcript or a nucleic acid molecule encoding the fusion transcript, with the population of cDNAs, and
(iii) determining the structure of the nucleic acid bound to the binding agent or, when the binding agent specifically binds to a sequence comprising a junction of the nucleic acid encoding the fusion transcript, determining the presence or absence of a double stranded nucleic acid molecule comprising the binding agent and the nucleic acid,
wherein a cancer or tumor is detected in the subject, when the structure of the nucleic acid bound to the binding agent is the structure of the nucleic acid of any one of claims 14 to 16, or when the double stranded nucleic acid molecule is determined as present.

39. A method of detecting a cancer or a tumor in a subject, comprising assaying a sample obtained from the subject for expression of a fusion transcript of claim 1, expression of a polypeptide of encoded by the fusion transcript, or presence of a nucleic acid molecule of encoding the fusion transcript, wherein a cancer or tumor is detected when the sample is determined as positive for expression of the fusion transcript or polypeptide or for presence of the nucleic acid molecule.

40. The method of claim 39, further comprising administering to the subject an anti-cancer therapeutic agent in an amount effective for treating a cancer or tumor, when the sample is determined as positive for expression of the fusion transcript or fusion polypeptide or for presence of the nucleic acid molecule and/or determining a subject's need for an anti-cancer therapeutic agent, wherein the subject is determined as needing an anti-cancer therapeutic agent, when the sample is determined as positive for expression of the fusion transcript or fusion polypeptide or for presence of the nucleic acid molecule.

41. (canceled)

42. (canceled)

43. The method of claim 39, wherein the tumor is a tumor from adrenocortical carcinoma, bladder urothelial carcinoma, breast invasive carcinoma, cervical squamous cell carcinoma, colon adenocarcinoma, lymphoid neoplasm diffuse large B-cell, glioblastoma multiforme, head and neck squamous cell carcinoma, kidney chromophobe, kidney renal clear cell carcinoma, kidney renal papillary cell carcinoma, acute myeloid leukemia, brain lower grade glioma, liver hepatocellular carcinoma, lung adenocarcinoma, lung squamous cell carcinoma, ovarian serous cystadenocarcinoma, pancreatic adenocarcinoma, prostate adenocarcinoma, rectum adenocarcinoma, sarcoma, skin cutaneous melanoma, stomach adenocarcinoma, thyroid carcinoma, uterine corpus endometrial carcinoma, or uterine carcinosarcoma.
